United States Patent Application Publication US 2026/0185093 A1 - sequence listing, part 2

SEQ ID NO: 118 - DNA, 21986 bp, unidentified
  misc_feature 1..21986: note = Fanzor polypeptide
  source 1..21986: mol_type = other DNA
cagcgccatggttgctgagtttgcggtaagtggcggtagcggcgggatcgccggcacgttggagttggcctcatccggcaccatgccggcccgatcagggctcatgccgcgagcccgtgcggcggcgcggcgtcagctgccggccaggcgcttctggatccctttcctccgtcctctcctcactccaccaccccttatctgcgcagcgctactgcctcggcgtcggctgcggcgacgagtgctgcagcgatggaaatttcaaaactcgctccaggagctcgccgcgtcttcgagtgctccgtgcgcagaagccctgcagtcgcgctacagggcctgccgctccgcaccgcttctccttttcccaagttcctcctccgcccgcgcggccctgagcgaccgcagaccccgcgcagcagccgcgccgcgagacgcctcaggttttgcccgccgcttttttccctcttccgcgctctgccttttccttctctctcttcttctcccttctccttctccttcatattcaggtacctacctcctatctatttctattcgtctatttgtctatttattctttatctatttattcactattcatctatttgttcattcatctatttatctatttactcactattcgcctatttatttactcgcctgtttgcctacttgttcatctgcttatctactatttactttgttccatttcatctgttcatttacctatctatagattgagactgcctgttcttatcgcaactatcgcctgttcttgtaggttcgaagaagaatcaggtacacgatctaactaactaactatctaactaactaactaagtaaataactaagtatagctccctattcaattttgaatttgaaaacccgtctaactatctcctttctggctagctagcagctacctagccgttcacctatgccccccgcctcttctgcttatccttagttgttcattgattcaactgactgctgtgccctttcttatctaccatactatctatctatctatctttctttctttctttctttctatctatctattcattgaattgaattgaattgaattgaattgaattgaattgaattgaattgatcgatttccgtgttctttctcctctttttatctctcctgtatcatttgagtcagtacacttacctacctatagtactatatagtatgtatatttcttcagcgaagtttatctatctgttattcttctttccctattctctaaccggctacaacaggtcctactatgtgccttaacagtcctaccctgagttagcaactgatagatggaatgatagtagcaggctcttctcataggtacagtaggacccattaagtgtacttaagggatactacgactctggtacggacaactacctactagcctaacggcgagagtttggggcaacttcagttcatagaacaggattgataggattggccttgaataatacatcgatcaattcgttgctctatgatattaaggttgttcttggcagagtaagaatcttatatggaggggatcactatccacaaattggttacgcctgagaggcttagattcggacttggcaaagaaaagcatgcccactaccactacaattttgtgaagcttttcatcattagcaggacgaccgagcaaaccgcaaggcaactccgaaaatgaatattatctgtagttaggctttgtttctataattgccgctacagtcttgtcatcgggccaggaaaaaatgttcccttactgccgaagaattagccatcgcctctacacacagacaccattccgaagacacttcctgctctagttttgcctgtattctgcttttcttatctcgatatggtctgcatgtgtgcttgttcagctttttaacaagtctactttgctgtcagcgccttcgtgcgttcaatgtgctcaatttcctgctgaccaattctaggccatttggagcctcgatacttcactgatcttgctctttaggatgcacatttgtctggtggttacattgaccataatatcgtttatggcgagaagaaacccagcatagcccttatcaagtcccttctgcccacaatgcaaagtcaagaatatacctcaatgcagatttactcacgagactcgacggcttctcattactcggagcctttcttcgcttcttttctgtgctgtttgcgctgacagactttgagtttgcctgtctatacagccgaaagctctcacttctcatatgtacgtgtccgagtgctgaaatccgacccttgatcagtcagagattgactatactgacgaaactcgggacaacacgcaactcgcgagattaaagaactccagacataccatttacatgtgctcccaattaagagagacattcgctttgcttgagcacaacggcagtactacactgttttctccactctcaggataacccataactcaaacaatttttattttttgaaaatgaaacctcaggctttttcctgaaaacaaaagttcagtaaggtctcttctcttcccatttcgtttcgtttcgttggttttctttccaagagtcaattttttatcatacagattttttgttttttataattatgtttgctcttgtacttgccatgttgtcttgtcacatataactcagagacatgattacaagcacgtaacaagttgtactgtgcagcaatcgcaagttatatcaagtttctggctgtaaatttcgttgtttccttgcctttgaaagaaagatttgaaacttttacgctcgatagcatcaagtacccaacttacttttgccatttccatcgtgtcgctaaacttgattgtcagaagtggccagatttgacttttcttttacctttgttgaacaataggcactacttaattaggtatcaaccaaataaagaaaaatattgatacgaaattttattgataaatgctcccaatcaaccatgactgacatttggcctaatgtcccgcacgggacacttctcaatttgagtttcctgggaaggaacgttctgcaatcagcctcactgatgaaaagcatttatttacaatggtttcgttgctttaattaagtatcagatgaaaggagaaatttaatcaatccatcaagtggttttctccaagctcgacctagctcaagctatgctgccttttcccaggaaataaaacagacaatagtttattagtatgcttgggccaaatttgaattatgattatgcttgaaaagagcttttcttttttttaagtgcacgaacacaaggtggaataacaatgacttccttgacgcaaactcttactaccgccgcattgtgtacggtcacaaagtgtcgattctgtgagcatactatttaggtttcgaatgcactgagacgcatgagaggcttcgacagggaactgttgctgttctttcattttccaagaaaatcaactcacaggaaactgcacgtgcattcttatggtgccctggaaagtacgcatgattcgatcgaggataacaaatacatttattaaagatagcctagtaggtgctagctcttagcttttattgcagaagcaatagattgaacagctactccatttggattgttgaaaagggcaaatcagaaatcaagagtttttggcatcaaacactaaattgacaacgaacctctctagcgtttatccttctgtttgttcctagactaccgggaagaaggctacaacttctcattaaatgctaccgatgtcacatggttccaagggcaaagagcaaggccacgaaggaagcaaaaaagatgcccaaaacgggaatcagtctgaccatgatcaacaactcctagtgcagcagtcacaacaaggtcagaaagaaagtattgaagaagatatggaaacgaacgaagaatatcagcatgcagctaacattatgctaccttgcaattgcttgaatcaaattaccatcaacattaacaatgaaaaaaccaaacatctcaggggaaaaggctcaagaaatgtgcgttttcttgaagctttcctggacataaaaattagtttttgttcgtcaatttccccgaaggaaaatgctgtgactataaagtcgcgccgcattgacttgaaaaacaacaagtgcccccaagtaaggcatttgctgagatatttaaagtcagcaactcgtggaggattcttaaaatacttcaccgaggaagaataccaaggaattggcactctcaaacagcgacgcctatgggatcagctcaacaagcttgcagccacctacaaggtccaggtgatacagcatattttaccgacatctctaatatatagggaatacaacgggaaacctctaagacgcataatctgtgttttggaatacccgggcaaaactctgaaatacgaaagggctgtgcgcaatataggtcaaataatacattcgagatttcgcaatgcatgggcagctgatacacgatctatggaggcaataactaaacactaaagctctattgcgccgctgtatgatgaagagaatcagccacactaccagtggcaattgatagaatgttcaacgaaacctaacaatttaaacccagcacataacatcagaacttgctcttcaaacgtcgattttgtactgcctttcccaaattaaattatcaaataagccacaaaacatataccaggagctcctggcaggtgcagtctttgatactgaaacaacaaggcaaacctgacttgaacttatcagtgttttgctgagatttctaatccaagctatcgatagacaagtcattgttgaagttcttgacattccattgtaagccctcaaaggctgaagacgtacatagggccataacgagacatccagttacgtggttgtgaagtgaaaaaactcgggaggtaaaagtgtacatatacattgaccagaacaaagtatggtgaaatctgaatggatagttgaagtagcaagctaagctaacctcttcaattgaaagatcaagtctgtcttagtcttctagtttaaacatgaatctgcctaccttgggcttgaagcccaagagcagcagatcgctaacttttaaagttctcaacccttccacaagcctcttgccttcatcctcatgatcaacttgtagctgaccaaattcgtcattcagcatacgtgccgcaaagtccaaaggccggaagtcttttgaaattaggaccatttcctattttaattgttcactttctgcaaagacaaatcataggactgatagttgagcccaaggtgatcaacaacgtgaatgtgacctgttacaaatccactctgttgtagtgtagaaatattacaaataggagaagaggatattttttttgaaaggggggagagtcgaacgttctaaaaatactgaaaatcacctccacattgcttgctgcaattcactttgctttgcatttgagatacattttattgtttagtcttcttcttgaagaacttcatataggcctatgttgataacatcttgttcgttgtttcagctgtccccagaacccgagcatatcaagcctatcagcttatctcgccatcaaagggttcatccaggcaagccttccacacaccagcatccctgtagatctctagcacaagtgcccagatgtcgctcgacgatagagaactacaatcgttcacctttgctgcactaaaacaattggcaccatcgtcataaatatctaccgaaaggttaagactaggtagcttcttctatgaagatggtacccactgatgcctacctggaacatcgggatttgccatgtacaataactaaaggtcacaaccacacagcactcgtaattctccagacagagcagtcattcaacaatgttttgcttgccgacgaacctgaagtggtgagaaacagtgacttgtagaaggggagagtcaggcccggaaatgaattctctctgcaaagcccgcgcggacgtggaagaaataaattaaaaccaaagagcttatatactatgcaaatattagtagtacctattagaatttcgttagagagaagaaaagaaagactatgatagtgctagtgtaaagtacagatgtattttattcctgatcatatagttcaccattgtaattaagttcattttcgtcctaaatgcagtgtaagtttgagacaccatcgggtttttggacattgcggcgcgagcaatcaaagtccaaactcactcggagagaagtgccggctgcgagcgagtccgtcagggcgtcacaagcgcgggactaactcttgaaggatcagacacacacatcggagacgtgtggcacggcatactggcctgtctttagcgaagcaaggtcatctctccaccctggagaatacacagatcgggactacttggccgccggctttcatatctgctcaagtgcttcttgggtacgcgctaagatttcactctctgaacagaaacaaaggtttgcttttatcctgagacccggattgtcgaagcgcaagccttttctcttttttgtgatagctgagaaagctcaggcaactggtgaagctaggccctcgtttatctgttctttgtgcttttcgaggaggttctttgctcgagttttgttttagtctattatacatatatcatatcggatacacatttggttgcagaaacttcagtcatcgctggtttcccgagtatcgtgtgcaaaagttacgtgctaactcacgtgctagaggaaattgtcagcaaatccagaagaggtttatcaacgttgaacacacgatggtatttgtgcaaattgaaccaaacttaagccgcgctgggtccaacattcggtcggagatagatgagtcgcgggatgcacagacgtcaagggccgaacgactggcaaggcgcaattctttgcgcaggaggattaagctattgtgcattgttatgctgattacctactgtgtacgcttcgtgctgactgtcactgtatggaacgtctctgattcttcattcacaattccattctcgcttggtgtcgcctattgtggtcttgttggtgcagctcgcatgaataaggacacactctcgtgcttttatttttgctgccttgcctcactttgtctttatgttgcgaatgtcttggtgcaaacaaaaatggtcattgatgtgcgaaatggcgaagaagtacatggcgaaactgagtccacacaagacgtatatttagtggttatcacagcaataggtatggagactttcttagcttttattcaggtgattggtgcgttgtatgggagagagcttgtccataaacatctcgtggtgcgccatgatgatgcacgccctcacatgttcagcgggaatgccttcagccttgaattcatccaacaacagcagaatcagtctcgttctgctgcagattttgcggcttcattaacggagagcctcaacacaaaaatgacaatcgaaagcattcctgtgcgtatgtatcaaaaaggtatcccccccgagtcctttcctgttacctccacaacaaccctttccccaagtgtggagttgtgtgaaccaagtgcaagcgcccatccccgcccacctctcccaccagctgcagctgctgccgcagcctcttcgacgcccctccctgtaccccaagctaactatgcagcaaacggagctgttgtgtccccttttgcggaggacgcagatgcggacctttgcgtgatttgccaagacgaactccgcgaccgcgcctcagttaaggtactacagtgcaaacattacttccatgtccactgcattgacgcatggcttgaacggtctttgcattgcccaatgtgtatgcaagaaattcccattattcgattctatgagaatgcctctccgggagaagctcctgttgcagctggtgatgccagctctacttctggagctggctcctctatccctagtggtatgcgtagtgacgaaagagctacagaactcacttccattcagtccactacaagccctattatagctgaagctgtcccatctcatgcgcagaacctaacttctaggtcgtcatcgtcagcttcatctgcgacatcagccccgtcccactactccgcaaaccacgattacgaggttgctagctttgcaacctcatttcgccacaacccgggcagagaacatcccgaccaaacaggtgaagaagcaagtaatgtacacaatgctccacccattgttttaccttcaaattcttcagccggaccatccgcaaaccactcaggatcccgaacacatcgtgatcttgcacaggtttaggacgaccttcagcggaatgttctttgagacaaatttcagtgttgtagtagtagtagaatcgcaaagttaaaccttcaatctgtcatgcccaaccattgctgtgctgtatcctcacaggtacgctcagatatgctctgatagtccttaataatttattgatcgttctcaagtttctagtatcttcctttttaaaagcgttgaatcatctctgagcccaagtagggatcaagaacacttcgtctttacctataaaaactgcatttcctacggtgacgtgggcttaaggcccaattgcaggttaataatctaaactgcgactcaaagacattttaaaataatttctttgtatatgtagcgcaaaaggatggcttcgacggcgtggatatcgctattggttatgtgtttgcatttgaggcatttgaaacctttggattccgaggttttccatggatggcaccagattcattgcatgtttttagaaagtgtaagcctttcggcaaataacaagcttacactaggggaaaagctcgcctttgtgaatgaacgcttggcggaatataaagtgacccagcgtcacattattcgaaacctctttattttagttcatcctgttaatttattaacaatttgggaggtttcaaattcaggcaaatggataacacggtcatattcatagagccaaagtacaagtttgtggcgaacctcggttttgctcttggtattgaggataacgcgtatgtatgcacgtcttactctgtagttatagcgaacattttagggttgcctgtttcgtcttcagggcttccttcgttttaggactttctgatgcatgcatcctgatgaagggccacacttcgtctttacctttggacaagtcataatgaaggcaacgccaatgttgtaagctcttctggtaacgtcaaaccattctttaacttgaaagggcctgtctttcgttggatagacacgaatatccccagcacaaaatagattatactctttcttcgcacgtgccctcttcttcctcgctaagttggcgctgtctattgtgcgctgctcgttatccgtgatgcgagaccacaaagacagtgacgatgccaagaaggtgtcagagtctccggcatgtgcatcttggtggtgtatcacgagttcttcttctttttcttttgagatgtggatgtcaacggcgacttgcgcaacttggtcgacaaactggctgacttcgtcacaggcatccagtaaggcacgcaatcccggccttttgaggttgaccccgctaccaatgtctttgtcgacaacacgctggagaccaaaagtctcgcgtttgagattctatattggttggcaaaggacactcggggagatactggtacagtcagagctgcattgctcgcggccaccggaactgcagcgacagatgcactcaacatcgtcatttgcatacatgcacttgtctcgcacttaccgatacgtcaaacttctggttgaggtactctcctggattctattgaaagtttgcttcacttgtagcgtttggaccttggtggttccttggccgtgccattttcttacccagtctccatgtcttagcagacttctatatcatttatttggagcagtatgacaaaaaccgttaaaatttcgataacttatatttcgatgtgcttgtttcatattaatcatatattatacttagttagatctttaataagaagtggagtagttaggtaagaaaatggggaggccaaggaaccgccaagctccaaacactgcaagtggaacaaacctcgaatacaaaccagcaaagttctttcaccggaagtttggggtctcagcaagcgcccttcggggctgggccgatggcggacgcgtgcgctgcgcgcgcttccccggaggcaagcgcatctacgcctgcgacgatgttgagcgcatctttgattgcggttccaccggccgcgagcaacgcagctctggatgtaccgttatctacgccagagtgtcctcggccaagcaaaaggaggacctcgaacgccaggttggcgatctccagcgcgcctacccagatgcttccgccgtctacaaagacatcggtagcggggtcaatttcaaacgccaaggcctgtgctccctactggacgcctgtgaccgcggcggaatcggccaagttgtggtcatgcaccgcgaccgacttgcgcgaatcgcagtcgacctcctggaacaccttttcgaaagaaaaaatgtcaaaatcgtggtacacggccaagatgcacatgccggagacgcagacaccttcaccaaagacctcctcggaatcatcaccgtctttgtggcatcgcatcacggaaaacgagcagcgcaaaatagacggcgacgacgcagcgaggaagaagcgagctcgcacgaaggcgcgcaagaccatcaagaaagaatatgaccttgtccgtgccaaaaaggtcagggtataccctactaaagatcagcgtacacagttgcttaaatggtttggtgtcactagaagagcctacaatactggcgttgcgtttcaccgagacgtggcgaagggcgatgaagaagccatcaaattgcatcaagaagcgtgcatcaaaaaggattccaagacgaagcaggttttagtagatgaagatgggaatccccaaacgtatggtgccctctatggagaaaagaaagccgttcgatctaaagaaaggcatgatgctcctgaatgggttctcgaggtcccacaggctatccgtgattccgggattctggatttcttcaaggctcttaactctggacgagccaaaaacgaagaactcgctgtacaaaagaaagttcatgagcaatctttttataagtttcggaccaagcgtgatgaatcacagattttcgaagtgaacgcacgtatctggaatacggagaaatcaaagaccaccagctttctaaaagagtttcgtacgcgcaaagaaaagttccccagtcagattaagaacgccatgcgtgtgcaaatgaatcgccttgggcatgtgtacttctgcttcttacgagaagaagaaaagcgtccaatggaccaggcacccaaggcgcaccacagtgtcattgctctagatccaggtgttcgctcgtttcagacgatgtatgatgctgatggccgcgccattgaatggggcacagggaaagattttagaaccatattctatctctgtcgccgcgttgataagatccaaagcaggattgataaagctcaagaaaataaaaagaaaactgcatacgatttcaacacccccttgaagcgcgccttctatcgcgcccaactcaagatcaagaacaagatcactgagattcaccgcaagctcgcgctttggctttgtgaaaactatcgtgttattctcttgcctaaattcgaaacctctaagatgagcaggaggatggagcgacggatatccaagaagtctgttcgaatgatgtgtcgttggtcccattttgggttccgccaggctctcattcataaggctgagatgttcccgtggtgcaagcttgttctttgccaagagagctacacttcaaaaacatgcaatgagtgcggtaccctccaccataaactcggggcatccaaggttttccaatgccctaatctcaagtgcaaccatgtagcagaccgtgatgtccatgccgcaagaggcatccttttacgctacctatccaaggacatgatttaaaaaaaatcatttcattgagtcgcgggttagtctaactagtccgtgatggagtcttagctccttctatgaaatgcaagttttgcaaattttgtagtttaaaatctaagagacactagtactatttggaggttatatatttccaccgattttatttgtatagcttattccatattgttagagtaggtatatatgttcaattgctctttttgtaaacatctaatgttaaacatgcggtcttagctcaggtgggagagcgtcagactgaagatctgaaggtcctgcgttcgatccgcggagaccgcaaaattatttttttctccccatatttttttttttctctataaattaaaatttacttctcccccgcctctaccttttacattctaccacctaccactcctgagaagagcatactaacaacgacgttatacctcaagactctgaacacagctacttttacaatcatttgaacggttgctttataatcatcttgggggaaattaaactggtaggtattgaagtctgtttaaatgttatctgagtcatctggctggaaaattcgaaaatgttcaattcccgagatggagtttaaactggattggaacaaatcttggcaagaggcatgccagaaatgccttcttagtgaagtgattatcaagagtgttaagttataaagttataacccgtgggaactatgggtccctcaagacagctgtttcgcaacaatacgaatatattaagtctactacacctactctaccttgaatggttctctatgcgcttctcgaacgtccagcatgaatgcattccacaatgccacaataggtacagacaaattattagatcttcaattgaaggaactagtggacaaatcattgccagcattcgctccattgtacgcactcaaggattttggacttacttagaatagaactagccaactagacttattgcgtggttaatgagccaagatccaaagttcacatgtgtagcacttagaatcgagcacggtggaatctaaatctgtaatcgaagcggttacttgtcaatcatggcggatacaagtcaagtgtgtaatagtccctaatttcagtttgccttcaaaattcaattccaagcatagtagatcactaagaccaagagcaagagcgctgaggtttttaggaaaagaaaggaagatcagaaatagccaaatctagcacgagaacgcggagatgactcaaaagtcttcaatcgcgagtcttaccaccaaggtggtaatacaatcaccctcaagttactagcggtcttagctcaggtgggagagcgtcagactgaagatctgaaggtcctgcgttcgatccgcggagaccgcattatttttttttaatttctattttttttttaaaataaaaatttctcccgaaaaactaagcaggaacatcaacaacgaaaactagggcagaaatgcacattacagtttatttatttaaaggaaaagttgcagacaagtcatttaaagtagtagataaattccaggcgcatctttcacacaccataaataaatctcttgttggtcaatccatatcagaaggtcctcatgttttgtgttttatgttttatttatttattttaaataattaatttcaaaagttagaattaaaattttaactaaataaaaaatgagaaagcgagttttagaaaacatacactatcataataattataactttaccgacgaagtattcagtcaacagccagcaatgacttgctcgctttccgttgcggtcttagctcaggtgggagagcgtcagactgaagatctgaaggtcctgcgttcgatccgcggagaccgcatcattttttctttcccccaatttcagttgattttttaatttttaatttttattaaaaataattaatcgaagctaccacatagtacaattcatttcgttacttttgagtcgtaaacttgtgacactagaaatttagataaccttgtaaaacagcgaactattgtacaagcaaaatgatgatactattatagagggtaaccacaaaaagaagcaactagaaagggtagactaaaagatatatgttcctagtatccctagtttgtatgctatggttgatttattatctctttatgcagtcaatttggaaagacttcttttgttagggatttgagatttcatgaattctcccacattatgatagaattgaaggattgatcgggttgtttcgtgaaagattggttttgtgttcatttgaaactttgcgagcattgccatcatctaattaattagcggtcttagctcaggtgggagagcgtcagactgaagatctgaaggtcctgcgttcgatccgcggagaccgcattaatattttttaattttaaacactactttttagtagctaggcagtacttactcttacctatattgtatatggttaccaatatttctctttatacacaatttatatacatattttttatttaaaaaaaattaaatccaaaaccatgacaagctaccatccatgcttatctgtataaagctctacattcctcatttcgactttttaagagacacacgaccacctaaatacggaaggtgaataagtagataaagactgtttgttctctgaatagttttttgttgttaatttttaaaattcaatgttctctagctagagatataaaaagtcaattcctcccaggattgcagtgcctggtcaaaataatgcacataagttgttcattggtttgccttggaaagatgatggatgttttgctcgtatctgtgtaaaatgtgtgctatttgttcaccctgaattctacttgtgtgggaaaatgaggctttgaagcagtgtaggagtcggattccggttctgtaaactgggtaccctgacgctgctctggtgcttcagctcatacaagcgaagcttatgaaggtagtgaggtttgcattaggagataaaacatgccagttggccattctaaaaggggggaaataaatttagcatttaacccgaagagaagagcagctgttcctgtcaaggagttaattacaatagtgggagaagcatacgaaatgggtgatcaagacgctcctgaagaggttaggggaattcacacaatttaaatgacttaaacaatgtctgttttctctaaatacgcatattaataatttgctgctttagtcagacgtaaactaaaaggtttagatacaacccagctaaagttgatataaatcatttgctccactcttgcagtctgagtatgacttacacaggaatatcgccttacttcatctgttaagctccattagaataaaggtagttgtcttcttcaaaggacgagaccatagagagagcgctaaagcgctgcgaacgtatatctcaaaattgcgagaggaatttaagaggttctatcgaagtcagaactgtacgagctatgttcttaataggcttaatctgcaaagtactacaacaggtactagctcatgacgttcttaaggtgattgtgagaccaaaaacttagggttgcatagattacagcccactcattggaggggggctgctgaaaaggaagggaccatcccgctaaattcactagagcaaagcattgcatcggcttgcaagttattttataccttttgagagcgttgtgtgctcttgttcacggggagggcgctttgttaagctgtcgccttccaaaatcttcaactcccgaatctcatccacatttgtaaatacaaatactctgtataataagaacttaggacacaatcaacattgcgttttcaaacttaagctcattgctgagattttcaattgaaatgactatcggacgaatcattgctacagtgcttgtcgttccattctgatccccgaggaatttgggagttacataggtacagaactatacaactaggatcacggttgtgtagttatgatagacgagaactaaaggcgtacaaatgcattcgttagaacccaatgtggcactatctggattgatggctaaagagacaagttaatctggctccttcaatttgtacagaaaaagtttctcttggcctcctaattgtagcatggatcagcctgcttcctaaggacagcagatcgccaacttttaaagataacactaatcgagcctatttccattcttttgccttcagtttaatcttagtcaacatctagctgaccagactcatctttcagcacttgtattagctttttcaatactgattcaatattgattcagtactgattctagtattccatcagaggaatataatttagacgacgcttgtatgcataccaaacgtactcttggctagcacaagcagcctaacacaagcagctgtagccatttttgatcgcacatacatctttataccagcccctactcacgctactcataatcgtagtgcgttctttaggatttgattcgacaagagttgctttaccttgattaaatcgatactctgtcagctaaaaacatcgtgcttatactgaacaacaccttttgagagagatattgaaaggaccctgcgtgtatcccccttgcatccgttatggtgaatttcatcctccattaaaggtgatttagattatgctattgattagcaaaagcttgagatccattttacattactagtgatgatggtcctaaaggttggaacttgtcgagctagatattgactgagcaaggctgaaccaacgacaaaggtcaaagaaacgatatgcttgctccctgtatgattttgtgatgaggatgctcactggccaggcgtacatgcagaagatcaacacaaggagcagtagcagaggcgagacaataagcgagctataatttatcagagaggaccgaagtagaagaaatatacggaggaggttaagattaagtacgctccccgagaggataaggaaggcgggctgcatgaagatttagacgaagcaagaagtacccctaaaaggcaatagaagacagagagtttcttcagactaatgactgcttatagaggcaatgggaccgactgggatcaattcaccgcatgggctgccggtgcaattttgttttctctataggatatacaggacatcagaggaaatgtccaacgacagcggaatggttaacccggtgccaaccattataaacgccgagcctgaacacacagagattgtgattgctgaggttgcattgcgcttgcttggttgtcttgcatggggcaagaaaatcgcttcctaatttgggatgacaatgagcaaagcatatcttgctaagtacgaagtcaagcgcaaccaagcgcaaccaaaccatttcgtagacagcgctccacggaccttgatttcattgagcgaggcgtcctatcagtgtttatgaaagaaaacaacatacctttttccaatctcttacttctcttcagcgcctgaacattgaccgcggtggtgctaggtaaggtacctttctttttatatctccaggtagccattatataataagagtaaagtaaaactagtcacatgtgactgcatgtcacatgttggagttttctaccaaatggattaagatgggtggctctcaggtgacacttgtgagggtgttaaagaagtagcactgcagaaatcgcttcaacatatggaaagcggtcttagctcaggtgggagagcgtcagactgaagatctgaaggtcctgcgttcgatccgcggagaccgcaattcctttttaatctttaacctttgagcaggaaatactatgtaaggatggcttcaatgtgcagctttatcctgcttttgctgagttgctgggtcatagatgctggtattacttcagtacttatattctacacttggggtaaaaagctgtagttttaatttattttttaaaattagttccgatgcccttcctcaagacagttttgctacttttcaactttgattatccctcagcataaacaagtgaacaacaagcttacttcggcagaatttaatagtatagtgtttataattgtttaccctttgtaaatatgtttatacctataagtactgtacatttgaacatagacaccaatttctttctctcaactcatggcgaagagaagttcagaatgtatgtttatgcgtaaaaacactaaatgaatctccacagtattctcagcaataatgaaaacaaaacagaatgccacctctgtttgaaactgagggttcgaactagattgcagaaagggggatctcctatgtcgtcttttcctatctcaaatttaccatattcgcaactaaaaaaaagaagaagagctacatagaaagcgcttaacacatttgtgcatatatacccagtactgcgtcgcatcagctctcgaaatgttcttaccttcagtctaaactattgtttgttattcaagttgtggtgggtaagcctagtaaattgcattccgcattccaaattactcttctgcatttgcacggagtcatcatgagtgaccaagcacccttccccaatatcaattgaaaagcggtcttagctcaggtgggagagcgtcagactgaagatctgaaggtcctgcgttcgatccgcggagaccgcaattcctttttcctactctattttcataattgttggcgatattatccatacagtaaatatatatgttcatgtgaacttttgagtaacatgtaatatgcggtcttagctcaggtgggagagcgtcagactgaagatctgaaggtcctgcgttcgatccgcggagaccgcattacctttttcttttcttttcatctgcaagatacattttttttttaaaaataaattatttccccggccctcccttccatttccttttggtatgaggtcaaatgcccctttgcgactgtcagtcacaatgaaggataattacacaagattctgtggattactggcttttcctccagccctggtctatatatatctttgtaatgctattacaaaaaccactcccaaatcaaagttaaattagcaaggtatcactttttgtttgaatcgaaagtctctgctattaaacaggagaaacgctttataaataaccatcccactctgggtttcaacaaatagaaagcggtcttagctcaggtgggagagcgtcagactgaagatctgaaggtcctgcgttcgatccgcggagaccgcattcctttttctttttcttaaaatttaaaatacccttctaagataggaagataggaatacaaaaattagaagtcactttttatattaattccttggatggtcttcatggatacagttctagaagcatacttatttgattaaatttccaaggtgattattctattatagcaaactttatatcatcaagctctacgtacctacatcagtgagccatagtgagctttatttttttccctattcctggtaaaagagtacaaaaatgacattcagttcaaaacaagaagaaactaagaaaagagatgaatctaggctatagatagagtcagtgatagacttaatcacacatactttaaacatggatgttaggaagcaagtatatagagtatgaaatgaatctctttctgcctttgtcatcttcgtggtagcgctcatttgaattctgcgaagcatcagcgtctcctatattctttaatttgtttatattaaattaaaaaaatatacaattacaattaatgagtgaatatatgtaactaggctcaaccactctcaacaattgaaaagcggtcttagctcaggtgggagagcgtcagactgaagatctgaaggtcctgcgttcgatccgcggagaccgcattcttttttcctcttttcttcctttccccctttttcctttatctatccttcatctaccgtttatacgatgtcatacaagtcttaattctcagtcgtgtcctttttagtgacatagccaatggaagtgcatgaaagatctgaaaaggcatactgtgttcttttatacttgaaaaatctgggttgatggatgtatttagaagctgattgaagggtatttatctctttattttgtataatttatcgttgtcgtgttttaaaaagagaataacaagctaagaagaggtctaccaaatgatctgaaaaatgaacgaaacagagaaacgacccggtacttttgacacatgaataatttgggcaagcaggactattttattttagaaatcgaatccgcttttgtagagaaagtgatgcgaaggcacacaacttctatatagtttagtccatgaggtagattcgagaagcaatatcttctacaatccagtcaacaccatcaaccaggccctcgccggtcacagcactgcacggatgaatctgccagtgcctgtttttaaagataggagatccaagctcaagaacttctgcaatttgctcactcgagagtgcaccagctaagtcctgcttgttcgcgaacactaaaactgatgcccctgcaagtttctcttgctgaagcaaattatgcaactcatcgcggcaagtagccaatcgctctcggtccgcacaatcaactacccaaataagtccatccgtctcttcaaaatagttccgccaataagatcgaattgttgtctgaccgccaacatcccatacattgagctgatagccccggtgctcgagagttttgatattgaatccgagagttgggctgattgtgtcaatgtcttctccgttgaatttctttagaattgttgtcttaccggcattgtccaggccgagcatcaggatgcgcatctgcttctccttcagcttttgcttcttcaagattgtgagcaagcccattttgccaggcttatgctttcacctatcttcagccttcacgttgcctggcacttgtgcaagctcccttggatgcccaaccggttttggccaagtctggccctcactaccaaaccgtcgaaaaaagcaaagctgataggtttctcttctcggcacggtgcgatctaaaagccttccgtctcacgcggttctcttgatataaacaccacggccacgtagttacgtggacgacgcggtttcgcgctcgggcagttgttcgttcgattgagttttgctgttgggctactgttgaggctttatgcttctcttttcttctgcggcccttttgtttcttcgcttcttaaacttttatatagcacattctatcagacttctattcttcaattcgttcataaagaatagagtgacaaactgagcaaattgtcactcctctggcagagcaaacattgcaatcttggccgcggtgaagcaatacgcttttatagggccgcttggcctgactttaagcaaattttctcctgaaagttcaagagaacctctaggccgtgctatcgcaagaatcctacacgaatttcactttgtaggaggcacttgtggttagaataaaacttgaactagttgtgatggcttcctcaggactaggccgagctgttttctcggtctacaaaccgaatttcatgggcccttctccacgtgttgaggattctgtggaaatgcaacaacatgtagtgcgcattctaaagtcctttgaacggctgacaggtcgcaaactgacggaggatcccgcaaaggattggcttaaaatgcacaatgatgaatccattgcactcctctcggttggtttccaagaagaccctatccttaactacggtaacctaggcgcgcaaaagctctttgaggttaactatgaacagctcaccaccatgccaggtcgccttacggcgggtccgatggagcgcgctgagcgacaagaattcctcgaccgtgtggcccgtgatggctttgttacggactactctgggatccgcactagcgcgtctggtcgcaagtttcggattaaggatgctcacgtatggaatgttcttgaggatgatagcgagaaaacgtgtggccaagccgcattcttcaatacgaacatcgagtatgttgaatgatgtggcggctttgctgccagtcacctcaccttcggaatcaatcagaactcaattgtgcaaatttttgtt

SEQ ID NO: 119 - DNA, 21986 bp, Schizochytrium sp.
  source 1..21986: mol_type = other DNA
acttctccagctgatctaccgaaatcagagccttccccagctactcttctggggtcagagcctgctgcaactgatcgcgggtcctcgagacgcttctttggaacatcccttgccgactcttcaacgcacccaggaggtgtctcgttatcctttacacctgcgtcattaattgttgatgagccctttctgttttttggaacccagagacgcatgcgctttgtcttcggagttgccatgtcagggcctgatgtagctgatttgcctgaatcagagccttctgcaactgatttactgaggtcagagcctgccgaagctaatcttctggggtcagagacttctccagctaagctgccggggtcagagcttgatgcagctgatctgtcagaatcagagcctgccgaagctaatcttttggggtcagagcttgatgcagctgatctgttagaatcagagcctgacgcagctgatctgtcagaatcagagcctgacgcagctgatctgtcagaatcagagcctgacgcagctgatctgtcagaatcagagcctgctacagctgatctgccagcatctgatctgtcagaaacagagcctgctgcaggtgttgcaggttttgcgtctgtgtctatggcaattgatttgtcagagtccagttttctaagaaaaatcaccgcaaccttggtatttgggtgggacagtatcctcacaccaaaaagaacataactaattttgtcgatgttaagaataccttttttaggatccaagatattacccacttcaccgaatttggcaatttcttctactcgaaaagttaggaaaagttccttcgcttggacaggtaagcaaatgtgcaggttcacaatgttacgagtcgggcatttggatggtgcttcaatgaagtataaatttggaacaccgttcccaatagacaaaccacagctgtttgatgacccaatcagatctctagcccacttttcctcaaaatgtactggtagtcgttctgataacagctccccggccacgaactctctcatattttcgttagccataaagttgctccattggtatggaccgttgccagccacaaaaatcatcttaaattcatcattacaaaccatttgagtattctgccgtgacccaatcttcctcaaatatttttccccaagtgacctttcttattctggacacagacaaaaaagtgtatcctctgttgtacctgattgtttaaccgattcagatgattcaagatagcgaacattaatgtgtagacgtgtgactatattccccccggtcgccgcatcattgaagaattcatttaattggtttttttttggaataaggctttcccatttccgctttctttcttctgaatttgtcaatctcgaagacgcagcgtcaaatggaagccaaataagtattgccctgctaaaaattgactcaagtgcagaagcaagacttaattggtctccactagttttcattccctcacggataacctcacgttgtatctccagtattttatcctgtgagagtggaaggtgaataaatttgagggtagttacttcatcattttgtggcccgttgctgcgatgttgggaagccagtaaacgctccttacgttccttctgaagatggcttaagagttttttcagggtttctgcgcatagatggctttctgagcagagatcctcgagaagggttgtgtcaactctgtgtaaagaaaggcgtaactctttgatgtttgaacgttttattttattaaacgcgtgaccccacgcatccgcactaaggtggttgccagatagatcgagtaattcaagtttttctttgattacatctttgatgaaatccgccgtttccctcctgtcaatcaacgcatttttcgcggagatcgactctaacgaattaagttcatccgttagcttctttatttttccatgatcaactatttccttgaagaagccctcgtcaaattcaagctgtttgacttgatctgctcgatccttcactatatcaacaaagattcgctcgaggtcctgggcttcacagataggcaatggcagcttcttcaatggtgagcagtccttcagcaatgatagatatgtgttgaataaactgcgattttgcctttttagctcctggctttcctggttttgcagctgttctggagcctgagaataacccatgcctccgttctgcaatcccctcatcaccgaagtcgtgcccacagcgagtgccggtggtcagcccctccagcctcgacagtgcctgctcttatgtgccagatcgttgccctagacactgctcctgtataattccaaagactcggagccttcgtcatgaagaatgtgatctgacaatccatgagatgagagcacaacattcttagatccaggtgtgtatcgtatgaatcggtttatataccagaaacaataccaatcaattgagaattacttactttttgctaacccgctctcaagctaattttgtcaccattgctgcaattgatgttactatgaccaagcaaaggctaatgaagatgctcagtattccatcctaagaatatcaacaaacacctcgaacgagctggaattgcgatatcttcacgactctgttcattgcttcgctcatgttcgttgactggtcaatcgtgattgacaaatgaatatttctttaacttttttaatttaaaaaaggaaagatagagtatatagtgctacctaactttatgcctagtaaattcttaagaggaaaatacaagagatagataaccacctttgatagcgagaacaatccatttttgcttgcccatgacgtgaagaggagcaagcatgattgcaatcatgcataaaggttaactgaataaaaggggagattatttttctatttcatgtttgttgctttttctctttatctacttgctcatttgaatttacttctctcccataattcgtttcgcttagatcagtgctatctgggcgagacatactgcagtgaactccattcatattgagataaggtgccaacttaaacagagattccccattaaaatatttgtgggcggcttcgagaattgagtgaagcagttttacagttgctagaaatcgttgtacttccctagcttcctttgctgtcttcgtcactttatcttgaatgttggctatttttttcacttcattcaaaggctttttgtatttttcgttttttttagtcagccaagttatggatgcagagcaaaagcaacttcttcccagggtgttcatatgagaacacaagggtacaattctgccatttgaagcgaaaatatcatcacagttttcaggttcctggaaatagtgatatcgatggggatcttcagacttatcctcacttttctttgcagaaaggagcagaagcagctggaggaccctatgattttcagtcagctttttgactaaaccatgcttaaataggcaatcctttctccctccttgttggttgctacgttcttctaatggttgctcaaatttttctgaagctttatcccagtagagaagcccatatacatggtataagtgaatctcaattctgatttctacctctgtggctttaagtttgatgtcttccgcgttggactcagtcgaagtttccaaggaagtcctgtaatgtgccacagattctgtaacagcttcagtcatcctcgaagccaaatgcatcgtacgtctccttttgtatgatatggacatgatgtactgatgcacaggtcgcttgagctcctgcatgtctttactaatattggtcctataaattaacatttcggtaccttgaagtggtccgtgttccttcttaaagttctccgagaacgtttctaatggtttaggacagtctggttctgcagaatggtaattacaatcatactcagatagaatgtcaaagcatttttttgaaaatgaaatgaaatatttgaagggccccgcgcctccattttcgtcggttgaggcttctccttccccttcatctgaactgctgttaaagctataggcgtcatcatccgagtggtgatcatcgttcggttctggttccttattgttagcgaaatccaaaaatgttgcgtcggcctgactgacccgctctccgctgctgccttgggtttccgacatccctgactgatcttcttgtacaatatctatcgaaggacaggcttaagagagagagaaagggagatggcacgttcacgacaccacgttcaaagcaatccaggcggggatcgaactcgacgaccttgctggcctgtccaaagagtttcagaaactcctacgcgcagcccagctcacgcgcctccttggttctcaagacagggttccaggatgtgtgctcagagagagcggggagcgacgatattgttttgcctggtccctaaatgcacatcaccgctacgatttttacttaggctagtttgccaagctaaactatagtagtaggcagccgatggatgtcttctgagaaaagaaatagtcgcgcgtttttgttttcaattgcagtatttatttctgctacattcacggcaatgaacaaatcaaacgctaaaacaagaaacaaatagtctaattcgttgcatgatactgtagccatgatcaataacataatgaagaacagccagcatcaatcaacctagtccgtaactaatagtaaagtgttatataagaagaacttagaagtagtagtaatgctattctctaagtagaacactcctgtttatgatgagataaataatttatttggaatgacatcagcgaatatcaactaacttctatttgatgcatcttgtagacgtcgataatttatttctcgtagaagaacgttatttgggtgagacttggggcataaaactccgtacttatcgaaataaggtgcaatttcaaataaagacagcccatttagaaattcatgagcagctttcgaaatcgagtccagcataatgacaattgcttcgaattgttctcttgtagagttttgctgttcctgcattttttcgaaaggatttcgatacttgttcgaatccactgataatagccagttggtagccattttacatggtttaggatttccccaaatattcatgtgagaacacaaggggacaggaacatggacagtccctgcttggcgaggtgtgcgagatgtcatgttttcatcatgtatattgctttcaggctcagtaaaatatattatctcattgatatgacgcccagtaccatttcttctcgaccttaccggagttgcactaagaaataaaagaatttgtacaaccttggggtttctatggagcagttccttcaatgccgccttcctaggaactgttgatggtatttcgacgttcaaacgggtggaaccatcttcaactctactcatcaagtaaagaagaccataaacatggcacagatcaatttgaattttgttcgcaacccttaggcttgattcttgaagtgtcctgcggcatttatcaacactttctttaaataccgagtgcattctggtgtgagcccactctttatgtatctgttcaaactgtgcagatttgacatactgacacagatgtttctgaagatctgccctggctgggtgatcttctaggtccaaaatattatcagcaagccttactatgttgctaaaatgttgaatcgagctgtgttcacgaataaatttggtgatgaatgcattaagtcttctttcttcttgatcatttgagtttgatgacaacttatactctcggaacagtgtttcacatgctggtgagaaggaaagtacactcccactcgtttgaactgcgagagtgtcaggatcagtacttctattgacgggaagatcctcggaaactttttccaagttcacgtcatccaagttcacgtcatccaagttcacgtcatccaagttcatgtcatccaagttcacttccggatttacaatgaaagtctctatatcttttgcacctgttgtcctggaattcggccatcatctcgggctgatcttcttcaaggggttccgtccaaggacagttcttgaaagagaaagagaaagagagagagagagagagagaggtatagttggcgcgttacctagcgagaataacaccacttgaaaaaagcttatccagttcacgaccaacctcgatgagcttgccggccggaccaaagcgtttcaaaaacgcctaaacgccccctaactccagcacctgcctttctctgaacactggtttccgaggatgtgcgctcaaagagagctgcgagcgcgagcgatatggctttgcctgattcgtgattatcagaattcaatatattactttcaaactagtactaggctctattagtatttgatttcaacgcttcttcgtttcctacagaggtactgcacaatttaaagtaacggaagttgagggtctgcggaccctttttaattgctactgcagtataacatgatctagccttaagtcggcgacttagagcgggctcaagcaaacttgtgaagtagaaaccaaccaatgtcgctggattctcgatatcgaaggttgatattatttttatgttattttatttttcactgattataaaagtatttactcacaatgaaagaattcaggtagaagagactaagagttgtcgcgagtcgaaacaggatcagtgccgcgcaaagtcaaccttaagcgcatgtgaaatgaccagcctgaaaagtgttacacttccacatgacaagaaatagtggagttttgtcgttggatcgaatattaaaaaatgcgtcatttatgttgcgctcccaggatcaatcaatttgtgtgaagtggactgaagcactgagtccacttctcagtttgctgctgcaaaacgacagtagaacgaagcatactagaaatgaagaagtacatacggtacggtacgtacccaccaaaggatctaagatttggaatgtatttaaagtagtccaacttgaggctggcttcgttcaataataactccacggaattgcaaatggagcgatgaagcacagtatcgcccttgcaagttggagtatgaaaacactgcgatgttgcagatgagcgcttgaatcggaattaatgaactccaacaaaactgaaggcatctcgcatgaggccatcgcatcactgatgtagatttactgttcttggaagccatagcgtgaacacaattctgtgcaaaaatctactagcagaagagctgttgcagctcgtgctatctcaagtcgacagacaagagtaacaggcgaagcagagccgtgtcgcgcggcgagatattcaaggggatgtcaggcgctatcgtttggtactgcgatcagaggttggagtggaggaaactaaaccatggtactgaatgtggttacggtgcaagtggtagccagtttgcagagttgataagttgcactgatggtggaagaatttattccatatgatgtaaatgaattaaatcagttttcgcagaaccccgattcgctttggaggaggcagtggcactttgcaggcaccttcaactagcatctatatggaatgttgtgctgttctcgaatacccgtcttacctgtgaagcgcctgcgtgtggagagagagctgtttgcttgatgcgtatccgctctgttgctgcctcaaaagcaactcgtgctgcgcagcaggtcgagcaggattgagagcgtggctgctttgaaaaaaaaaaaaaaaaaactaacttgttactgatgctaataacttttccttacattgatgttcagcttgagcattcacaagtcacagtgcgtaaccaatttcccatgaccaacttgcttgatcttgtttgcttcaaatagtatgcatagggtcttgctttctattagtgcgaaaagcaacaaatttgaacaagtagagaaaatggtatattgaattgatgtaattaagcgttaacgtgaaaggcattttctgggtaaaacgttacattgagcattttgatgttatgatgaaagcattaaaaaataaataaattgcttttaatatcgcctctgtataaagaaaaaacaatttgcgagaccttgaccattacttctctattggtgatcctggtggaggaacagtaaggaatctgtcagattcatcagattctgaattcccggaatactcattattgtagggccagaagaggtttaagtcagagtggcaaagattgggggaatttctcaaattgttaaatggacttttgtgcagaaggaaaggacggttctctctcttgtaaagttcctccaagttttccgaaacctcagcgtggaagattgggcttacaccctctttcgaaaacgtcctgtgaaaaagatacattgcaacggagtatctagctttgatatattgctgcacgccagggaatgcattcactgaggcttctctggtcaattttaatatagcagaatgcgtgaaagtcacatcaggcactgtccaaacatctttgttgacaggtggtgaaagttcaggatatttgaggaagtgcatgaggttttcatttgtcaagacgatatattgactgaagaggaacaggttggtgatatagacttgcagcttgcgccgagccataggagaatcgagggtgtaaatgaaatgagtttcgtgcagaggtatttctggctcaatacatgtgcggtacatgcatttattgtagacggaggctctgacaagttctcctctcaagtagattgctcttcgggcattgtaatctccgaatatacgtacagttgggtaggcaccatcctcgtcggcatcttcagacgcaggaacaaattcaaagcgaattggcttggggttttggacattgaaaacacaaaacaaccacttgaagtcggtgttcaatgtggttacgattctgggataagagtttcttagcatacttctactgttttgatacctggcagcctcaacagcacggcagacttgagctaaaaaggtatttgtactactggtctcatcattttggcaatatttcttgctgagatgatccgtagatgccagcgaggatgtactgatggtcgtttctgttatatgagatctggtcgactttcctggggagatttgaggcttgacattggccgattttgagggcggtgtagcgggagatttggctttcggctgaaggaagagtgagtaacgagctttgacttggtggaaagaatggcacagtgcaacttacctttatgtgcttaggcgtccccgtcggcggggttgtccgggctttcttgcttttcggagtagagggactagtttccagctcggattcatctgatgttttaacttgtgggaagtaaacgccagggtgtcgttctttaagaaggttgacgatttctgcgatctgattagagatctcatcgagttttctcttgtggtcttcgcaattccgacatgcatttagtccggtggaaggttccaatgatagtgaagagccacgttttttaccagacgctctggcatgtttgtgtggcgcaggtcttgccgtcgaggtcgatgcgagacgcatagcggcgattcttttggacctgcgaggcatggtgaatgctcaaagctgtcgcgtgatgcgatggggtttgaccttgacttcgaatatctggttatggttttgcaccgagcgcaaagccttgagtgtgcttctgtttaagcacttctttattaactaactaaaattaatcccttcaatcccccccataaaacctttcgtgctattatggcatcacggcaagatcggcaaagatctcagctccttttcgactttcagccttgcttcagcaagaccacgtcctgcttcgaccagatccaccagtcagcgtacgagtatgataaacccgtctactcgatcaagccttgacacagacttctaacctgtgcaacgcaatttctcagcccagttcgatgacaaaaaccgttaaaatttcgataacttatatttcgatgtgcttgtttcatattaatcatatattatacttagttagatctttaataagaagtggaggttaggtaagaaaatggggaggccaaggaaccgccaagctccaaacactgcaagtggagcaaacctcgaatacaaaccagcaaagttctttcaccggaagtttggggtctcagcaagcgcccttcggggctgggccgatggcggacgcgtgcgctgcgcgcgcttccccggaggcaagcgcatctacgcctgcgacgatgttgggcgcatctttgattgcggttccaccggccgcgagcaacgcagctctggatgtaccgttatctacgccagagtgtcctcggccaagcaaaaggaggacctcgaacgccaggttggcgatctccagcgcgcctacccagatgcttccgccgtctacaaagacatcggtagcggggtcaatttcaaacgccaaggcctgtgctccctactggacgcctgtgaccgcggcggaatcggccaagttgtggtcatgcaccgcgaccgacttgcgcgaatcgcagtcgacctcctggaacaccttttcgaaagaaaaaatgtcaaactcgtggtacacggccaagatgcacatgccggagacgcagacaccttcaccaaagacctcctcggaatcatcaccgtctttgtggcatcgcatcacggaaaacgagcagcgcaaaatagacggcgacgacgcagcgaggaagaagcgagctcgcacgaaggcgcgcaagaccatcaagaaagaatatgaccttgtccgtgccaaaaaggtcagggtataccctactaaagatcagcgtacacagttgcttaaatggtttggtgtcactagaagagcctacaatactggcgttgcgtttcaccgagacgtggcgaagggcgaggaagaagccatcaaattgcatcaagaagcgtgcatcaaaaaggattccaagacgaagcaggttttagtagatgaagatgggaatccccaaacgtatggtgccctctatggagaaaagaaagccgttcgatctaaagaaaggcatgatgctcctgaatgggttctcgaggtcccacaggctatccgtgattccgggattctggatttcttcaaggctcttaactctggacgagccaaaaacgaagaactcgctgtacaaaagaaagttcatgagcaatctttttataagtttcggaccaagcgtgatgaatcacagattttcgaagtgaacgcacgtatctggaatacggagaaatcaaagaccaccagctttctaaaagagtttcgtacgcgcaaagaaaagttccccagtcagattaagaacgccatgcgtgtgcaaatgaatcgccttgggcatgtgtacttctgcttcttacgagaagaagaaaagcgtccaatggaccaggcacccaaggcgcaccacagtgtcattgctctagatccaggtgttcgctcgtttcagacgatgtatgatgctgatggccgcgccattgaatggggcacagggaaagattttagaaccatattctatctctgtcgccgcgttgataagatccaaagcaggattgataaagctcaagaaaataaaaagaaaactgcatacgatttcaacacccccttgaagcgcgccttctatcgcgcccaactcaagatcaagaacaagatcactgagattcaccgcaagctcgcgctttggctttgtgaaaactatcgtgttattctcttgcctaaattcgaaacctctaagatgagcaggaggatggagcgacggatatccaagaagtcagttcgaatgatgtgtcgttggtcccattttgggttccgccaggctctcattcataaggctgagatgttcccgtggtgcaagcttgttctttgccaagagagctacacttcaaaaacatgcaatgagtgcggtaccctccaccataaactcggggcatccaaggttttccaatgccctaatcccaagtgcaaccatgtagcagaccgtgatgtccatgccgcaagaggcatccttttacgctacctatccaaggacatgatttaaaaaaatcatttcattgagtcgcgggttagtctaactagctcgtgataaaggcttagctctatgaaatgcaagttttgcaaattttgtagtttaaaatctaagagttcccagttctccccatattacccttagcctaagggcgcctgctcgggggcatgcgctaactaagggcgcctgctcagacctctaataaaagacacacttttgcttaacttggtcacgaaattgcgactgttctctagatttgcaaatcttcattgtccgcagcgccgaaggtgcacgcccaaaccgggagcatcccctttacggttctggaacccggctgtttcattgcggagccccgaagtgacggagtaaatcctctttttctccaaagactgtgttggcggcgatcaatcaatcaaagttgcatgcactcttaataaacacactcaaaacgaaccattcgatcactacgaatcaaaagtaaacctaaaatgtctcgattagaggaatacgcaatgcccgtcagtcgataagctgtgccattcctccgcgcgtctcactcctttgcagccgagcctctcagttcttcatcgcacaatggatttcctccttggagcacggagtcgcagatgcgtgccttttcacgaagtttgcgaagaggttctgtaatttgtctattggcgtgatcgatttgcactttgacgcatctattcagactcttcatcgtcgttgttcttgttgttgttgttctcgtcgtcgtctgtgtctttgcagacgagcaattccgtggctacaagctcgttcggctctgctcgacgtcaacacagagccacttggttttctgtagttgaggccgctgccgtcgaggctgcaaccagcgaggacagcattgctccggaggcaacttcgccttcgggattggactcgtcatttcactcgggttggttttggagaaggcaggcgagacttgcacaatggcgatggccacggatctaagctccgggtttctaaattcaaggcgcgctttctgcagcaaatgacaacttagagtcaacgcggattgtcttggaaatgtgacttggcagcacttcgcgcggttgatggcaaagaccaaggaggcggaaggcgaccgaagttggtcttggagtgccgtgcgacaagcttgggcgaggcggagtgaaatttggagcatggtagggctccgggtcgcatgtggaatgctaatgaggcggtcgaagaaggcgaataaatgctggctggactccgtcattctaggccatttgaagggccgcaatgcagtcaagctgagagcccaatcgtgaattttatccttcagagagatgtctttgttcaagatcttgcagctctttggagctattcgctaaaagcttcagttctccatggatttcttgcagaattagcgctatataacactacgtactacaaagatctcgacaggtgtacatacatgcatacttaatgaagcatctgtccgggctcttgaaaatatgtcttagagcgatcgaagttcacatggtctgctgagatggacgggattgccattgtagccttcaattggcattttggagtagtaacaatttgctagtcacttttctatggcttttctaggtaaagctttcccctagcaccaattagccaatactggtacgagtgttacccacggctctgagttccgcaacatagaaaacttctacgagctcgacagaaccttgtcttctttcttgactgcaacagggaaaattgcacgctcaagctggactagaagtctcttcgcgagagtgctgtactcagaagccgaaacgagtacgactgaaatattaattctcaaagctgaaggaagtcttggttccttgccttcagatcaagaatcacaacaaatcacgtgcagtgctggataaagtcgaactgaagatcttaggttgccaaagcacacttaacaggcgcacagtcatgttgtggtggttttcatcgctgcgttggcctcaggaagagcttgtctgggacgtactcggcaaaactgctctagctgagcatattgaagttgagcaggacccccaaaaaagactatcaaattgtagatatgctctacgtcgggcctctgtggagcgccaaatcgcccctgtaccagttctctgcagggacacatacgtaggctctccagcaaatgttcactacatgtctatccaaaacttttgcaacttttgtgatcgcttgaagcagctcgacggccaggatatcagagatgcttctggacaacgaatgaatattatattgaaagatcgtttgggcctgttgaaggattatgtatgcattcaagatagacttgaatcagaagatgattttcaaagccgatttcgaagacttgtagatggtctgagggatattctgaaagaatatctccagccatttgacaaacagaagcctatcagtagtgcattttctacaggcaaacctgatgatctcattcgcctagatgatggtaccgatgaatgcccagctattctggtatgcgaagcacaacggccgtcgtactttggcaatggctccagagatcttaccacccgatactgcgattttgattgcaccatgcacaaacatgatcatatctatccaacgtgggaaaacacacacgctcgatttgaggatgatggtcatatacaggtctcgcccattcgccagctctacaactacatgctcatcaatggactctatttcgggctcctctactctttcaaccactacgctggcttcattcgtgactgcagcggaaacctcaccatcatcgagattgtccgaagcaccgacacagttcctgcagagccggtgtcagctatgcagtttctgatcatgtggattcgtctatcgtatttatatccgaatggatttgaggcaagacacaagtttccgaatttcaatgtatgcacacaccacgattgtgaaaagcgacacctgccaatgcgtgcagcacaacatgcgaaatatcttgtccctggcaatatgaatctaggtgccacaaatacagagatgacatctcttccttcgtctcgcagtagcgagtatctcccttcgaatagactgccggtgttcttcgcagattctctaaatcgtgtcgtgcatttctgtgatttttactttgaaggctggaaagcaggcgacgacttcaaggccattgagtgggctcgtctacaagagcaaacgggtcttctcaagtacatggaccttgcaaaaccggctgatcttggcgaatatcttattgagccactgagaacggagctgcaagcgtacaaggctcttgaaaaagaacaaggttttgcgattccaaaggtatatggtggaggcatgatggcggacatgctctttggaggtatatttcttgaggacgtaggagacagtcttgaaatgctcgatgacaaggctatctcagatgagtacatgcggaggactgtgattgcattggatcgaattcatgatttgggcgtcctgcatggaaatcttgatgatactcatatattgattgacgagaagaccggtgatccaaagctagtgggtttcagtcatgcaaagttcaagaagaatatgaaggcagaggaatggagtgttgctgttgaggaagagaaagccatgctgagggaaattcttgagagttatctaaaccgggctcagatttgtaaaggatcttgtacttctggcgacaatcaggattgttccggcaagaaggttagcaatgtgataatatgaagactagataaagctacacaaattaagaactattttgccatgattttcatactgttatgggcaatgttgatggcttgaataggttttagctttgaaggtccaggctcttgtggcgacttaacgtaaagcttacaagttataatggaacaatggtaagtcaagtaagctctgtcgtgttttttttccagagcaaacgttttgaagatagttgctagcaatgaaagtgttgctcattgagacaccaaagtttatgtgttggtcatagactctgaagcgaaagcgactcggatggacgttggtatgattcatcttgatttagacgagaagttcattctggactcttagcagatacctttgcattcgcaagaaactgattaaaaaaatgaaattctgtccactcgacttcaataccgattctactttggcccagttacttcaaagcttgctttatttggacttctatcgtctttagaaaagtctgtcttattccctgcttgtggtggttcattttgcaaaaaaagtattcagacaaaagttaatagaaacaattttacataacacagatcaggatggggatgacacagtagtggtcgcggaggtgatcagccaaggaacgaaagaaaagccctgttcgttcgtacaatgctggtcgcaaacgctggactcctgggttttggaaacgaccggactcctttctatcatcttgcttggttttgtgcagacatggtcgaaacacaccgtgccttgactcttttctaagagcgtgattccatgttgtaaatccaatatccacttcagaaactattttttatattgtggagctctaagatcggccccccaatgaatcatagtctatagaatagtacctattggtgttctctgcaatgccagctatcgcttcaaatcctgtggtccaagcacaccatcaccttgactcttttctaagagcgtaatatcatgttgaaaccactataaaaagaaaaaggaaaaaaaaggtgcaaaattctaaatgagccatagtctaaagaatcggatccattggtgctagctgcaaaggcggtcatcattacaaacctgtaacctctcgaatgccatatcgctccacgcgtacgcgttgcttgtggatctcagtacctatatggacatggcagggaaaagacttcaagtaagtatttaagtacttgcaaacccaaaacctcaaacatctaaaatcaaacaccaaagacgactagtaagaactacatacaacaattggtgaagatggtaaacaccccttcccaagacaaagtaatagaccctgttcagacattcacagttctgatggtgtacttcattaatgtattggagggatacttgaataagaattccaagttgtccttttcaacaatgaaactagctggtgaccttctcacaaaagaagttcgtgacagtgttgcagaagttagtgtgtacaaacgcacatgtgatcacgaaaaatatgacatagaggcaaggatagagccagcagaagttcagcttgagcatctcaaattggcactgggggaatcgatgtgggctacattgtgggaagaagcgcttcaaaaacaaaccctcgtatgcaagccacaggattactccgggtattacctccctatcttgcgtgggtcaaactcatggacaagggtcattagttgctttgacgacggagaaatgatgaagaggaataatgaacaatttgtcgtgcgtatctctaatgtcgaaaaggtccaaaacctttttctcgaaaattcttatgaggcgaacgccacgaactttgtttacaagccaaaattcgaagacctcaacgaaaaatggttattccacggaacttcaaatatctccccagatgcaatttgtctcagtacatgtggatttgatcctcgagtttgtaaggagacgaacttaattggtcgttctatacattttgcccttcattcgcacatccccgttaggcattatgcacattcccatggcaagtcagagtatcaaataatacttgcacgtgtccaactaggaaaagtttttgaaaccaaaaagatgacgaatgctattcgacctccactcttaagcgaccaaatatatgaactatacgactccgtgagagtatcagcaacacatctagcaacagacgccaacaaagccactatttatggggttttcgattctcgtcaagctttgccggaatacctcattacttttaccaaggtactcgtacccaaacaacccagtggctcgaaagaatctaatcaatcgtcatcaagaggatcaggtggattcggatcttcgtcaggtggattcggatcgtcatcaggtggattcggatcagcatcaggtggattcggatcgtcatcaggtggattcggatcagcatcaggtggattcggatcagcatcaggtggattcgggtcttcgtcaggaggatttggatcggcatcatcatcaggaggattcggatcatcatcatcatcaggcggattcggagcatcatcatcatcaggcggattcggagcatcatgatcatcaggcggattcggatcatcatcatcatcaggaggattcggatcatcatcatcatcaggaggattcggatattcatgaggaggatacagtagtaactgaacaataagatttattctgactttgattattttttcaaaacccgagagtcctttctatgctcttaatcttgaacatccaacgtccatacctcatccatcaaactcttgggcaagtacatacgacacttgacagcatgtccctaagtatttaacccataaagtgaggcccactcacaggtttaaaatatagtacacgaatcaatgacatttcttaaatcatgttctcaaattgtcagcgcaaagggaggccactgatggcgtgggtgtcacgattgtctacgtgcttgcatttggggcattcaaattttttagatggtccatgcttgttgtgaatggtacttaattcattgaagcgaacctctcagcaaataactagattacaccggggaaaagcttgactttgggagtgggtgtttgtcggaagccgcagtggcgccagcgacacatcattcgaaatgtcttttgatgggtcttgtaaacttgttcaccatctaaaaggtttcaaatttaggcaaaagattaacacggaagttctcacatagccaaagtgcagtttgctgtggatcttggcagtcttgttcttgatcctgaaaagtgctgcctttcttttgaaccactttaccacggattttgtcggcgcggcgacagggaaatataaatttttttatgccttcccctgtgtcctgaatggctcgatcatcgtagttcgacataagtgcacgtcttggtccaaagcaatcgtgctacggtgcaaaccagctgcctggtttactgggcataccttttcttcatgcaagaaacagaaatagccaacacgccgaagcagcctagaaaaacaaaacaaaaaagatacactataccctattctgtaatgttagttctcctacaatcatagtttctgaatagactttgcatctcctaaacgcactcatgctcacctagtttctcaaagattcgctatttcgtaatcttggacaaacacccaatctctgccacacacatctgcagctccattggcccttcagacgagtgggccccagcctagtattcataagtgaacttgaaagaagattatgaaatataaataattggggaaaacgctgtgcatctgcactgaggtgtttaccccatcttgctggttcatcagtagttgtgcttgagatttatactatcacattgttgtgcattttgtcacttgagttgacagacatttgtcttagcctcgtagcatttgcagaacttgcagctccaaagtacttcatgatttaggtctcactaaaactaagaatatgataagtggtaggcccgtctttgttggtagagtaatatctaacatgaagtgctagcacatcctgggtcaaaatttagttgcctcaacttctacaagctagacagagccttaacatgtatcagcctccacagcacaacaagagcaagagatactcagaaccttaacaagcgtgctcgccacggcagactaagagggtgctactcggtctcaaacaagcctacacctcgagtaactcctctcaaagctgcttaaagctccttgacttttgccttcagaaccaggagtacttaaggctgactcgacaaagcacgtgcagtgctgcatacattcgaactaaaggtctggaatcgcccaagcatactgaatagacgcacgatcatgttgcagtggctttcatcattagtttggcctggcgaggaggatcttgtctgggatgtgattggcaagactgctctagcagagcacatcgaactcgaagaagaccctaaaaagagattgtccaatggaagacatgctctacgacgggttagtatggagagacaaaagactcctctaacagtcttgggtgcggataaatacgtgggctcaccagcgcacgttcattttatgtctatgcaggacttttgtaacttttgcgatagactgaagcagatcgacggccgggatattagagatgcttctggacaacgaatgaattttatattgaaagatcgtttgcgggtgttgaaggatgattgctgcgaatatcaagaagaattaaatcacgagagtcgattccaagcccgcttccgaatattaatagtccatttgattaatcttctgaaaccatttctgacccctttcgaaactctccttggtgttgacgataaaaactctacgggcaaacctagtgaacttattcagttgagaaatggcatgacaatctcggtatgcgaagcacaacggccgtcgtactttagcaattactccagagatcttaccacccgatactctgactttgattgcaccatgcagaaatatgatcatgaccattcaacgtgggaaaacacacacgatcgatttgagtatggaggtcatatacatgtctcgcccattcgccagctctacaactacatgctcatcaatggactctatttcgggctcctctactctttcaaccactacgctggcttcattcgtgactgcagcggaaacctcaccatcatcgagattgtccgaagcaccgacacagttcctgcagagccggtgtcagctatgcagtttctgatcatgtggattcgtctatcgtatttgtacccgaatggatttgaggcaagacacaagtttccgaatttcaatgtatgcacacaccacgattgtgaaaagcgacacctgccaatgcatgcagcacaacatgcgaaatatcttgtctctggcaatatgaatctaggtgccacaaatacagagatggcatctcctccttcgcttcgcagtagcgagtatttcccttcgaatagactgccggtgttcttcgcagattctctaaatcgtgtcgtgcatttctgtgatttttgctttgaaggctggaaagcaggcgacgacttcaaggccattgagtgggctcgtctacaagagaaagtgggtcttctcaagtacatggaccttgcaaaaccggctgatcttggggaatatcttattgaaccactgagaacggagctacaagcgtacaaggctcttgaaaaagaacaaggttttgcgattccaaaggtatatggtggaggcatgatggctgacatgctctttggaggtatatttcttgaggacgtaggagacagtctcgaaatgctcgaagacaaggctatctcagatgcctggatacgaaaggccgtgattgcactggatcgtattcatgatttgggcgtcctgcatggtaatcttgatgatactcatgtattgattggcgagaagaccggtgatccgaagtttgtgggtttcagtcatgcaaagttcaagaagaatatgaagatggacgaatggagtgttgctgttgaggaagagaaaaatgcactaagggaaaatcttgagagttatctcaaccggacacaagttcccgattgatccttcattttcgataatcctacggattgtacggggaatatgtcgcggcgagacgattgattggaaggtaattttagaaaataattccacacaaaacatcatttaggcttgcttcttgttcttctcgttatatcgctgcgttttcttagacatgccaatcatggaatcatatgataaagaatatagaaggggcatggttggagtcaactaaaaaatcaggactgctatt

SEQ ID NO: 120 - DNA, 21995 bp, Schizochytrium sp.
  source 1..21995: mol_type = other DNA
acagattggaaaaattaagatcatcatcatcaatacggcctcgattatcggtgcgaacgacactaaatactgatataccttcaaaaaccgtgtttggggatactgtactgcaaacaattggggtattattatggtcgaaaagatgttttgtgtcattacgactcacggcaatagtgtaagaagaaggatcgctctttgcaaaatcgctgaacttacgaatttcgtagatcccgtagtcaagtatgtcgttgatgatgacaaatcgatgacgctctgtaagcaacctcgccctatcattatcgaaaggcgtgaaatcccttctgagtttgtcaaaatcagagtaagcgtagtttctatccaccgacttggagataacgaaagcgcacaatcgaatgtacagtgtgtcaactaggtcatggtatgtgccaaagtttggaatgcaagttaaaaccatactgctcatcaatttgcaactttcgttcaatgttgcaataagaatcggggacatctggacacgaatctcccccgagtttgacctactccccgtcttgatgatgctgaaaatggatgatgctgaaaatgccggaatgctcggctgcttcaatcgttaggtcaaaatgaaaatcctgattatttgtagaaccaagtgctgaattgaaattccaatttttgtaaagaggcatttcagtgatcgccaagatcaaaagaaccttcagtgccctgatcgagtaatctctaatgatagtaccacgttcacgtcccgtaagtggtgcatctgaaaaatcaatggactgtgctatttgtgattcccacgtggcgagagaaaagatactcgaaagatactgaatcatgtcgtccctcatgtggaaggtatcgataagtagatcgggtggattgcccaaactttttagtgcatcctttgacgtttcatcatgggggttctcacgcagagtatcattgtaaagattgatatcacgcatcttgcaacagaagtcaagaagctttctgccgtacgaccgagtaaaaatatgtctcagagcaatcgtgtaaaaccgtggatggccacctaattctgacataagccctacaaaatattcattgtcgaaaatacacggccatgcttccactctttcatcgccgatagatgtattatcagggtttgaatatcgaatagcctgaaacagaaccttctttacaaactgaatttccaagtctcgaagtgcatctttataaccaataagacttcctaaggtatagacctttgtgccagttagactacttacagtagtcacacgaccgtgatcagcttcacttgcctcgatataactggtcatgcccgtgataatggggtagacgcgcatggcatcgtccctctgaagtaaaagtatatcagtacatgcctgagtaagcatctttgagcccaacatatcttctctgtactcgtctaattgaagaaacaagagatctatttcgagttttcttttcagcatcgcgaggaaatcgattagtttgaagtcgtatgcgtgctgcataagagactgtgcttcttggccatcaagacctttacgattcgtcgcggcataaagcagaacagcgataatatacgctattctattctctttgttgtcacaatcattacttgtatcggtgaaaaacagtgcagaacgtaattggacaactgagcccatgcgtagacaaaaataagacgcattcttagaatacgttctacgcgttttatggcacatagtcctcgctatttcaaatcctagacgcgtcttaccacatccacttgggcccttgatgatcggaatcgccaagtgctgtggattgatgttaccttggaatatcgtagataaacgatcttcggtgctttcgaagaattcatgagtcatctccgtttccacataatcaaatgtgtaattgattttaatggcttggtcctctatcgtatcgatgtattcaaccatgttctccaactcgtataaagttgtatgcgtgttgagtgcaggttcaatgaagcacttcataaggacatcagtagtttcatgaatcaattctgttacagtacttgtgttcatttcattaaatgccccaccgcgttccacctcttgatttggcgtcataatggtaccaactaatgcttcgattcctagatcagggtttccttcggctgctgcgaatatgaattcacatagaccacggattgctttagctagactatgaggagatgcacttgcagcccagatagttatctgttgcgtattgtacgtcccttcaataatacgaaatcgattcgtatcgggatcgtgtcgaaagccttcagatatagcactctttataaagtccaatgctgttttggcgttgctaatggtatgtgtgtcgacgtattggagacaggtgtctaaaatgtcagttctctgtgcatcagtatatggtctttgtgtggcgcgagacgccttagacatgattgcagcgcaaacaaagccattctgtgtttgcttcgttcacaagcttacctaatcaaggaatgttcttggcgaagaataaggtattgaggcaagtaggtatgaatcgtctagctaggacaccggcactgatcaaatagatccctccctcgcggggctagtcagctagccgcctagctaggtattaagcaaacgatcggagcgccctggtaacacgggagaaaatagagtggtactgagagttgattaatctatgttctactagagcatgcacctccatggcgttgttcactctcgcttactctgtcttcttcccattttcgttttagtcgctcgatattctatgcatcaatctaaaacttccaacttcctttgttctacttatttgtatatcctaactttaatacaatcaagcctaatgatcaacccccccccccccccccccaatgatttggaatttctatttgctgcaacgacttgtcgcttgaatacaagagcctttcatgatgcagtcgtcgggctaggtttaggcgatacgagatcattcgaataacacttattttaaagtggtttttaaaatgcagaaaaatgagtcaataaaattcttgataccagtggggccagatgtaatgagagattgtattacttggtttcatatcagcataaacttgggtttatgaagatctgtgtcgagtagcatcgcgattgattctttggtattaagcataatttgccgcacaaaatgcaattcaaatttatcttggttactatggacaaatagtgttcagcagatttatttcaaaatagttaacatcgaattctccaaggtactcaccgtcgtcataaattcagtgtatcattatgccaggttcgagctcaataggtactttttagagattgagtatgtatataattgattcgattgtacctcaaacaagaaaattgcttagctatagttgaatagcttcttttacgtagatcaaactcaagaagatgcaatagcttactgaacttttcgtagcagagaatctgcggatttaattgtactcctctgttctacaatagtacaggcaattgtataaaaaagatgataaggattagttcataaaaactttcatgagcaaggccacttcattacaatcataatcagtaagtacgtgctgtagatacatgatcatgtcgtcgtctctgaattcgttttgagtttccttttactttcctcggtgcctcacaaatctccatggcgatcgtttcttaagtgaaatagtcctctagcagtatccaagctagttatttttattcaggtgaattatagcttctattatcaatcaaatacaatttctcttctgatattacatttggaatctgcttgggagaatggtcgcataaatactaatgtttgtgctcctcgcgcactcaacagtggcccttgtcgattctaaataaaaatccctaaacaaaaatttacacgctcgctcattccttgaacaatgcctcagaggagatcatgaagaatctcgagctctactatgagcctatgactttttttgcagatgggaggataggactacaataagggtaagtaaggctagtctatctagctatgggatacaagagagcgcgtggactttaatttaagacgtgtacgaaaagaggatgagggaataaaatacgaggattattaatcaagagtttgagccacaatgagtgattgaaaaacgacgcccaatgcggattccgcggcaggatctttagggctttgacgacggcccacggcgcttcgaggtgaaagactggtgacagctgcggcgactgtgcagtacaaactgatagtcgaggccgtggatatcgagctgtgcgactggtgcacgaatgggaaagaactggagatccccaaagtagtgataaacgttttttgactgaccctgtgcctccgtttgtgctgctaggttgattgctgggggcgaacgcgtgcggaaggaatagcacatgaaaggtgtcgctgcgagatcataaagtaaaatatacactctagtactgcaacgaaacaagctctggagttaagaatggaaactccgcttctgggagggcccgagggcaatgtcgtgaacgagatcgaccggcaaagaatgcgagtgattaatggctcagcaaaattcgaacgctaccttctcaaggtcaaaactcaaaaatggttcataatttctttttggacaatccttactgctcttgggtttgtttatgcttcaacatttacaaaacttggtactgatcatttacagccaccagcatcatcgaaagcagctcaggccgtggctgagtttcagcaaagatttgaacttcaagctcagcaagtccctcttattgtgcttgtggaatgtagacctcaatccaactgcactgacgttcgccagcctgaactgaaagagtttcaccaagcgctggtggatcgcgccgaagaatacaatgaaacacattacaatgtgattgacattatgggttactatggctttgagggaacacttctggataatttaaagtcaggatttgtatcaaattctggggatgtaatgtttatcaccgtgatggtccgcacgtcaaatgagacttctgcgcgacgtcattttgtcaattatcttgatgaggttgttgacatgcttaacccagatcctggtcaatatgacatcggcctgacagggtttgatgctctcaataatgagaataccggagcttcatccaagcaaatcgcgcgtgtcgacatggttaccattcctcttgcaattctagtgctttggtatatggtaggctcctggcgacttttactccttgctaccatcaccatggtgataagtattctttcaggtatggttaccattgtattcttcattgagggtcttggtgcaccacaacccgagcctacaactactcaactagtccaagtaatctcgttggccctaagcgtggactataatcttttcctcctcgggcgattccaaactgaagtcaaacagggtgtatctcctccactagccatatatattgccatgcacagagctggtcatgtggttctgatgtccggcgttaccatttttctcgttatgctaggctttgtgattataccaacacctacaattcgcatggatggcgttattctttccacgggtattgcttgttgtatcgcagttaacctttcgttagtgccagctgctttgtacgcttggccaggtttctttgcacagaatggggcacactgtcgtacaggtgcgccagtataccagcaagctgatgaactgtctgaaatctcaatgggctatgccccccttgaatcctcctcacaagtccacactctggaaggcgtgcatcccatgtatcgcggatttcgattcaaactcacgaaattaattgtacgttggccgtacaaccttattgtgatcattggtctatatgccttggttgtgcctcttgcaattcaggtagcacgcattgacatgaaccaaaatattttacatctcctccccagaggctcgcagtctggtgctcgcctgtcgcgcatgtttgatgactttcctggaggcacttttgctccatattatattttaatgactgttcccaaaggcgaaagtgtcgtccgtgaagatacattctctctagctcaacatatcagtcagcgcattgtggatgaaacatcttgcacctcttcaggtgttatgtctcctgcttctgtgggcgggcttcacatcgggccccttgaagctacgggatttctcacccttgctcattcgcctttttgtcatttaggattcgtccgtgaacacatggcctgggcatgtcgacgcgctgtggagtactcttatctatggtcgaaggcggtcaacccgtcacaagatgcgcttcttatcgacattacagttccttttttccctttcgacgcccacagcagaagcttcatcagccatattaataagatgctagaagaggaggtgtttcgtattgctccaactaaagttgagctgtctctgaacggattcgaagtacttcccaatgcgattgaaagcgaggttttgagtatctacccgttgctcgtgacgctgactttgcttgctgtttttatcacattaggtgtgatgcttcacagctattttgttccagtgcgtctactactcacactgtttcttcctcttgcgtccgtatttggatttgcggtacttgtttaccaggatggaattctgaaatggacgggtattgcctcactttctcctgcgaatggcttcttatggtcaattcccataatgattgtgaccatgatatcgggacttgctttagactatgatgtgttgcttattagtgcgattgtagaacatcgtgccggtggctatgatattcaggctgctattgtcaaagccgtctgcgaaacaggctcgaccattactgctgctggtattatcatgttttgtgcttttggaggtctcttgctcagtacacaaaatgtgattaaccaagctgggtttcttctctctacgagcattttggtcgatacctttgttgtgaacacgctgcttgttccagccttgatttctatgggtgataagtttgcgtggcagccaatggagatgccttatgatcgtctcgtctcacttcgagctaatgaatttcctcaagatgaaaccccagagaactacaatgacgcttattaacgactcctgttttgttttagaaatgcctcttaacctcgcattcccaactatctctttaaatagatatcttcaaacaagaggatggtttttgctgacatctaatgagggtgttccactatcttttagaagaagtgaaggtgtatattttagaatgagaattgaattacaggtagaagtgccatggtaaatttgaacaaatttcaaaagaattcgaattaaaataacgagacagcaacgatctccaccttgttttctgcaccaatcgatactgtaactaccatatcactataccttgcaagacgcttttggagtgggtaacgtagcttcccttacatattgggaatctagcatcctggggcaactatgtcgcataataatcgccattgaagcaacgtagaaacaagagacgaagcaatcacagctattctctccaattacaagcgtggcagtggaatatttattttaaaaaaaagcgacactttgaaaaattaagatagcatgccaacatgtttatctgattagctacgttttatggctaaacctcggcgactttagagagcgaattactctgcttccttctccagaaactcgcgaacgcagtcgtgctcatactgcgtcttgcaagctactacgagttggtccatgtcccacaaattaagctcaggctcgcgtgccgcacgtgccagcacggtagcaagtgcccgtgcagactcgcgaacagcctcgggatcaccgcgaggaagattaccaagaagtggcaagaccaacgtgtggatgtgtctctcgttcctggcacgatcaagtgccgcgaggtagcggtcctccagagtctcgcgagattcacctcccctcgagctgacgatgtggatgatatacttgcttggcagttcgaaggcaggcgtggtgatgaccgtcccggtctcgagcatggagatccttcgctgcgccatgaaagtctcgcacgaaaccgctaggcgcaggcctgcctggaggaaggcttgctcccatactccacccgggaatgaattcacgaggcttggggggcacgaacgcacaacgcagtcagcagccatgttagttggcacgccctgccagacgcagatgcggctgcagagatccccaaaaaggcgccagaggggctcatgctgcagcatatgatctatatccgaagccgcctgagttctgacctcgttcatgcgcatgcgctggtccatctcgtccctcaagctgttcaggctctccagcgactcgtgattaaaggtgtttgctggactttgcacagacctcgatcttctacggcctgagggtatgtcctctggagcctcatctgaattactatcggagccattttcatcagaatctccgcgcgaagagtcctcatccaagtcgctttctccatgagaggatcgactgcttcgacgcgacgactccgctgtgatgcgaacacaatcttcgagctcttctggagaaggaggaggatcctgaagaggagcctcatcgagccactcaacagtgttctcaaaggtcgcttgaatctgccaaatgcggccatctggcaagatctgaccggccttggcgaggcctgatgcagggcaccggtacgtcacatagccaaacttgctcttctcgtgaccaggagccaagaaaccgtgcgtcaatgcagctacccgaaggactcctgcagactgcgtcgagaacgaagtcatcgtcttcgaattttcaggagattgcacctgcgaggtttgcgaggctgaagaggagtccgaggaggagtccgaggaggagtccgaagaggagtccgaagaggagtccgaagaggagtccgaagaggagtctgacgactccgaagagaatgaggagtgcgacaacggtgacgaagaaagcgaaggtgaagacatcgaagcaggttcttcagaagacctcaggaacagcgagttcgaagtcttatacgaagacggagatgaggacgcagcgagagagtgagcagtggaagaaaattcacagagggtcgagccagtggtcatggaggagcagcaggaggccatgggcgcaggccgtcagcctggccgcctcgcgtggtgccgacgggaaggcaccgtggcgagaagcgtcgtcgggagctgaggggcgtcagcgtaggtacgagcggctgcgcggtgattgtggcggaggctaagagcctgaagagttccacaggtgcaggtgcaagagcaactgccttgcttgcgggcagcgagggcgactggagacgcaagcgcgatcgggctttgcccttcggacactcagtctcccttttactattcgcagttcattccatttcatttccatttcttttcacatttgaggaaattaattaatcaattaattaattacactaatcagaaagtaaactctgagtcagttcagtttcattttgattttgtattaactaaaattaataagcgcatgaacagtagggtcaaaaaacgtaaaagttcgataacttatatttcgatgtgattgtttcatattaaccatatattatgtttagttagattattaataagaagtagaggttagataagaaaatggggaggccgaggaaccgacaagctccaaacactgcaagtggagcaaacctcgaatacaaaccagcaaagttctttcaccatctcattggaaacacgctagtcgcttacttgatgcttcaggtgctgacgcgtgatttgcgggggagtattgaagtaatatacagctactgtctaacctaacctaacctaacctaaccaagccctcatgtccgacacatcctgtgtatcggactgacatcatacattcattcctgcctgtatccagacctgaaaccccaataactcatatatcatcctctttctctttctcctgagttcgtcatccttgtcagactacctctccacgcttcacagctcaggctactctgcaataggaagtttggggtctcagcaagcgcccttcggggctgggccgacggcggacgcgtgcgcttcgcgcgcttccccggaggcaagcgcatctatgccagcgacgatgttgagcgcatctttgattgcggttccaccggccgcgagcaacgcagctctggatgtaccgttatctacgccagagtgtcctcggtcaagcaaaaggaggacctcgaacgccaggttggcgatctccagcgcgcctacccagatgcttccgccgtctacaaagacatcggtagcggggtcaatttcaaacgccaaggtctgtgctccctactggacgcctgtgaccgcggcggaatcggccaagttgtggtcatgcaccgcgaccgacttgcgcgaatcgcagtcgacctcttggaacaccttttcgaaagataaaatgtcaaactcgtggtacacggccaagatgcacatgccggagactcagacaccttcaccaaagacctcctcggaatcatcaccgtctttgtggcatcgcatcacggaaaacgagcagcgcaaaatagacggcgacgacgcagcgaggaagaagcgagctcgcacgaaggcgcgcaagaccatcaagaaagaatataaccttgtccgtgccagaaaggttagggtatatcctactaaagatcaacgtacacagttgcttaaatggtttggtgtcactagaagagcctacaatattggcgttgcgtttcaccgagacatggcgaagggcgagaaagaagccatcaaattgcaccaagaaatgtgtattataaaggatcccaagacgaagcaggttttggtagatgaagatgggaatccaaaaacacatggggcacttggtggagaactgaaggccgtccgatataaagaaaagaatcctactcttacatgggtgctcgatgtcccccaggctatccgtgattccgggattcgggatttcttcaaggctcttaactcgggacgagccaaaaacgaagaactcgctgcacaaaagaaagttcacgagcaatctttttataagtttcggaccaagcgtgacgaatcacagattttcgaagtgaatgcacgtacctggaatgcgaagaaatcaaagacctccaactttctaaaagaattccgaatgcgtaaagaaaagttccccgaccagatttcgaacgccatgcgtgtgcaaatgaatcgccttgggcatgtctacttctgcttcttacgagaagaaaaaaagcgtccaatggaccaggcacccaaggcgcaccatggtgtcattgctctagacccgggtgttcgctcgtttcagacgatgtatgacgccgatggccgcgccattgaatggggcacagggaaagattttagaaccatattctatctctgtcgccgcgttgataagatccaaagcagcattgataaaaagaaaactgcatccagtgataaagacaatttcaacacccccttgaagcgcgccttctatcgcgcccaactcaagatcaagaacaagatcactgagattcaccgcaagctcgcgctttggctttgtgaaaactatcgtgttattctcttgcccaagttcgaaacctctaagatgagcaggaggatggagcgacggatctccaagaagtctgttcgaatgatgtgtcgttggtcccattttgggttccgccaggctctcattcataaggctgagatgttcccgtggtgcaagcttgttctttgccaagaaagttacacttccaaaacatgcaatgagtgtggtaccctccaccataacctcggggcatccaagattttccaatgccctaatcccaagtgcaaccatgtagcagaccgtgatgtccatgccgcaagaggcatccttttacgctacctatccaaggacatgatttaaaaaaaatcatttcattgagtcgcgggttagtctaactaatccgcgatcgggtcttagacctgctatgaaatgcaagttttgcaaattttgtagtttaaaatctaagagagcgaataatacagagaccatcaacgaatgcccttccttcactcatccattagctccgcagcggcgagggaggtctcacaattgcaaaagaagaaccttgcacacgtgggcatcttgcccagatcttcattcgtttgcttgcttatcgctgcgacttcaggtccctgtttggtggccagtctcgaagtgaggctgttgcagtctgcctaacaaggtgctatggactcctactgcttcgaggaggagctgtaacccaattctgagctgtgaaccaaagccttttcaggagtctgcaatgacggtggttcatgaggagctcagacaatagaggcatcgggcgctgggccaagcctgggctgcctctcttcgcagcgccgagtggtctcttcgctggcgcatgataaagtctttcgctgcgtgctttacaactacaggtgtgctttgctcataattattggcatacctaacttagaactttacttttgtttgtttatttgtttggtaaagaaaagtttacgtttgtaaagcatactattattggctctaggagccgcctagcgttttctaggctcccggtttcgctctttcttagtttgatcagaatgaaatgatgctttggtttggattgtagacaagtaagtttaagcaatctgaacaaatggaagaaattatggttctctattgaagggggaaaatacttcacttgcgggagctgaatagttcacttgtggagggaagaggcgactgttagggcttgagaggaacgaatccagagcatccactcttatgctccgcgcacgcgtaattcagcccagactctagagaagacaccgaggaagctcaagagagcactaatcgtgggctgtttggtctttatgagatgttagttatgaagtggaaggcggaggagttcctgaaaaaccagatatgaattgctttggttgaccaaataggtacataacgaaaatccataagtcgaacaaaggaattttgtaagtgaagtatatggaactcacaagtgagacaaacatttattatccatagtaatggttatctctgtaaatgggttatagagaactatacagggcgcgattccggcgtataactgatttttcaagataacatgaacagcaaattgaagagcgcaaaacatcatcgcggcgcgagcaagtgctctgcgcgcgaccaaaacacctgagggattgcgtgagatttaaacccttcaaagtgcctgcgaccatggacaacgacatggaatactacgggtcggcctcccaggcagcgtcagactcgccgtcagatgtgctgcgagacctcttggcggctagtagtgggcgtaacgacagcggctcagccggtgctggtgagactagcgatgttgagctcgaattagagcactgggagagatttgtggaagctttggatacgagggcgaatgccaccaaaaaagctgtccaaaatgtgcttgtgggacaccaccctgaatttgcagacaccttttcttgctcgcaagaagttggagcccaagtaggcaagcttcgcgaggatttgcgacaggctatggacgaggcatcatccgaagagtcctttcagggagctggcgttcttttcttggaggagaaaaatcgcattcgaggccagctgcaaagactcagtggactcatcgaaactcttgaagaaatgcaagctgtgcaagcttcacttgatcttgtggacaatgctattgatgcaggttctcttgcagacgcaggaagtggactccgctctgcagaggatagtctggatagtatggtgcgtggaggcggcaacttcgtggactcaaaagtcagtagggccgtgagagttcttgtacgaaggaaaaaagccaagcttcaagctgctgcagaagccctcgttcgagcaagcctgcgcataaccgaacgcacgattagtgtatcttcagttcgaggtgcattcaaaatccaagaggcatttgcagcactcgatgcacttggcacgctgcgcgcactagctcggaaagagatcggcggtcctttgcttcaactcgttctcagacccatcgtagcagatggcactctgaactctacaacctcacagactgaccgaagcatagagatattctttgcaaaatcaacgcagaccgaagaagcacgtgctgcgtcgcctcgtagccacgacatggagctccgactcgaacgtgtcttcgagcacgtgctggagactcttcgttttattgatgcaaatgtctttggcggcaacgtcgaatggatggctttactttctgacagtgtctggggccaagctgacccagatggtcctggtggattggcagctttgcttcgtgaaaccctcgtcaatgctttgcctgaagatccgtcactccttgcctcataccagggtctggcactctctgcgaaagaactcgaagacgttttagacgaaatgggacttgccggaaacggccaacgcccgttattggcctatctaaatgatctccacggtcaccttgcaaagaaacgtcgttcatattaccttgagaaggcgagaacttatatgttggaggagtacagcactgcagaaagatctttggacgaagaaccggagtctgaactttttgaactcttagagaggcttagtgaaactggagatcagggtcctggtgtgtttcgggtgcctgatatgaaggtaacacagtgtgcaaagtctgtccttcgcctatgctaccaatgtcttgaagaagcagttcgcacgggaggtagctcggaaactgaagaggggacctctctttcgtcagtattggtgcacacgtgccgtgatatgatcgaacttttcaggattcttgtcccggcaagacataaacgtgccctgtcagattccagcaatggccgcctggctttgctcctgcacaacgattgtatattcattagctgtcacttggttgttattgggtttgtctacagacacaggcttcctggcaagatgcacgaggcctttcttactgtagatcttgtccctagtttacgtgaactatcagcaacacagctcaatacacaacttcgtctccaatccgagcgtttggtacgggagaattttacggattctgcgccctcttcaccatcctcgcctctttcaagcagcaatcctgcaaaaggaaagcttcaaaccccagtggatacgattgcagagcgtctcgaggcgtgccagcgtggcattcaggagctcgcctctgagtttgatgagatccttgaggtcgatcttgccgctcaaagtttagcatctgttgtgaatagtgttgtggagggcttcctctcttttgtgggaagtaacttggcatcgtctcgagcggcagctgcgcgcgcctcacccgattcagatttgaccctctcttcaaacgagatcagctctcttcgtgaaagtctgcaatctttcaaggatgttgtgtctagggaggttttgcagcgcctgcgtcatcagaaggaccgcaatgaaattgatcacgtttgtcctggtattctagtcctcacccaaatcagtgcatgcttagagcggtttttgtctattcatatttttcaagataaagtcaaggctggcgcacttgcagccctgaattcccgccaggtccgcggcctcacgactttcttgttcccttctgattctcctctagatgcgcattaaattcatcactgttcaccgaataacccaccctagcgaaaaacgttcggattctttggaactggttcacagaagaggcgaccttcatcacgaagaagctgcctcaatttttctttgccttgggctgaattcttaccatttagaacatcgtttttgcgtatcatactaccgttcccaaaattgctaaataaaccatttcgtattagctttgatggtgtgctcttctttttaaagaagatggcgtttttgatgttttcatgtctggactagaaaagggcattgcaactctttcaaggttcaatcatcttcgttttcaatgaggtaatgtgaaaaatgtttaggagggtgcattatcaaggggctaacgcagactaatattactgctggaaaagatccaatagacgtgtgtgatgtgtcacagccatagaatgacatgttccactcactgctggaaggagatcgaatacgagccagtgctgggatcctgaacagccttaaagttgtcaagactcaaaccaaacttgcccaaaactgtgttacccagatccttgagttttcccatcatctcttctttaagtttttcattcttttcctttacagcggcatcaacacgcttctgctcaagaacacctgtacgaaacgaggggtcgatttccacgacttggttaagatctgtgagagcatcgtcaagttgatccatttcctcataaatctttgcacggcgcatataagccttaatgtatcgtggatcaagttcaatagcgtctgagcagtcatcaagggcatcctcggtacgatcaaggtgcaacagacaagcagcgcgattgttcaaaaagatagccttgttcgccttaaaggtctccgtttcaggtgcatactcgagagcctctgtataaacatcaatcgcctccaggtattgcttccgcttgaacaagttgttgccttcctctttaagctcatttgcgcgcacaccattcttctccactagacggactgatcccggatggttgacgtactacgagtattaaaatggtcgccaatatgagaaatatgtaaattgtcagtattcaggaaactcatattatgccgtcctctcggaaggctttcacaaatgtttaaaaggtgcccaaagtaagccaacttactgtttccaaatggcgttccggtattttagtgtcaccaaggtttgctggatgaattctgttttacgaacatcacgcaggactgccacgtcagtcatttctgaaatcagaaacgatatatcaatcgtctttgcacaattaattctgtacgctcaaccttcttcttaaatgccctttgctacaaagctcaggcttggagctgcttttcgtgtaataaaattgctccatgctggctcacttgcaaaaaagtcaaaatctcccatgccacgtcgcttttgctaatctttgacattcttgtcacgatttcaatcgacataaataaccatattccctttctgcccatggtttctctccgcccttcggatcccagaggtagtctacatacgatcccttccgagcaagcgacgctcagagcactttcgtcgattgaccatgcacttacttttcgatagagatgttttcggtgggcttttctgccggctgcacctcaacctcctcctcctcctcctcgaggacgttgtcctcttcgtccgaagacggtaatatctcgatctcaggcatcttgctcaaattccaatcgcaagcccttttctccttcgctttcttctattcgggtctggatcaccgactttcttcttctctctgttttcgtcttctttttctcttctgttgttctgcttttattcttcttctttaaacacatctaggcctagtgtattgcctagtgtctacctattagggtaaaaacagcgaatagacgtttaatttattttacttgcagaacatcgatcaagccttgtaagacatgttcacgtaaactgtgactctcacgctcgaaagattgtatccaagcctgccttttcagctctggcagcaacaaaatttgacggattttgtttgggttggcgttcgtttcttgcgagattgaactttcttggctttcgattttatttcgttgattgtttgttcttctagacggatataatcatcataataaaaatgaaaatatcgagctcacgaagaaacacgaagaggcaatcaaatccttaaataggatccctggaaacctcgattccaatccggagacgagacttcgaagagactcgcggtgctaaagatgactctggaggactggcctctcttccgccagaccgggtgggcgccacccgatggcgtgaactatcttgctttgggcctcggcttcatcgtggcagaacagacgctggaaatcgtgctttctctgcgccaacgaggctatttgaagcgcgacaagcttccggagaagctcgaaaatgaggttcgtgccatcgacgacgctgctgcacctgaaaaggctgctgaggcacccaaggtccaagatatgggccgcgaagaaaaagacgctgcacccaagactctcttggagcagctgcgcgctaagtttcacaagtctcaggcatacaatttggataagaacacactctccttcgttaagatggcctatggagtcgtcttaagcgcaggtatgctgcttagtggctttcacgtctggctttgggaccagtctgagaacgccgcagctagcatctttggtgtggaccctgcttctagtgagctccttgtcggtagcttgttcttgctcagtcagagtatcgttggatctgtcatgtcgctcccgctctcaatttacagcacgttctgggttgaggcaaaacacggttttaacaagactacccctggactttacattagcgacctgttcaagagccttactatcgagaaccttattgttattccacttatggctggtattgtcaagcttgtgcgctggggtggagagtacttttggttttatgtatggggcttgttggtctgtttttctatggttatgatcaccgtgtaccccaactttatcatgcctctcttcaatgagtacaagcctcttcctgatggcgagctcaagtccgcaatcgaggcattggctaagcagctcaagttccctctcaccaagctttacgaagtggatggaagtaagcgctccagccactctaacgcttatctgtacggattcctccgtgacaagcgcattgtgctctatgatacgctgctccgaaacaaggaagagcctgctctcgaatgcaccaccgaggaaatcacaagtatccttgcccatgagcttggccactggagtatgagccacacagttaagggttttgttctacagaatgtcgtctatttggttgccttttatctcttcggcaaatttctccatgatcctgacatgtaccgttccttcggttttgtgcaacaacctgttttgattggtctcaacttgttctcttacattatggctcctctgggaactgtgttgacctttgttgtgaacgccatgactcgtaagtttgagtatgaggctgatgcctttgctgtcaaactggataagcttgagggtctcaagtctggtctttgcaagatttctattgccaatcttgcctcttttgaccatgacccgctctaccacgccatgcaccattcccacccatctctcattgatcgtctccgtgccatggatcgtgtagcatacgaaatgcccaagaagaagtctcagtaaacaaacggctcagttgcacgagtctttaaataaagcctatcatgtttcgggccgtgccttcatttctatcactgctctgtcacactcttatgatcttcaaactccaaattatttttgctttttcttatcgtttgacatttttgttaagttatctcatcgtacaacgcactatcaccattaaaataaaaaaaaagtacaatattccaagaattagcattgcggtactgcatgtacacctcttagaaacagcttgctccagggtaatgtatctaagtctgcttggaattttacccaagcaaaagtatcaatagtgcctttgagtggtccagcttgtataaattcattcttgaccttaaaatacaaagtaagtaggtaagactagccgcatatagcagtgcctacctgtttgtagcttatacttcaaacagtctttctctgataaaggaaagcgccaaaactcgaaccacatgacagttcgttgtctctaagtttgcagggtgtgcagatggagccaccatctgctataacagccctctcggctaccactagcaatgatagtgacaggggtggcagtttgcttctatccgaaagaaccagccttcttgaagatcagggtggcttcacgataaacatgaccaattttgctgatgctggaggtgtacacgaaaagcctccgtatctccatatgcttctacctcaagaaacacccaaaggttacaaagccgagaaagatatgtttatggataacaaaaacgataacttgaacggtctcggtactgaaaactatgtggcctctactggggtttctgggccctttcgacagctctttgaaagttgttgcggaaaaagaaaggggaaagtatcggatgcgtgctggtaaaaccattgaagctcctgggaaagtatggagactcctttacaacagcaaatggaactcttgatatatctccgtctgtatcgtctaccgagtccccccgacatctgcgataaacacgtattctccaagatgtgtaaataaacagttttaaattataaattacgtgcctgttgacgacacaaaccttgtcaacttctatcaagagaaaagagtacaggactgctataatttgttgaaaacaaatagtctaacgttgcaaaggaagcttgactttcttgaaaaggtgagatttctatacgtgaaaactgcaggcttcatcgtgattacacaagttcgggctaagaaacttgcccaaaattgctttccagtctcacgcaagtgagacagcaccactgcttgcatctaaatttcacatagagctctctgtctttcttgcaactgatctaacttggacattttttggtactacggtaatttgagataccccacaattcaagaaagaagtcggcgatataagaaatagtcattgctggcattttcttgtagcctgtggcctggatcagatagattaatttctttagcatcataaaatatgggggggggggggaggatctcaatgtggtacggtttgctgatgcaatactcaccgggccgtaacatctgcatgcagttttcatgttctcatggattttgacttgaaagagaaatgtagcattctacaaacccaagcctttgctttatcattggtataccatgggtattcatttaattttttggaataactctgccggactcttattgtcttccaggaaaggtttcaattcaggctttattcattgaatgatggtctctctcgcagcagagtgagttgaaaaaagaggtgagcccctgatcagccagatcccatttctattagagcaaggagaatggccagtatttattcactgatgtggagagtacttggcagaaacacgacaataagcatacttttgaccccgctctttccaaaatgttgatgatatctgtcaaggcagcacatctcggataagccgattcttcactgtccacaaagctcccgagcggacgatgtgctaatgcatagcgtgtccccgagactaattccgacaacttgcaatgggacatgtagtcacagaggtatggctgcactatgaaattatcatgagatatttgtctggctccccacatactgctaaatgttcaagtgaacatcaacaattagcctccaagactggttgtctaagagctgaggtgttgggaatttcgctcttatagacaatggtttggtgattttatctggtctaagaaaagatgatgttctttcctctattgcgagttgcagagttatcaagctcgacttggttatcccaataataataagacaatggataggtgtgtactgggacatatgcgaggactcctttgtctccattgcttaagagtgatatccgtatgatttgaccgacaggtgttgggcgtgagcaatcgatgttatggacattgttgctgcaccaatgataaaaggggcgagcggatgcggttgaagtcaaggcagaattcgttgagccgatgccgcaccccaacctttgc

SEQ ID NO: 121 - DNA, 21995 bp, Schizochytrium sp.
  source 1..21995: mol_type = other DNA
cgtatctctttcttgatgctagctagcaatgtttgcgcagcaaatgctttaggtttagcatcttaagaagcaacatttgcgaattgatgtacaagtaggagacctcgcctgggctgatatttctccaatagtagtttgctgtgtatggcctacgcaaggagctgacgagctggaacattgagattcaatcgcgggcaagttcaacaaatatccgcctatcacatactacctattgcaactcttcatgggaaaatgcaagtcataaggagatgtagtacacaagagcgaatatatcctctgagtactaaatgaacgctgctcgaacaatccttgcacataggatcagcgattatgagaacacgcactccaaaattcaaaagctttcagagtgcttatatgggtattgccgcccgagcaatcctcacaaataaaaccaacaattataagaacaggcattccagaattcaatcttgatttccttctctgctgagatctaacatgtctctggcatagaagtatgatcatcctaggacatgcagtctgcgaaaggctgggcccgaggtagccctgcaagattcctaaatccataataagctccttagaatggcttgtatttttgagcttataattaagcttctgctaacctcaaagtccaatttagaggtgggcttatttacgcacgttgaatagactagcatacatttacccttctttcgctggaatgctcaagtgtgtttgtcgctgttatcacatgtcctagcatatctatccaacatgctcagatattagctatcatcaatcgggcagttaaggtacatatatataaatgttctccctgggcttgcatgagcttgccaagagctcctactacatcttgtttacatggtcttttgatgtgagatccctggcaggcagagtaggctcactaccttgctgttcctagcttaagatttgtgtcataaagagtatcaagatagcaagcattttatcaaagagtcacctttgagcattggtatttgctctccagagaggaaagctcttgagcttgaatacttagaaacgcgcgcacagttcaattatcgtcaaccatgaagattgattccgtatttgttgcaaaaatatggtacaaccttttaaataagccttagacaaaataaggatgttctctcgaagctaaagagtatgagagtgattgctttctctcgcaatctaaaggtcttcatacacattcgttcctgtcagtctgaaaggtatctacctctccacacgcaatacctagcccccaccgaccaaagtagtaccagtgctataagtatgttatactccggtcaagacgctgcctggcacaagcaaagcagttcgcagacgacgccaccgcagcgaggcacaaacgattcggtcagcgagaacgacaccagcaactgctatagcatcctcagagactatcataaattacactgttcaaaatggcgtagcggaccgaggcgacaggagccacctgtccctgagctggacgaccccaccgacggagaaacggaggaattgtgcagcaagatacgcttctatcggcgaaacaaaacacaaaacttagagaaggactcgaagagcttgagcttgagcttgagcttgaacttgaacttgaacttgaacttgaacttgaacttgaagaacctgggcttttagacctgaacttgagatcaaagtcgaagaacctggaaacgagatgctcctggctgaggctggctggcccaggtctacccgaatcgacgacctgctgaagaagggaaagctcgcccagccgtttcgtaaatcttcagacgccgccgctgcgagctttcaacttcgagcgctcggcgtttcgaattgcaggccagtgagggtcgtgatctcgagcgaggccctgagacagcgcagcgagcgccgcggtggcaaaggtacccgggttcgccgacggaggcgtctcagacgctgtcgatcgccgccagttccaagctccaagtcagtcgcgcagagaatgaatgaacgaacgaatgaacgaatgaatgaatgaatgaatgaatgaatgaataaatatcttgcgagatcctaccttgaccgtaggcacgcatgccatgtgcccagccgagcacggcatcaatcaaaagccgggcaagccgcacgccgaagctgccctcgacgtgctgcggcccaagtttgtggagctggaatggtttatggcctcgaaaaaggtagtctgcagaaggatttttcaaactgcgcggagaagagaatagaacagaagagaacagaagagaacggaacagaagagaacagaacagaagagaacaagataaggtaggataagatggaacacaggaaagagaacaaagagaactagcggagcactcagtgggcggtagcgggcggtagctagttgaaacgctaggcagggagaggaatttggtcctgcgagaactcagtccgcccggaccagcggagaaagatacggcttcgcacgctccaaaagtcaggcagttagtttgaaggagatttacagtgcttgttttcaggggcctggacaggaccatactggcagggtccaggagccacgaatgccgtgtggttgatagaaacatgggtagatagatggatagatacatggtgcgtgatgttttggacctcggaagaactgcaaaatgtggcgaaggaaagattccgaacttgaagtttgggctgctctgcgcgactttgagggacagaaaactgaagctggtttgcaagatttgtcgacccgtagtcgatccgttcgtttgtgtgaaagtgggttgggagggaacgacttcaagtgctcgccgaaagatttggcttggacagtaagtacctacataaagacagagatcagagaagcgtgcctagtagctaactggttatcaggatggttgcagtgggggtaggactcggaagctagaaagatccactctgctgtctagcattcatctaagcaataaaacttgctggaaagggaatgactgaagaaaagaacatctggttttcaagatgctttagaatacgacaaagtgcaaactcggacagcagcaaatccaaaacgtcaaggcgcagctcaacgaaagcagtgcgagaacactcgaacccgaggcaagcaaagctgtaaaagagaggaagtgaaactcaattaaagagaatctaaagccaagatgagcgccggtgccggacaattcgcaatgtatatcgatggcaagcccgcccagggtagccaggagccctttaatgtcattaacccgtacgatggctccgtggtcgccaaggcccccacatgcggaaaggaagacctcgacagggctgtgagctccgctcgtaaggccttcaagtcgtggtctactttgggctttgatgagcgcaagaagtacctcgctaagatgggcgatgtgctcgccaagaacaaggattaccttgtagagcttcttgtccaagagcagggcaagggacgtatccaagctgaaggcgaggtcttggcaagccagggctggatccagaatgcccttgacacgaagaacccgaacaaccttcaaggcgatggtgacctcaaggtacaaaagacataccgcccacttggcgtggttggctgcatcaccgcctggaactttcctatcgctcttgtgcactttaaggtttcttttggtcttctcgctggttgcaccttaattcttaagccctccgagaacaccccgctttgcacccttgagcttgcccgcctctacaacgaagtgctccctcctggtgttctctctgtcgtcaccagtgagaagaaggagcttggcgaatggcttgtcaaccacccgggtatcgacaagatctccttcactggaagcactgccacgggtaagcgcatcctcgagaacgctgctcgctcccttaagcgcgtcaccctcgagcttggtggtaatgacccggctattgtgctcaaggacgctgatcctaagcaggttgccgctggcatctttcaggctgccttctataacagtggccaggtttgcattgccatcaagcgttgctttgtgcacgaatctatctacgatgccgtccttcaggctctcgtagagcaagctaagaacgccccgttcggcaatggccttgacaagaacatcatttatggaccgattaacaacgccatgcagtacgaccgtgtgcgcgagcttctcattgatgcccttgacaacggtgccaagatgcactgcggtgaggtcccccccaagcgtgaggatactaagggatacatgatcaagcctgcggtgctcagtaacgttaaggaaggtgtgcgtattgttgatgaggaacagtttggccctgtacttccagtcatgccttacaagactgttgaggaagccatcgaacgtgctaacaataccgagtatggccttggtgccagtgtctggacctctaacgccgaggccggtgaggaagttgcttcccaactcaatgctggaactgtctgggtcaacactcatggtgagatcgatggcaccgttgcttttggtggcgccaagtgcagtggcatgggccacgagggcggccctgagggtctcacggcttttatgcagcttcatgtgatcaagacccgccgcgcagctgctctttaaattgtcaattttgatctgtctcactagacttgcctctgcggcaattgtccattgggtcctgcaatttcgtaaggactatcctcatctaggatcctctcatttttatatctaatttctaatatctatttccatttctcctcatcctagcttcgaacgttttaatgttgcgtattttcaaattataatttatacgaacctaaactatgcactgaaagtttccaaagccagttaggtgcatttgtgcattagcaccattgtactgatctcaaaaaaatgctttctgattttcttgtaaatgcgggtcattgacgagggttcggacaggcgctttcaataattctcattttctaagctctctctcaaggaatgtgtcgaccagaactttctcgcccgccatgtttttaatccaactagattttctcacttgctgtacaacactacattctgttgcctctcgacctctcttcaaacgtggttagtagcactctgtccattcgtagcacttcctgagtcacttgtagcagtctttcgcactaatgttcgttccttctaacctaaactataaaactacgctaggtgctatgagcatacccaattagtagcaccacccattactatctggtagatactgctacctggcatctttttagaccaaaatggctaataaatcattatagctggcgaagaagaatgcttcgtacaagtcttcagctgcagaagcaatcccgatatcgcctcgcagttgcctcgagaggaagctgtgtgcatacttagtgagtagtgtctccgtccttctcatcgtgatacgggtaggacttggatattctgagagagtgtgagtctgtgaggtacgggcgtcaatcccactgttgtttgtacttccggttgccaggaaagggcggcttgagccggcagtgtagacggtgacgaagacttcaaagcagtaatgcagcaggttggcaaacacttggcggcgcagggcagacgcgcgatgattattggagggaggcaagttgcgggcagtaaggccttcgatgtgatcaacccgttcgatgagtccgtggtgggccaggctccgtcgtgctctcgcgaggagctcgacgaagctgtgaaggaagcgcgcaaggcattcccagcgtggtccagcaagacctttgaggagcgtaaagaatatttgggcaaaatgtcgcaggttctcgcggataacgcggattctctgattgagctcctggtgaaagaacaaggcaaaggcctcccgcaagccaaaggtgagctcctcggtagccaggggtggctcaaggccgccatgaggctggacaaccccaataaactacatgcagaggatgagaagaagaagatccacaaagtatacagacctttgggcgtggtcggctgcattacggcttggaacttcccgctttctcttattcacttcaagatttcctctgccctgctttctggatgcacggtcatcgtcaagcccagcgagcacaccccactagccagccttgaagctattcgcttgttcaacgaggttcttccccccggtgtcttatctattgtgaccagtgagaaaggagagcttggcgcatggatggttgagcaccctggtattgacaagatctcgttcactggaagcaccccgactggcaagaagatcatggagaccgcagcgaaaaccctcaagcgtgtcactcttgagcttggcggcaacgatccggccattgtgctcaaggatgtagaccccaagaaggctgccaagggcctctttggcgcagctttcggtaacagtggtcaaatctgcattgctgccaagcgtgtctacgtggatgaggctatttacgaggatactcttcaggctcttgctgagatcgccaaaaatgcacccttcggcaacggacttgagaaagatgtcgtgttcggccctctcaataacgcgatgcagtatgacaaggtgcgcgagcttctcattgacgcgctcgacaacggcgcagaaatggtttgcggtgaagtaccccctgcgcgtggcggctcttctaagggcttcatgattaagcccgtggtgctccgcaatgtcaaggagggtatgcgcattgttgatgaggagcagtttggccctgtgcttccagtgatgtcctacaaaaccatcgaggaggcagttgatcgggctaatgactccgagtatggacttggcgctagtgtgtggactaaggatcttgacaggggagaggagattgctaaccagctccatgctggcactgtctgggttaacactcactctgagattgacggcagcattgcctttggaggtgccaaatgcagtggtgtgggtttcgaaggtggagatgagggtctcctggccttcatgcagctgcatgtcattcgcaccaagcgcaacgccaaactctaagtcctaacttgagtttgcatcgcctttgtaagctttccacaataatagtttcttcaaataaaagcagtaataacgtttagatggaggaattttagagcccaagaagtcaattttgatgccgataattttctttcgtttcttttatattaaaaataatatattcttcagatttaacattgccgtctggctatactggccgtgttattcttttaaaaaataaggtgatttcttcctatcaattggcggggttttctgcttttaaagaataataaaaatattcatgttgaaaaagttgtttaaaaatatatatctaattgtaattgaaaataaataaaaaatagttagttggccattttttaaatgaacgaagaagatagattctgggcgaggagtcttcttcgctcatacactgaactatttattatgtaatgaaaacttgctaaacaagtcagggaacattggtttgcataatttccaagaagacgacccattgagttcttttgaactcactctacgtgaaaattcactatatggcaccgttcgtgacttcgggttgcggttggacactgtccttccccacccgttcattggttgcaagcatcttatccaaatatgcttcatacatgttgttcagatcgcgcaccaccttgattttatcattcttagtttaaaaggcatcctgattcacgtcatcgataatattttctttctgcttaaaacgctcaaacttatccaaaggtttcgaatcggcaagaagctgttctagttgatcgtgatactttttggcctcctccatcatcttgtaaacgttgtccacaacatacaattattagtatggttaatgtatcaaagatgagaggcgtcatgaagtgcgtccacagccttttgtaaggtggctttccgagctgtgtcaaggtccggttccagtaattttctctcggaccagataatgagagagggcacaagggcatcgccctcggctttgaggtccaatggattgccgcccatacgttctatcccaacaggctctcaagatcttcgaggaatgcaagacggtgcgtttccatagtttcatatcttttttattcaggaacgggccccttcaaaaagaatgatgtttctataataactttcgcaagtctgctgctctcacgagaagtatttgtccactaccctttgtaaaaaaatatatatgctgcgatatgaccttaactgagcttctctgtgctgccaaaacaccaccactggtcaagctctcaatctctagccccaggtggctatgctatgcaagcacttaaaacttgagtaagctttctggtacttcatactttcctaacttggtgaagagataaactgtcaggatggtactcagcaacgacattttgtcaggtggttcttgctcgctcaaagcagatttcattgtgaaaactgagcttacctattatgtttgtatagaagaaatcagtttggcaggctctcttgcgcttgttctttagcatcataccttagcacttaatagaaagcctcgtcgaataagtctgcgagatcagatatgtgggtgcttcctctaattcttcaacaccagcgctcagacagagccctgctgctcatttaactctcttcgctagctcatgctgcttatttactattgaaagcctggttctctaaaggcttgccttgctggcgcaaaggtaatagtgcgccccatcgataccaaaagacaatcgcaagcctccgcccctattttcaaaacgagattcgccaagcacattttgaggtatgctagataacatcagaaagcacgtttctttcctgccgctgccagaaggagggcgtgcatcttgagcagtaaggctttccagcatcctttacaaattgcagagactgccgcacattcccccctgaacacaaaatgttcttcagatggcctcaaatgcacatgaagcaggccactatcttttcaagggctcattcaaaagagttgcaactactcaggaattgggcaacttggaagacgagtatatatatttgcaagtgcattaggccttctttattgggacgaagaccaagtaagtatcttctcttctctctcttcgcttctccatttcataattaattgaaattaaaataatagtaataatagtatttattattattttatttattttattcttaatatttagtagaatagaggcaaactctttttgaacttgggttatcctgctttagacgacgctctgattggggtttacggggagtttcaaagaaaagtgttttttcttgtttaaaaaactgtcccaaaacctatcgattaaaaaaacagcttcgagcttcgcttggcgcaagtaatatcagtcgacgccctcacacctgagcactttgatcacccagcaagtaaaagaagaaagcctatcgggtataaaaggcactttgtgatttgtaggactctgacttttggtttgtttttgttgcaatgcgcaaagtatttcccgccctttcttttcttatctttttcttgaaagttttacaaatgaaaatagtgaatcgcacacactaatcagacagtaagatcaaaaaacgtaaaagttcgataacttatatttcgatgtgattgtttcatattaaccatatattatgtttagttagattattaataagaagtagaggttagataagaaaatggggaggccgaggaaccgacaagctccaaacactgcaagtggagcaaacctcgaatacaaaccagcaaagttctttcaccatctcattggaaacacgctagtcgcttacttgatgcttcaggtgctgacgcgtgatttgcgggggagtattgaagtaatatacagctactgtctaacctaacctaacctaacctaaccaagccctcatgtccgacacatcctgtgtatcggactgacatcatacattcattcctgcctgtatccagacctgaaaccccaataactcatatatcatcctctttctctttctcctgagttcgtcatccttgtcagactacctctccacgcttcacagctcaggctactctgcaataggaagtttggggtctcagcaagcgcccttcggggctgggccgacggcggacgcgtgcgcttcgcgcgcttccccggaggcaagcgcatctatgtcagcgacgatgttgagcgcatctttgattgcggttccaccggccgcgagcaacgcagctctggatgtaccgttatctacgccagagtgtcctcagtcaagcaaaaggaggacctcgaacgccaggttggcgatctccagcgcgcctacccagatgcttccgccgtctacaaagacatcggtagcggggtcaatttcaaacgccaaggtctgtgctccctactggacgcctgtgaccgcggcggaatcggccaagttgtggtcatgcaccgcgaccaacttgcgcgaatcgcagtcgacctcttggaacaccttttcgaaagataaaatgtcaaactcgtggtacacggccaagatgcacatgccggagactcagacaccttcaccaaagacctcctcggaatcatcaccgtctttgtggcatcgcatcacggaaaacgagcagcgcaaaatagacggcgacgacgcagcgaggaagaagcgagctcgcacgaaggcgcgcaagaccatcaagaaagaatataaccttgtccgtaccagaaaggttagggtatatcctactaaagatcaacgtacacagttgcttaaatggtttggtgtcactagaagagcctacaatattggcgttgcgtttcaccgagacatggcgaagggcgagaaagaagccatcagattgcatcaagaagcgtgcatcaaaaaggatcgtaagacgaagcaggttttggtagatgaagatgggaatccaaaaacacatggggcacttggtggagaactgaaggccgtccgatataaagaaaagaatgctgctcctaaatgggttctcgaggtcccacaggctatccgtgattccgggattctggatttcttcaaggctattaactcgggacgagccaaaaacgaagaactcgctgtacaaaagaaagtccatgagcaatctttttataagtttcggaccaagcgtgatgaatcacagattttcgaagtgaatgcacgtacctggaatttgaagaaatcaaagacctccaactttctaaaagaattccgaacacgtaaagaagagttccccgaccagatttcgaacgccatgcgtgtgcaaatgaatcgccttgggcatgtctacttctgcttcttacgagaagaaaaaaagcgtccaatggaccaggcacccaaggcgcaccatggtgtcattgctctagacccgggtgttcgctcgtttcagacgatgtatgacgccgatggccgcgccattgaatggggcacagggaaagattttagaaccatattctatctctgtcgccgcgttgataagatccaaagcagcattgataaaaagaaaactgcatccagtgataaagacaatttcaacacccccttgaagcgcgccttctatcgcgcccaactcaagatcaagaacaagatcactgagattcaccgcaagctcgcgctttggctttgtgaaaattatcgtgttattctcctgcccaaattcgaaacctctaagatgagcaggaggatggagcgacggatctccaagaagtctattcgaatgatgtgtcgttggtcccattttgggttccgccaggctctcattcataaggctgagatgttcccgtggtgcaagcttgttctttgccaagaaagttacacttccaaaacatgcaatgagtgtggtaccctccaccataacctcggggcatccaagattttccaatgccctaatcccaagtgcaaccatgtagcagaccgtgatgtccatgccgcaagaggcatccttttacgctacctatccaaggacatgatttaaaaaaaatcatttcattgagtcgcgggttagtctaactaatccgcgatcgggtcttagacctactatgaaatgcaagttttgcaaattttgtagtttaaaatctaagagaactgtagaagaggaatttgcatcgggtttgcgacaaaaggttcggactgagtgctatgggtagctcgaaaagggtgttgtgaacgatcttcacgaagatggcaaagagggcgcagagggatcgatttggaagcggattactgccaaccccttctaaaacaacatcgaattgaaccctggcaagtggctgtggcttcttcgccatcgtttccggtgatttataaaatgtcgtaaacctgcacaggcagctccagctcctcaagttgcaagttgcgcaccaattccaacctcgacttgatgatcgctctgcaaaacgtgaacttcaaagcccgggataaaggacctgaaagccgctccgagtctcaatacgaaggctccggcaccgctagtatgacaggctcagccaggctcagttctggactgtggcgctccgcagcgcgtgtttcttggctcgtcaagttcgttcacatgtagacgaataaatcccagagtgctggcggtcgagacctcgagcagcttgaagcaagcgacttgctcgccaaccttttgagattgcgccacaatttgcgcatggcatgagccagccgaatgccagccgtctccgacaggctgaagatctgcgaacagcattgattgaattgatgggaaagtgcgccgcgctgtctgagcgatagcagtatccagagtgtgctgctctctaaggtgacatgcgcgacggtatccaggtaggagttccagggcgacagtaaggtttgggcaggaaatggagcgaagacagtccggcagtgcgggatatccatactggcaatagcagctcgaaggggaaaccctattagagaactcgcccggagaggacgacctggttgcagttgagtcgagcgaggtgcttgagcaagcaagcaagcaaacacggaacttgcaaagcgtgagaaagggcgaattgataaaggcagcagaagaattggaacgcagagggaagatagtagaggggaggtaacaaggggatttgagcagaagaagcaaaagcagcaacagcaatcatgagtgtcaccacggcagccagcggaagatttaatatgaccatcgatggaaaatcgcatgaaggctcggaccagccgtttaccgtgtacaacccgtacgatggctccgttgtagccgaggccccgacatgctctaaggaagaccttgatctggcggttgaaggtgctcgtaaagcgctccctgcctggtctgccaagaccttcgaggagcgtaaggaggttctccaaaaaatgtcggccattctagacaagaacaaggaaagcctgtcgaagctccttgtactcgagcagggcaaaggtcttccccaggccgagtttgaaattatggcaagccaaatctggttccaaagcgcatttaagatggaaaatcctaacaagaccctcaatgactctgaacaggcaaaagttcaaaagacttatcgccctctcggtgttgtgggctgcattgttccttggaactttcccttggtcctcttccacttcaaggtgcctcttgcgctgctcgcaggctgcacgattgtcttaaaaccgagtgaaaacacccctctgagtacgttggagctggcacgtctttacaatgaagttttgcctcctggtgttctcaatgtagtaaccagcgagcagcgtgatctgggcgaatggatggtcgcccaccctggcatcgataagatttccttcacaggtagcacatctaccggaaagaaaattcttgagaattctgccaagcacctcaagcgtgtaactcttgagctcggtggtaatgatgctgcgattgtcctcgaagatgcggaccccaaatctactgctgcaagcctctttcaatctgccttcatcaacagtggtcaggtttgtgtagccgtcaagagagtttttgttccagagtcaatttttgatgaagttgtcaatggaattgcagagcatgctcgtaatgcacccttcggcaatgggctagaagaaggtatgttctttggaccaatcaacaatggtatgcaatacgaacgtgtgcgagaactgctcgttgatgcccttgacaatggtgcggagatggttgttggcgaagtgcctcctccgagggatgataccaagggctacatgttcaaaccagtcgtgttgcgcaatgtgaaagaaggcatgcgtattgtagatgaagagcagtttgggcctgtccttcctgttctttcctacacagacattgaagatgctatccatcgtgctaatgatactgaatacggtcttggcgcaagcgtttggacctcaaacgaggatgaaggcgagaaggttgccagcagactcaatgcaggtaccgtctggattaatactcacgctgaaatggatgggactgttggctttggaggcgcaaaatgtagcggcatcggatgtgaaggtggttcggaaggtctactttcctttatgcagcttcatgttcttcacacaaaacgtgcttctcctcagcaataagacgaatatcgcaggtcctgggctaagttaagtaagaaaggcactacatgattcaattttgctgcatcattcagaacgataaaagtcttacacaagcttatgtagaaactacattcatgatgaaagagacatcaagccctttttaaaattaagtaaacgtattgattatattcaaaccattggattttgcaacttgaagtacatacaacaaaggttatctcattctattttcaccttgacattctatatgcaagaaagagttggccaaatgcaacagacacttgaatatgtccctggaattggattaatgatttgacgtgcaaagtgcacaagcaagagtaatttagtggggagctttagaaggtacacgtaattctatttaaatttatttatgagaatttttggtggcaagaatggctttaatgaaatcgcatttggcaagatcaggaacatcctccgagagtacctgaagactaatgcgtacttcttgcttagcaatatgttcattctcattcatgcccaagacaacttctgtctgcaggagttgggctccttctctggtttcgtctgactcttcatcaagtatgtaaagttttcgcaacacctcaggccacaatggatgagcaaatacattcagtccggctgtagaattacaaaagtccaagactagagacacaagaggctgcatttgatctgcactgtttttggcatctccaatagctcgaattagaggtccagagattgtctgaaacatttccttccacacaaacctcacctgatcctcatcttgagcttcctctgtctgtaaaaatgataggagtaagtggtgaacaacatctgcttccccagactcaaggaccttgttgaatgaatatccgtcgttggaattcattagtgaattgagaattagagctgggtcccaggaccgcgccacagctacatgttctttggcagcttgcgtgactgaatttgtggaattgataaatacaccatatgactcaggttcaacagaacccaacatctcatggcgcccttcaaaactcatgtttgctgcgcagcaaataaacagagggataagagactctctttcatgaagcaaaggcgcaagcatgcaacacagaaatttacatgcagactctccaaatgtcccgtgctctttcaaagcttcatgaagcaataaagaatcattcgcagcaactgcgagccttgcgagttgaatacgtacttcccaccacgaatcagaagctagtgctgccgtttggtgcaacaggtcgggagttgcaatatcatccactgtgtcgacacgctccaaaatacctgccagaatggcaagagcacaagcccgaacacttggactacaatgcgataagttttcgacagcgaggtcaacgaggaaataacatactgtatcacttgaagtgaacgaaaggtcccgctcagcaaggttcataaaggtaacaacacatgacaagagagtcttttgtttgcgaatccgcttttgcagtgtacggagcgagtcatactgagcgatcaaatcatgtggtggacagtatgctgcgtaaatcgccatggcggtagccctttgttgaggcattccattgttcatgatcacctccaaagcgggaagaatgctatcgaaaaagaccgcgcgagctgcacaggagtcctcatctgcaagcaaacctccaacatcagctagaatctgcccagctacgcgattgtctcggtagataagtactgtggcaagtctaggggcaatctgaacccattgctcaagatgctcaagcacacatgccatgagaatttctgattgtgcatgtagagaatcgacaaagtgattaagttcttcatcagacaacattgggtttgcaacactccctggtacgaggcagtcaaggtctgctagcaaatttgggatggaaaaaccggactttggccccagggtcgcagctacagcttcttcaagaacagccatgggtgacctggaggaagaactcgtggcaccggatttggattcagcagttgagccttccagggtcttagattcgtcaatgagtgcatcatgtactgcaacagatcctccagatcctagaggttcaatatgactttggcgcttagccgcccgcaatgacataatgtcagactctacagatcgaatgttcacagcacctgcttttacctgcacttgactagcaactttggcaagggggcggttttctccacgtaacagcttcgatgggccctttgatacagaagcggttgatcgaccactaagtgcaggtgctcttgcagagctatggtctgaaccgtctgtaggtcccctaggtgaggcacctgacttagacattggagaggacaccttgctttcttccgttcttgaatcgcttatttctgaaaatcttttgctcttgcgttcgcgctcacgggctcgattccgtaatgatgctgctgtcacgacacttggagcagtgtcggtacaaatttcgcgtgctgtcagaaatgtatatgctgcattcacaagctggacagaagcccctggagcgcttaccatgacactctcgattagtttttcttgattatcgactctgaagccaactttgtcaaaaactaattcaagttggtgccaattatcctcgcgagctgcgacccgaaggccattatcgtaggagtgcatgttaatcagttttggaaagtatcgcgaaaacatttcagccacaagaaatccatttgaaaagtccctgcgcacatttttaactgcataggctaggtcaaggccttgcaaccaacgcaaaacctctcggctcagctgctggggagagcttttcgttgctacatggctcattttattacagttgtatgtaaagcgggctcgcactataaccgcagaatttaaattgcacgcgcctaaattttcgtcagtgagctgcctcaagagctaccccgcgaacctcgattttacgaaaatccgccactactcctcaattagcacaggtttggagttcacaaatatgctgctcttccctcttctcttctagagcttcccaaaccgtcaccttgaggtgaggcaagctctcatacagtttgccacacaagtatatacatatacatgaatcgttgccctcgcgcgtcaatggtgtcgccaagcctattccccaaacccaaacaagcacctactcgcgaactttgccacgctagacttgtgcaatttgcacaggtgtgcatcatcaacggtccttataaattcggcgcaaattagcgccgcagtctcgtgcacccctctttccgcctaaagtttcatcactaccatggtacctagcgctttgactaggcattttgtctagccttttttttcttttcaaagcctaaatcgaaaataaatgtgattgcttcgctcaactcccacgcacaattcattaatcactcagcttcagtcaatgtaggtatctctctctccttctttctactctctccttcggctttatctcctttacgaaggtatgtgcaatcaacctactatggaattgatcatgtgctctctgcaccttagagaaagaaagtgtggcactaactaagttttgtagaacagagaaaacgaaagcaaacaccctccaaaagcaaacgacagcaatcaatgacgggcatcatacctccatcaacacagccaacgctgcacacattgcgctcctcacttgtgagaggtgactcgtgcacaccatgtccgcttagcgctgccgaggaaacgaaagcaatccaatttgtgtgcttcgaaatgggtgtttggtctccgttgttcatttctctctcaatgtgcatttgccaaagagaacacacattggcatggatcaaaaaccacgtcaccatttctcttcacccaaatactcccccggtgtacctcaatagttgcaagaaatgtctcaaaatagaagtcgatgataggggaatatgggacaggcatgggggcacaggggacgtttccatgtgaaagaagatttcgggctctggcgcaatccctgatctccaagccatcgcagggctacagagactgttcgacctgccccacgagcgcctctaatcgctcgaaaggctctgtgactcctgcgacccgcgcagagacgggcacagagacttggatagtgcctgaagcacgagaaaggagggaagaagcacttttcaggtagtaggtacctgctacggtaagaggggaatttataaatgcaaagagagtaaaaagagaaaaccagaaaagagaaaaagctacagagccaatcctcaaacgcagcgcatccctccccggcggcgcgaactccggagcgtacgggaccagaccacacgcagcgaccgaaagtacctccacagaggcacccgctgcaaggaaagcgcaaggcagaacgccgctgcgaccagctcatcgacgaggtagtgtgcacggagtccaacgctccgtcatctatctatatctagtcgcgtgaaacaccacagccttcttgcgtgctaaactttcgcgaaaacccgcacccgctgcactcaaactgtcatttccaacagaaaaagactctgcctgtggattggactcaactgcagttgatcaacgttcctggagttgtgatatttgcgtagtgcaatttagattagcggatcaatcatcaaatattgcttgtgcagcaaatcttgacaaacaaagcggcaattgaaacagccacgacaacaacaacaacaacaacaactcgtccagaaaatcttgaccccgtagcttctaaatatcactacgatggatattggaggcgcagacccgaaccagcgccgtcggtcttcgacggctacgagactcggtaatttgatggcaggccaggctgggtctagctcgaacgttgtgcgccgtcgtggcaacagcgcgcagaacagtggcgatgtgaaaggccttgtgcctgatgacttctctgtggaaactccggccagcttgaactcggcaccgctgtctagcaaggacaagtttcagacatgcctgaagaataagtggtgcaagctgttgctcgcgcttctcggccttttggtggcttacggaattttcgccctcatttttgatgcaatgcacagcgaagacccatgtgtcgtggcacgccgctctttgcacaccgtgcgcagttttccgcctcggcaggatgttcctgaggacttcaagcaggagttgcccaagatcattcaccagcagtggaaggacacccatatcacgaaccctaagtacgagctatggtccaagcgctggaagaccctctttcccgagcctgagtacaagcacattctctggacggatgagacccaacgccagcttattgaggagcagttcagctggtttttgccgtactatgatggctacaaattcaacatccagcgtgctgacgcctcgcgctattttatcatgtatgcctttggcggtgtctacgccgatttggattatgagcctcttgtgaacttttgggaccacctgccgcaagaccgtgtcagtctcgtggagagtccgtaccagtacaacgagcttgttcagaacagtcttatgagctcaccgcagggtgatcccttctggaagcacgcctttgagatcctcgtgaagcagtttggcaagcccgtccttgccgccactggacctgtctatcttgatatcaccatcaagaccaacccgcacccgtggtacccgcttccttgcgagaacttccaccgtattcctcttggcgagcaggaccagtctcccttccttactctccttcaccgcgaggttcttggccgtgtattcccgatgaagcaatgtggtgactacaacgattttgcctgccaccaggctaaacaccacaacacggctagttaccttgcagacactggtcttttcaacttgttgtggacctaagctaaattccctttatgccaatgcaatgaatcaagaataaattccgccgtatcgtttgcgagtaagcacattgtatggtcgaatttcccctacatgtggtgtattctttacgctagagcatggaaatcaagacctgtttttcctctcagaacgcaatctgaccgaaaatcttctgagatggcagtcaagacttatcagatctacatcgataccgatggttacatacagattcatcgaacggttgcgccattgctgttgtagaggatcaagctaatttcttttggtaggttcctgacagaataaagagggactcttactctcagccctctatctacacttacattctagacctgattcaagctctagactttgcttgccattcgtattatttcaaactgttctggcagtccaaacttaacaacttaaaacactgatatcaaaaaaggtaataaagaaaattgaacaaaaacacaaaacacacaaaaaacaatgctctactacaacttcaaggattatgcctacatcgaaagtcgaaaatacaattctttcgaagggttggaactaatctaatatgaatcggttctggaggaggttttgtgactgcagtccatgcagagtttacgtacagttggcatccacctccataacaaagtgtacgccgaatgtttactttttcactttgtagtttctctttctgccttttctcctgctgctaatggcctctcttgctaatactgttcgggaaagtacccttcagcattaaaaacttggtgtagtcattgaattatgattcaatcttgaaagttcaattctgatagcaacagattcccttgcctataaactatttgaacagcatgtgctcttggcgcttttctttgcgccatgattactttgacagagaaagctatgcaatgataaatgaaataggggaagctaagaaagaggttacaacggactagtttatgcgaatttctttcgcagatgcgcaagcattgcctggtgcgattccaaaagtgctgatgatgtggcagaattaatcacagacgtgggaatccaaccgttaaggttcatattgttgaccatttcatacttgaacgtattgtcgccaagggatgtaatcctcatacctccgcccggatgggaggttcctagcacgtatgtcttatctggcttgagcacattagcgagccatgttttgtctttcttagggtccaatcctacagttgccgaaattgaaccattgtctggagcaagatgatgctgcgtagaaccatggtatttgacacgtaaatcaaagaactcccgtgaggaaatcgctccacctgctgccgcattagtcaccatacgagcaatcgtgaagtgctccccaaaagatttaacaatacttccctcctttagagctgtgtcccaccccttggcaccaacacggcggtcaaagtccataagctccgcttccagctcttgaagagattcagctctacaagtgcaggta

SEQ ID NO: 122 - DNA, 22400 bp, Tetraselmis sp.
  source 1..22400: mol_type = other DNA
tcggacctttctctgtcttcttttcaggatcccgatgtgacgaagcgaccctgaacgcgtgtggtagtccaggccgcccaggtagtcgcttttcaggtcgccgcgacgatccctccacgccatgtagaacaggttcaccacacccatatcgacaccgacgtcgatcgaagatacagtagcttcaggtgtgtagacatgcttcctccgcgccttttgctctttctcggtggctgcaatctgggcactgttcttcaaagtcgcacaaagcgagtacccgtcggtcttgaaggaggagttgggtacccacccttggcgcgccgatctcagtttggcgataccgaggaaagtcgcgtgcatcaaagccgctacgatctctgggtcgtccagaggttgcgtagatgacatcacgccatgccttttcagtcgcgggacgatgtacatccggtagaccctctcgtcgatcgtcacatgccgtcttcccattcgacaattcggcgtgaactcgaactgtttgccgccccactggtgtatcaggccttgaaggtgggaaaagatttttatgttggtgacgaactcctcctgtgaaccgattcgcaaaccgtctctcatcgacgtcaagaaaactcgaagggcctccagatgttccactacggtctcgtgcggcgtaatggcctctgggacggaaggacgttcgcccatcgcatatctgcatgcctcaaagcaatgacgcttctgccacgcccgccgcattctcggctttcccaggtaacaaaccagcagagagtgcacggctctgcgtacccggacgtcgagattgagaaggaaatggttctttagagcggtcttgtactgccgtgaagcgtaagctacagcttggccggatcctcgactgtccagatccccgacatttaccgaagggagaaactctggatgaagatctgtgcacctcttgaggacgggttcggcgctgcaggaagaagcgtcgaagcaggacctgaacgcgcggtcgaagaacgtatccttcgaagcaaagtctgcgggcagggtacccgttgccacagcgtcgcggatggccaggcctatgaacagggatcccgctcgactgatcttggagacatattccacgagatcgtcaatcgcgcggatgacaacatcgcgttcttgttgggcgactcgagacagcaagcaacacttcacggtcgtgctcctctgttgcttgttttccttgcgccgttttgcataggcttcgccgcgacgcgaagtggttggtatgactgcatgatctttgtcttcagggtctggttcttcgtctgcctcaggatccattgcttcaggtatacaaaccggtattcggcgttgtcttaagcttttcaaactgtattttgtttctgggggatcccttcgcgtgtacgaggatgcacgagaagcgaggacgtgtgtacaatacggttttttgagttgtcttaagcttctttcatgtccctgatatccagggtgtcggcgcacaaggtggagacgtaccgaagcatatgcaggtaacagttacgtgttttatcacgggtgacaatacagagggcggaggaaaggtcccctcgtccctgcctgatatggttcttcagaaacgaaaaaacgttctccacaaagttgaactctggtgaatacggtggaatgtacgcaaacacgaaaccttttacttgagcggcatgcctaacacatgcagaatggtgaaacgcaacattgtcgagagtgatcacgcttcgagtaggggcatctatatctaaaacgaactgctcgaatatctcagtgttggcacttccgtcgacgattttgtgagacacaaccccgcgagtacttgaaacggccaagatgagggtcacccgcttaggtttctttgacgacttcatcctcttcacgacacgtgtacctttcttcgaatatccgtgtattgggaccgattccaaacacaagctggtttcgtctacggatatgatctcaggcgagcacgacatacaattcaaaaagtcggatgcctgttgagaagatacaggttttttacaaaacctgtgctgagctcgttttcgactgtaatcctgtttcttcaaagaccgatggacgctgctctgcgacatgttgatacccgcggttctcatttttgccactatttcggcttgggttacaaaagcgtttccttcaacgagatctcggattgctgcatccgcgtttcgcaaacgccgctttctgttcgatttgactactgcagattttgggcagcaaccattccccgaagaatctacaaaacgcttgacccacctgaacacggacgctgcggaggtgttgtacaccttcgcaaccttgcggtacgacctgtgaaagtacaaataatgtatagaagccctgctttggatactttgtggatacatgtactgtttcaaaagattttgaatagaactataggtttttgaaaccctgtctgctcagtcatacggtggacaacgctatttcttgtcgtaggaccatcagctctttccgcttgcggcaccaggcggtcttgctgctccatgctcatctgttgattgagcgcatcactgcggagtattgtagcgagtcagacatgagctggctaggcaggtgtgcaactggatagtcgtgaagctcacctgcgcggttgcacggcgcggagttgcatctgcagaagtgtttctgccaggacttcagcggctctgggtgcattgtaaacagtttctcccttgtacagccgtcgccagtggggatacaaccactgatacttacgacgattgggaggacctgccttccgatccgaaaactcatgcttcggttttggccctgattgcacttcgcgagctcacagatgaccccaatacaagattgttttcttggttatactctcttcacctgaaggcagctgacccgccatttagcacgacccgccatttttcacgcttaactctctgttgatgcatggcataatggacaacacggcgagtggcagcacggtagaccctcctcagcccgtagaagacgttgtcatgcagcaatttggcggctctgacaccgagtagaagtgtaaacaccctgtaagttccaaacaccctttgggatccgcccgtactttacgctctttcccataaaaattacacagtgggaaaaacgatcatcttagtgccgccaccttatctctgatgagggacacctcctgttccatggctgcggtcttgaactcggcttccgctcggcgtttcgccttctccgccatctcgtacttcacgagttctatttccgtggacaattcctcgatttttgtttgcattctcagcgactccagctccttagacagacggtgcatgtccacgtggagtttgccttggatcatccgcgcgtgcgactcctgcttggtcttcatctcctcggtgtcagattggttgtactctttcatgagttcatcgcgagtcctaagaaggatttgatcgacggaatccggggatatttcgtggtatatttcggacctcgctttacccctccacgtgacctgtacgttatacggagtgagtcgctgtttcagctccgtttccaaggctcttgattcttggaattccacaatggaccatatgtgctcgatatcgaaatcgtttgcatgttctttcaggcgtcgcatgatgctgtcggaacatccaacttttacgtacgatcccccgtgtatcagaatcgacatcacgtacaccacgtgggagcgggagaagtctccgacgaaagcgccgttatggcgcggagcctttagcacgcgacaactaagcatgttcttgtttgaaagaacaggaggctgatataaaggattttgattggactccgccctctccgcgatctcgtccacgagggtcaggtcgccacaaaggtaacgtttcagaatgtccatgcttttgtggcggaagtccgcagctcgctgtccttccaggaggttcacgatatgcatgaaccctgtcgagtcgcacaccggcgtacaccgttggcccgctcccggaaactgatggtgttcaatcatgtttgctacatcggggtagcgatccattacttgcttgaggatcctcgaccaagccgaggagtcgtggtttgggtatattattttgagaacgtcaatcacggacacagtcataacgttgtctccgcgtttgaatagccgtactcgattcccttgaaatatacggtccacttcatcgccaaaagtgaagtacacttgagcagtgtcatcgtcaagtgcatcgtgtactgcaacactgttacaaatcgcctgtgtggtgtcggagagtgggcattccaaagcatgttgtgaccgaggtatggtgaattccacatgacctgaggcacttttctgcatatactcccatgtgtacccatacttggtggcctttcgtttgcacaatcctgctacactgttccgcgcgtaaacctgtgaaaatactattcaattagatcaactgacgtaccagatatgcagatgggacgcactagaggttgcttcccctacaacagaccaagtggtcacacaaagactttttggccagaggggctacaacatgagtcttgtatcggagttcgactcaccatagcggagcctcaacgagcagcagtcatgtcttttgaaggagcgggtggaaccatgatggaagtcccggcaggagtcactgtcgctagagtgatactcggtgctgagcgagcacgatacatcggagttgaacttccagatgagcagtttttgcagccagttggcaacagggtcttcaccgtttttccagagcacaagtatgaagtgaggctgcgcggagatacggttttcacgcttaactctctattgatgcatggcataatggacaacacggcgagtggcagcacggtagaccctcctcagcccgtagaagacgttgtcatgcagcaatttggcggctctgacaccgagtagaagtgtacagtcgttcccaaaactaatgcaacacccagagggtcgccgaagcaaaccgccgatgaaattgtctcagtgaaaactatgggaacaattgagtcgttcaggccttcgcctgcagagcaggcacaggaataccatttttggggcattttgaacaggtatgcctccggctttgaggacattttggttgatgaactgggttgcatcggaggcggagatacaccagaggagattattgaggatgtgaagttcaaggtatgggacgaaatcaacaggctacacagtatgggcgagcccgtgcccgtgtacaccaaagaggaggcagaaaacttcgcagagaggttgtgcgaggaactgcgaggcgatgatgaatccagagtcgaaagttggagacttgtgcgcatcacggtggacatgaataccccaccacctggcctgccccaagaggagcttgatgccatagaggcccttatgtgggaatcgtgggcaaaatgtttagcggaggcggaaaaaacccagccgaaatgttctgtcacgtagtcggtaccgcgcgactatgttctgtaagaaactattgttccgattattttcccattattttcccgtcgtcgctgaaccgggttcctggaacacgggggcacatgttccatgttgaaaacttgcaggtgatgaacgtttaatgcatgtacactgggaaatgcgtcaatgtatcgcgccccccgcttttgtatgctgaatatccttgaaacacattgtctcgaaacacatctccaaatgcatacaggaactcccctgaacctctgtttacatgaacacttatctttgtatattcacctggagcatctcctggtatgtgcatttgtatgacgactttgtcatccgccgcagtacagcttatgctatccacgaggggtatgaatgaggggtccaagttctccatttaaaaacatgtccatgacaaaaactgtccgaaaaaaacgcggcaacgccccagtacaaaagggttccgcttggccgaatcacccgtcattttccagccacttccttccgcagattttcctgattttttcttacttgcgtttgcgcacagtgttttcgtttctccttcccatggcacaagcgatgtcagagcaccagtctcaagcccctgctgaaggcgagggcgccaatctcatcactttattcaagaagcatctcgatgacatgcgcgcagatcttgatttgccccctatttcgctcactttcgacgagtctgtggcaactacattccaagactctcacagtctttttgtcaaaatcaagcccggagatcatatcgctgttcgcgatgcgggtggcgaatattggcaccatggcatatatgttggagatcacaaagtcattgatgtgtgggggttgaacaaggatcaagccgagatacgcgagcgcgagtggggcgcatttgctgccaagaaaaccgattttgcttgggtacactacacaggcgtggacggtgtcctaccactcgatgagactatccgacttgcgagatctgtcgagggacaaaagtttcgccctttcagtaattgcgagcactttgccacatttttacgctgtgaaaggtgggaaggtccatggttgaaattatgtttgttcttggagcgatacatgccctctcctctcccccctggactaaagtaatacatgttttgcaatttctacaggtgggagtcaaaagcaagtttgcgctttctggcttgcactcaaagagacgcttgcggctgcatttggtagcgactctgcgaccagtaccatgcagcttgcggcggtagctgcaggaagcttcggtaccaccacgtgttgaaccagtgttgaaccaccgcgcgacaaaaatgtaaaaccaccacgcgactaggcgtctgtgggagggaacagtgatcgccctggctgccgaagttttcaataactgttccctcgccgatctctgtgccacacagcacacaaaccgccagtctccacactagccttgacgtcacctcgtcagcggttccagtcgctttttcagagtcatatccgtcacctgcagggcgcgatcgactacgcatcgcttgtttttttctcttccttggcaaacgtggttttcaccgaaaaggtttactattacctgaaggccaacgcgcctcaagatgtcgtcgatcaatacctggagtacaacccacctccgaaaaagccaactaccctgacagaggctcttgcagacgtgaaagaacagagcgcggcagaacagagtcagtctgtaggcccttggtacggcctcagacaccgtatcggcctcacctgcactcaagaatatcgtatggagcacatactaagatactatttgtgaacacagggtttttagggttttagggtggagtgacgtgcgaccgtatgactgcacaggcagttgtgaagagtgccgttgtcacatggaattcgcgaaatcgtctacggccagacacccactgttgtaagagatcctgtccagctcccattgaacccaatagtttccgtttaatatgacaacacctgtgtcccttaacaagaggtgcatgttcgagaaatttctcggaggatgacgatgattcttcatgtcttctctgcatgtgagcaacccacattcatgaaaatagtctgaccgtttcagcctatgaatgctgatttcgttacattcatttcggcggactgggcggggtgccggggtaaaaccagtaattgcgagcactttgccacatttttacgctgtgaaaggtgggaaggtccatggttgaaattatgtttgttcttggagcgatacatgccctctcctctcccccctggactaaagtaatacatgttttgcaatttctacaggtgggagtcaaaagcaagtttgcgctttctggcttgcactcaaagagacgcttgcggctgcatttggtagcgactctgcgaccagtaccatgcagcttgcggcggtagctgcaggaagcttcggtaccaccacgtgttgaaccagtgttgaaccaccgcgcgacaaaaatgtaaaaccaccacgcgactaggcgtctgtgggagggaacagtgatcgccctggctgccgaagttttcaataactgttccctcgccgatctctgtgccacacagcacacaaaccgccagtctccacactagccttgacgtcacctcgtcagcggttccagtcgctttttcagagtcatatccgtcacctgcagggcgcgatcgactacgcatcgcttgtttttttctcttccttggcaaacgtggttttcaccgaaaaggtttactattacctgaaggccaacgcgcctcaagatgtcgtcgatcaatacctggagtacaacccacctccgaaaaagccaactaccctgacagaggctcttgcagacgtgaaagaacagagcgcggcagaacagagtcagtctgtaggcccttggtacggcctcagacaccgtatcggcctcacctgcactcaagaatatcgtatggagcacatactaagatactatttgtgaacacagggtttttagggttttagggtggagtgacgtgcgaccgtatgactgcacaggcagttgtgaagagtgccgttgtcacatggaattcgcgaaatcgtctacggccagacacccactgttgtaagagatcctgtccagctcccattgaacccaatagtttccgtttaatatgacaacacctgtgtcccttaacaagaggtgcatgttcgagaaatttctcggaggatgacgatgattcttcatgtcttctctgcatgtgagcaacccacattcatgaaaatagtctgaccgtttcagcctatgaatgctgatttcgttacattcatttcggcggactgggcggggtgcgcctacaggatgcgttttttcaagtagtttctcttcgatatttcttatgtcctttgagatgctgtcgtcgtctagtctagccgtgcagaacccatcaccggtttgttcctgttcacccggtcctgtttgaataacatacaaaatgtccccttgacttgctttcgccatatctacacatttgtaaactgttttccatttttttctgggacacttataattgttctcgtcaatgcacggaagcaccctccgacatcgtgcagccattcactaccttcatttcgacaggtcgctaaggagggttgcaaagatatatggggtcgggaagtcgtctgtagcgcgctgggcgcgtgctctggaggttccagagacgaagggtaggaaggttaggcaaagcgccgtcgcgagactaaaaccgaaaatagcggagcatctgcaacagaatcctttcctgacagtaggggcgcttctcaagaaggtccgcgaacagggtgagaaggtcgggatgaccacggttcatcgagctatccgtgccgcgaacttcagcagaaaaaggacacgacctcggttcgccccaaaggtccccaccgcggaagaagggcgtactttcctgacctgtctgaacaatgcgtctgaagtcatcgccgtggacgagacgagcatctacgtggacgactcaccgaggtacggatacacgctgaagggaacacgttgcgtgcaccgccggaagtgtcctgtccgtacaggacgcgtgactctgcttttggctgtctcaccaacgcgcggcgtcgttcatcacgaagtggtcaaaggctcggtcacatcggatcgctttgcaggattcgtacggaacatctccgcgccaggcagcacagcgatcctcgacaatgcggtattccacaaaacggctgctgtgcgagaggccgctgaaggcgccggtatctcacttttgttcacacctccgtacagcccagagttcaaccccattgagggatgtttcagtgtcatgaaacaggcgctccgcacgcccggtgggtgcttaaacggggcgttagcgacgctcacggcgtcgaaaatctccgccttcttccgacattctcaagcgcacgttgaaggagttgccggaaactagcaaaaagcttaacgagagcacacaacagaagtaaataaactccgcttccggatctcacaacaagagcttaaggctacgccactggaaggcacgcaacacaagaaacgccgctgtcctgacaagagcttaagaagacgatcagcacaaaaaaacccgatggagggagacggaaggagccctgacgacgaggaggacgaagatgcgggggccgagctacgcgtcgtcaagcgatgtttaaggaaagcgctaaacatgtccacggacgagaaggatctgttcgtctcaagggtggaggagctggtcgtcgcggtgtccaggttgatgcaccacgggtcgcttctggcaaccaactacgtcctccaccggatgaacgacgggaaccctccttccgacgaccttctgacagaccagacgttctacaggcagtgtatgacgtactcttcttcttcggtacgttctggcgcgtaccctgaagtgaagtcgttcgccgacacgaagaggcacctcatcccccacacagagcaggtcccgtactccggaaactgtgtcaacgcagccgcgaggaagctgaaatcttccgttctcacgatcctgtcgcaccgcttccaccagcgcgtcacctccgcggtccgcgcaatgtttcccgatataccggaccgtgccaggatcgccataaaacagaggtgcctcggcagacccggagggcctcccatcgcactgactcgagaggcgtgggccttcgttgacgcggttagaggagacatcttccacggagccgacgtttattcgaccgcggtagaggaggccgtttggaattgtcgaggaatcaagaaggcggacagagaggccgtgtgcaccgaactcctagcggggcgaatgcccgagatggacagtcttaagggctcgggccgtgaggtggttacccatgttctggagttcctccccgcttgcagagcacacagaggagcggtccccgacgaagaagttaggcgcctcgtggccgcggccgcgggacgcgttttccggagggcgaccgatgagcagaagcaacaggtagtggaggatgtcatccacacaacctcttcagcagacaggcgtttcgggaggttgataagcgcggcgcgcagcatgctacgcttcgctggagtcatcagcatcggatggttgaagacacacccggcgcgggcgttgatcgccgtccgtcggatgatgctggaggtggaggatggcatccgtctcgccgagaagctcggaaagaaacgccgtcccaagcgcttccctctcctaccgatcttcgggcagaggaggcagatggtgacgttggatgccgacaccctggtgggtctgtgcaaggccgtgggtatactgccgagcggagcagggcggaaagccctgactgaagacttcaagcgatccctgcttagggttccagccggtttcgttttcagcgacaaaacgtccttgcagagcgacggcgtcgccatcgtgttgaggacctcaaagaccaaccctctcgcctccgcagaaatggcgaccaaggatgacctagaagacatcgtctttgacagagtgttggcgaacgatccggggcgggcagacatcgccaccgtcgtcgagtggacggacgaggaagggctgaagaggggatcgacgcgtctgacgcgcaaggagtactaccagcaggcaggcataaaccgccgtgcaaggaagcgccgcatgagggacagagcaatatccgaacacctgaacaaatggaaggaggccagcatcaagacagccgacccagaagcttttgaggaggctctgagggtcagaatgagtccgctccctggctccgagggcgacccctcaatcgaggttgtgtggggccaccaactggcccggtggacgtccataatggacatgaccgcgttcgccgcgaaacgcagaacactggatcgtttttggaggcacaaggttggtctcgaggcgcgacatgatctgagccgcaccgtcgtggtgtttggagacgggaagttttctgcgtcgggaagaggagaacgagccgtgcctcggaaggcgatggaagcctctgcggcacgatttgcggcgaaggtcgttaaggtcggcgaagcctacacgacgaaagtgtgttcgcgttgccatatgcccacattttctgtcagaatgctgaggtcgaagaagactaccgaagggggacgaatcgagcggatggtcgatgtccgggagctgcggcgttgttcatccaacgcatgtcgcgcatctccttacaagtcgagggacaaagacgccgccatcagcatccttcagattttcctcgcgggaatagagcgcccgccgtgctacaccaagcaaggatacgaagctgcgcttagagccatgcgacagggaccgcaacctcatcccttggtctgataggaaaaacctaacccccacggctgtgtcgtgcgcgtcgatggcggcacagtcgcgctgcaagggaaacccccagggtaaccttgctagcaggtccccgcgaggggaccataaaataccttgcgttttgagggacggacttagcggacctatggtgtcccacaatttctggattgtagtttatatacgtctcatttacttattttcgtacatttatttttcataaattaacgcaactaattcaatgtcgcggttgtagcggacgctgtcaccatcgaccactcctgaccccgcctccgctgtcacgccgttgattcccgctgccgaaaaaaccctcaaaacggacgcgccccagtaaagaacgggaaaccctgtaagtggaccgtatatatatatacgtctcgtttacttattttcttacatttatttttcataaattgccaaaaacacagtttacaccacgcgcgtttgcccaccgttgaaaacatctcaataggtacgtaatgagtagttgttcttcggatatgtgcgacttgtgtgtgtgcgactgtagttatggttgcgaatgcgaatattgcgaagattatgaggacaaggtggatttcactgtgataagtgtgatgccgaaatgcgattccatggaagctccaaacaatcgctcctcccaacaagaagtgattgaagatgtccacaagtacctgcaataccgaaagcttattccaggcactcttcattcaagtgttgttcaggcggaggacactctgagaaccgcggtggttcgagctgagaactttcactacatttcagtgaacgccaagtttacatttgtgagagatgaagtgcaacactatgcgaaacggagtcgagtgcttcttctaaactttcgtggtcatggaaatggtcatggctttcggcttcatgacaaaagtatgacgtccgaggacattgttgattggttgaaggaagtgtccttcaatgggacagtcatatgtgtcttcaactgttgtgacacagatcctatgcaattcccggtttcggataatgaaatcttgccgtcggattgggctcttgggctcccttttgactgggtttgcatcagtggaagcagatgatgcgcagtatcctatagttatattcaaactgttttgaatagaactttagggttttgccaacgggttcagaccgttgcccatttggccatcaggtacgcgttcacggcgtccaactccacttcggtcatcaagcggtcaaccaggatcacctcgcccacctcgcccgcgaaaaactccgtgctctgaccaccctccgaccctatcgcaaacttcccgtcgctgccgctggtggtgtcgttggtgttcacaaacttcacaccgtctatccacgccacttgtgcgttggtagccacctggcacgcaaccacgctccatccatccggtgacggaatgcttcccgcggggtacgatgtctggctcgtcgtcagctgcacgtgcgcgtcgcggatgcaaaagtgggatcccgcggccgaggagtttgccagcacagaccgcgtcacgcccgggtccggtgtccccgcgggtttgaacaccgcgaacgccgtcattgcgacggagctgaagcgcgaaacgttgtttatgactagcgactggtccacgccaccaaaacgcgcgccggtcagatggtccgccggaagatacgggcccgccggcgccgcgccttgtgtaaaagtatgtggcgggtacgagaacttgtgccgctcgtaccacttctccacccggctaccgtcgttgttttggaattgcgcggtatacatagcgttgtttccacctgtaccgtcggcttggatgggactgtacaccgtgtccatccacataacattcgtctgttgaagcacgtccggcccccggggcgtcgtcagcacctcgatccggtccaccgcacagttgagcccggacagagcctcggcaccagcaacgattctcgatacgttagagagatcaattgaacccccgtccacgattcccacaaaaggaacttgccgttgtagagaagggtcggggaacgcacttgccactaaccaaggaaacgttccacttgaagttctaacacgatacgccctgacagtatacatatactgagttcccgccccgctgctcgcgtcggacacgaacgtccgggattggagccccccgtttgacttaatcaagcctccggcgttggcggagttgtccgcgaacctgccgcctccgagtattgtcccggggttgtccgcatcgtacgcgacgagggtcaagcgatcgctcgccgaaaagtcggcaccggtgacgaacgcgcggatgacgaaatccggtgtcaacccgtccgcggtcggcaccgtctcgacgaatatggggttcccggacgagagtgagtggggaacggtgagaatcgtttgcgtcgcggggtccgtggagtcgtacagagtttgcgtgaggggatcgaaccccatgaacggcgtcagcaccgaaccgtccgcgcccaagtactcgtcggggatatactgcgggtagtacgcgtactccgtgagcgccgcctctgcgccgaccccctccacgcggaactggacaatccagtcgtctcccgccgcatgcgtgtccgtgacgctgctcgcaaacgcctcacgcgaatcgaacacctccgttccggacgcgtcccatacctggcctatcaacacacccgcaccgttgtcgaaacggagaatgtaggtgtgcgcctgcgcttccacgctcccgtaataagcgggcgccacaaggtcggattcggtcgagccgacctggcgtttgacgtacatggtgtttgcgtttccgccgctcgagacgttcgcctgaagacgggtctccttgccggtggggacgtgacgaaattgcaaataaaagttaaggtccgacgtgtccaccgcatacgcgcggacgcggagggtcgctccggacaccgagagggtggtggtgtagtctagatccaccgactgtgagggtggcaaagtctgcgggaccgataccgtgtgctccgcgtcgaagccatccgtgtgcgacgtgctcaccgccgcgtccgtgctcaccgtcgcgtctgccgtcgcgaccacggccgacacgttcccggccgcgtcgacggccgtcgcgcgcacgtagtacggcgtgtcggcctccaggccggtgacggcgacgctcgcgtccccgaccgacgccacgctcgcgctgagcgtcgtaccgagcgccacccacgcggccgtgtccgacgccgagttcccgaaaggcgccgtcgtgccgcagtacgcggtgactcccccaataccgctccccccggcgtcggaccacccgtccaggcccgacaccgtgatggcgtcgctgccgctcgcggatgctgtgagagtacccgagtacgtgggcggcgtgcggtccacgacggccttcgcgcctcccgcgctgatggcgctgctcgcgtttcccgcggcgtccaccaccaggatgtacgcgtacaggtcgggcgaggcctgcgtgatggccgtgaacccgaatccgaacccgttgctgtacctgtcggtggaaagggaaagcgcggtgatgtcgaaggttcccggggccgatgtgtacgcgtgatcgagcgccttctcgccggtctggaggttcgccccgtccgcgcccgcgatcgcctggatatcccccgcgcccagactcgcgctcggcgacaggacgaggaacgcgtccacgtacccgtccacgttgtccgccacggtccccgcggtcgccgagaacgtgtaattctcggtcccggcgccctgggagacgtcgaagcccgagattgtggggtcggtggcgtccggggtctcggcggagccgatccgcacggcggccgccgcgttgccggccgcgtcctccgcggacacccagaggtagtacggggtcgcgtcgtccagcgacgacagggtgaacgcgtcggaggccaccgccccgcccgtcaccgcgatggcggccgaggtcgcgccagtcagcgtgtcggagatgttgtggtggaccgtgacggtcgccaggcctccgccgtcggtgattccgctcaggccggtcacctggaccgaggtgctggtcaccataccgataccgacgccgtccagccccgcggggggcgtgtagtcctgcacgtggtcaacgaactggctcaccgccgccatgcggccgttggggtcctcgaccaggatgtggctgtacacggagtcgccctcggcgaccggcctgaaagatcccgcccccgagtcgtgcacgttgctggttccgagacccgagagggcggacaacgacacgctggagttcgcggcgtaggccgccacgctggcgaccccgaacccctcgccgaacgcggtgacgatattcgataagctcgcggcggtttccagggcggtgctcaccacgtggtacaccgcgatggttccggacgcgtcgtccgagacagtgcccgcggagggcgcgaaggtgtacgtcgcgggcgcctgtgcgacctcgaacccggcgacctcggggtcgcgcacgtcctgcatcgtgactgtgttgccgcggtagctggcgatcttgccgttgccgtccacgacaaggatcatgggcacgcacacgtcgttgggcgcgagcggcgtcccgtcgaaaaacgtcgcgttggacatggcggggacggggatcacgggcatactttttcaatagtaacactatttcgccgtgtgccgtttcgatcgatcgcacgccatcggtcaaaagaatttcgaaaatgcgaagggagacaaggtcgactggctcgttgggcgcggactaactcgttggcgcgtttttgtcgacaattcaactctttgagcgtccacgtgtccacgtgccacgtgtgtatgtgccagtgtgtggcagtgtaatttacattatttccagttcggggtgccacgtgtacacatgacagatatacccgcgtcccgcgtccacgcggatcccgcgagtctttcgaggccttgtcaggtcccgcgcacccgaacttcattcctttcattcccctcattcccctcgttcccctcgttcctatcattcccctcgttcctatcattgccgcccgtctccgcgcccgtctccgcgccagtgtgcctttcccgacgcctttcccgacgcctagcatgcatcgatctaaccgtcgaccaatggcctggacggaggttcgagcggatcgcctggatgcgccgtttctggcgcccgaaggcgatggttgtactgccgcagccacaggcactgccactgccactgccgcgagcgacccgtcctggcggttctcgtggctgtaccgcgcctccgccgaccctgtccggcggtacgagattgtgctgcgtccccgcgcctttttcgtcaaggacgatcgccagaaggagcaccttcggaagtcttccgcgaaggccgaggtcgcgggcccctccggtttgttctcggggtacgaggtgcacggcgttctcgcgttcgcggagggaaagacggggcgcgtgcgggaggacctgcgttcgcggctgacggcgtttctgcgcgaggcgaccgccttcgccgacgccgagagccagcaggacgagaccgcgaggcgcgaacaggaggcggttcggaagctcttcagggcggtgaaggaggtttcggcggatctcgccgctcagcggatatgcgacctggtcgctaagcagctgtccctggacccggtcgccatcggagtcggcgacggagtcggcgacggcaacgaagacggcgacggcgacggcgacggcgacggtgccgcgtcggaggagatgcggcgagctgtggcgcttcagcgggttctgccggcccactgggtcgcggtcctggacgcgtgcgcggaggcgtttcccccggaccggtccgacccggacaagttgagaagtcctttcggcgcggggacctcgacccacacgctcacggtctcctgctcctcctacgacgagcccgtccacttctacacgctgatcggcaacgggtccaaggagaagatggaccgggtcaccaagaccatactcaacaccgcgcacgggatcctgcggtccgtcgcggacgaacccgacaaactgggcgacatcgtgcaggtgaccgacggcatccgcgtcgacgggttcaccctgaccgagctcctgcttccgcgcggcggcgacatcaacgtcacgccctccgcctacgagttttacacgtcgtacttcctggttctggcggtgatggcctgttggcggaacatcaaggaccttcgaagggttttctgtacgtacaagaatgccgagaacagtatctacatcgcgctccagagcgccttcccggacaagatcccggttctgaactgcttcaaggaggcgtggttcaacctgatcaacgcgcaatacaacgacgtgctagtccggaggaagcagaagagcctcccgtcggccaggaccgtttacgtcgccgacattctgctccacaccgcgatctccgggcacgagatgacgcgggagaaggctttggcggtcctcgccctcgcgcacagccggtgcatgggggggtgggcatccgccgctcgcccggcggacgtcgcgaacaccaggacccccgacttcgatcgcagcaccacgcgcgcgaggcacaacgtgatgtttctctccgacaggtccgatatggaccataaaaaatactacctttacattttgcgtttttggttactcaacgcggttgtttgtgttcacagggtctgggagatctgtacgtggaagaccgacaagggcgccacccacgcccaccgggtggttctgcacgaggacctggtcgcgcttctcgttctttactatcacagcgcgcgccccgttctcctggaacagtttctccgagccaccggcgaagaggatcacaagttcttcttcgtgcgtcccagcggcgcgcccatcatcccccggaagaaggacgggaccctggacatcctccactcgagcgacgggcactccgcggtgatcaccgcctacaagcggagcctggagtttttcctgcaggttccggcgaagtcggtttttttggatctcacctccgccaacaacttcaggtccatcttcatcaacaagtactccacccccgaggcggacgacgtcaacagcctggtggacctcggcatgcgtctcgagcagcggcgccgcaacaagtccgtggtcggcctgaacagtctcgttccaaccgccggggtccagaggttccactccatccaggcgcggtccgcccgaaccagcgaaacccacatgggcgcgagctactccgccaactgcgtcgcggacgatcacaagttcatggctgagcacctcgcgtacgcgagggcgtacgtctacgaccagctggaaaccatcaggaccaaagactctcccccggcggaatatacatgaatagtgatttaaaaatcgacttaagcgtccattgcgcgcggcggacacaggcacgggtccgtcggtcggtcggtccgcccgttgggagttccccaaagtgttttgtttttgagaatggggcgtaccgaacgcgggcgagggcgtaccgaacgcgggcgcgcgatcgtgaaggagctgggccggcacggcaaacggatggatggtctggggtacgcggcgaaactgcccgcgaagggttcgggatcgggttcgggacccggcccgggaacccgaaccccgacccgcgcgccgcctccgcctccgcctccgcctccgcctccgaaggccgctgccaagcccgagacatcggtccgggccgagggcgcgggaccaacgccgtcgtcaacttcgacggggcgcgcgccgagacgtgggcgcggtcgaccggatattcgggatttcgggatcgcctcgcgcgggacgcgcgcgcgtcggaggtgaacagcgtgttggccggactgggcgagcttcagcggttcgggtcgatgttcgccttccgggactggacgctgatggccgcggagtcccggttcccgcgggaggcggtggcgcgcgtggaatcgtacgtcgagcgcggtgcgggttgtgttgcgccggagggcatgcggcggtcctgcgcggagcttacgcgcgccgttaagcgggagcgtttgcggcggcgcgcgcgcgaggtggagctggcgcacgcgctccgcgcgaaggggctgcacaggcggagggactcgaggctgtgcgcggcgtttttgaacggcaccgtctcgaagaccgcgttcgaggtcgcggaggtcatggcgcggttcaggttcctgtacggggggttctccccggcgttcaacgagacactgtcgaactacgtgatcgtggacgcgctgtcggacgatgacgacgagttggggtccgagttggagttcggggacggggacggggacgcccacggagacggggacgccgacgccgacgccgaggccgaggccgacgggcggcgcgagtacgtggacgaggagggcgcgcggttcctggcgttccccgttacgcagaccgagttcgtcgccgcgcggcggcgggaggcggagtcgtggtcgcggttccccgcggtgtggccgtggctggaacacaaggtcgtgcgcgtccagcggtggtggcgcgagacggcggcgaacccgtacacgcgcgcggggcgcaaccggatgcttcgcgagttcgaggaactcctcgcgtacgacagtgtgtaaaaatgacagtaaaaaatgagtaaaaacaaaatgctggttctcgtggtcgcggtcggggcggtggtggtcgcgtactgctctctgaagtgccgctacggcttcgacgacgcgctcctcgtgcgcccggttgttcccggcgtggacctgtggggcgtttcgcacgtggtgatgtatttcgtcgcgggcgcggtgtggcccgaccggtggggcacggttctggccgtgggcgtcgcgtgggaggggctggaacacctgctgtcgatatcgcgcatcgagtgcaaatcgggaaccttgggcgatatttggtacgggcagtggatcgatctcgtgttcaacgccgtggggtacgtttcgggatcggcagcgggccgcctgtttcgcggcgtctcccgtgaataaaaaatgaatggttcacggcgatcgtctccagaatatctatctcagccagcagcgccccgcaccgccccgcaccgccccgcacatctccgcaccgcaccgcgcctcgcaccatgtcgatgccgacgccgacgccgttgcaacgcgccccgcgggcgtctatgacggtccccgaccttcggacgctgttgcgcctcttgagggctatgggcttcctcgccgacagtgtggacagccgaattcgccagtccgacatcatgaagtttctggccgacatcgggttcacgctgcaaccgggcaaggcgtctatcatggagaatctggcaaagtacctcgcccaggagaccggcgtcgttgtctcagccgacgaactcggcacctggttcaaggaacccaaggcgtcaaagaaggtgtggactcctccagaagaattccgtcagcgcctcgagcacgccatccgtcccaagggcaacctctcccaggtgaaaaacgttttgggcaagccagacacttcaataaccgactctttgcgcggggtcatgaggtacctggtggcagccggtgtcgtcaggcctccagcaggggggaagttcctcccgataaacaagatgacccagagtgatgtcaagactgtgttctcttccctcgggttcaacatgccgcagggacgcggggctttgcagtgttcgaccattgcattagtgaccctcatcttcaacaccgttcagaccacgaggattctgaccgtgaaagaggtcaaggcttggttccgcggcccacgctgcgagagcggtgtgagtccggatgccgccgctttcgtcgcgtgccatctggccggagttgtcgcgtggctccctgtttccggtacagcgaaaggttcgccggtttc

SEQ ID NO: 123 - DNA, 22400 bp, Tetraselmis sp.
  source 1..22400: mol_type = other DNA
cgggaccctgccccgggatctggaccgacatattgctgtacaagcgcttcgaatcctgaagctcctccctgccggacacgcgcagaccgttcatacgcagcgggtccgcgggcgcgctccccacgacgcgcgcggggttgccgaaatagttctcggccgaggcgcccgtcacgcgctcgttcggaagagcgcgatcgagcgaaaaaagtgcgttcgggtcacgcccctgtcccgacaggctcaccgatcccgcgtgccgcatctccgcgggcgtcacgcgcccccgcatctggtactcgggccgcgccggcgtcggctcgttcacctccgcgcccgccgcccccatgtactctcgcgtcgtctgcggtccgcgacggaaactgtgctccgtgttcgggcggaccgtccgcgcctggacggggcccgccgtcgccaccatcccgcggtcgcttatgtcgaacagagtatcctgcttgttcttcgcgaacgccggatccagagcccgctgctcgggagccgctccggggatcacgcgcccctccagctgcggcttctgattcgacagcggccgaagctcgtccaccgtcttcggaagcaggtactcgcggtcctgcggctgcgtgaacccgcccgtgggaaccgccgtgtacccctggccgaccccggggcccacgcgcacctgctcgaacgggagcgagttgttctgggccaggggaacgtccgcgcgactctggaaagcagtcgtcgtactgggaaaccccgcgtaatacgcggcccccatagcggggttgaaaaatgattccacctcacgcttcggcatgctgttgcccacgccgggggcgcccgtgtggtcctccagcttggactcgttcatccgattgctcgaatactgtgtcagcttggacccgtagaacggctgctcgttcaggtggcgaaagtcgtccggcgtgaactcccggtccgcgaggtcgctgaataccggctcggtgatcgagaactcgtcgtgggacaaccgccgcgagttggcgtcgatgacgcccgagtccaccgggtaccgcgcggcgcgcgccatcctctgcgcgtttcgccactcctcatccttgacgtccgaaaacgtcagcccggtctcgtacccctggtagtccgatagctcgcccctccgaaagtcccggctcttcaccgggacggggtctggagtaagcgccttccgtttcgaaaatattgtccccaggccgaccagggccaaaatcgcgtatgcctccattttgttgttgaaacattttttgtggtcgccttcacggcacccatgtcgcggcaggggtgccgtgccacaccgattcgcatcgcctcgcagcgtggcgtggcgtggcgtggcgtggcgtggcgtggcgtggcgtggcgtggcgaaaatcgcgcaaacacccgccccccgattttcgctcgaaacatgagagagggagacacagatgtacacgaaccttgtcttctccggcgggggactcgcgtgccttgcgtcattcgcgtgcgccaacgccctcaaacacagactccggaacgtgaccacggtcgtcggcacatccgcgggggcgctcgtcgccgccctcgtcgccatggaggccgacgaagcgcaggtgtatacgcagatcgttcgcgtactgggcgaaacgaaacccatcaaccacgccaaattcacaaatatcttcgagacgttcggaagcatcaacagcgaggccgtcaccaggccgctcattaccgcggtgttcatgcaggcctacaacatgaccgaaatatgcaagggtcgcgaacctaccacccgcccgcccaccttcaaggacttcgcaatcgtaaccgggaaaaaccttgtcgtgtgcgctgtcaacgtaacccaggggaaaccggtcttcttcagcgttgacacccaccccgaccaggacatcgtccaggccataaccgcgtcgtgctcggtcccgatcctcctgtcgcccgtcaagatcgacggcgacctctacgtcgacgccgggatcaccgacaacctcccgctcgcagctctcgaccacagcgtcgcgctgccgcaccagacgctcgcgatcgacacgtacctgcccaaccacgccccgaaccagatcacggacctattctcctactttcgcgcgacgctgctcaccgtcgtaaacgaggccaacgacaggaaccagttccggttcgagtgcgacagaattgagatggactgcgggggtaaacaggcgctccacatcgacagtctactagggaccgttgaccaggccgccctcgaccggctttacaccaccgggatacaggccgccaaagcgttcgatcgggaatcgtttcccgcggtccaaaaaacaagtgatccaaaacacaaatgaaaacccttatcatgctcctcatgtttatatccgcgttcctgataatatccggaatccacgaccagagactggagtccgccaacaggaagaaaaaaatcgtttacaggtacatcccgcgatccgcgctggacgaacaatactacggaacccaggcgtccgcccacttccagggcatgttcaccgagcgcaaatcgccgtggatgggggccagtacgcccgaggaagaagggaaacaatcgttcgacttcgaccgcagggtccacgccaacccggtcaatgtgggagaccgccgggtactgggaggcggcgccggagggggagcaggaggaggcaccgattccgattccgattacgattacgactccgaacacgtttctgattcggactctgactcggactcgtaagcggactcgtaagcggactcgtaggaggaatcggattggggatcggattctgaatcctcggtcggcccggtcggcccggtcggcccggtcggcccggtcggcgcgttggtcccagtggtcccagtgggaccagcgggaccaggtggctccaggaacagttcctcgccgtcgcactggcccgtcaagtaccccaacaggctcgcgtagtacagcgccacgtacatctgtatcataacaccgctcggatcggtcgccggggtgcgccgggggagtgcacggaggttctcgtgacaataaacgcacctcgccagcttcgcgtcgcacgacgcgcacaccacgctccgccctctgcacgccgggttcgcgcacgcccgcgtcctgcggacccgttcgatcccgtcgtagcacacaacacactccattcggccgatccctacttgccctccggggccagaaaatgcatttgtcttctgacacaacaagaaagaacgcgcgaccgatgacggaacccgaattctacgcctccgacatgactgtcgaacacgtctacgacttctccgcctccgaccaaaaaaccgggtcgcccgcggtcgcgcacgcccccgccatcgccgaccagtggcagttcagggcgttcagcattcgcgactgctggaaacggtggggcgtccgcggcgaggggaccagggtcgcggtcatagactcgggcgtgcgcgcgacgcacgtggacctgcgcgcgtgcgtaaaaggcaatcacaactacgcgcacgacgggtgcccgctatccgaagagaccgaccacggcacgcacgtgtgcgggatcatcgggtccgcggacaacggcgacctcgtcacgggcgtcgcgcccgggtgcgaaatccactcgttcaaggtgttcggaaagaaaaagtcgtgcatcgcagccaacatcctccgcgcgctcagggacatcaagaacctgaagtacgggaggttcgacgtcgtaaacatgtccatcggatcgccccaacccgaaaacagcatccggctcgaacttctcgaactcgcggccatgggcgttatatgcgtcgcggccagcggcaacggcggggaccacaagtcggaaaacgcccccaggttcgggaccacggatttccccgcggcatacaactccaccctctgcgtcggcgccacaaacaacaccaaccggcgaacccagttcagttccaccgggccccgggtccacatcatggcgcccggagaaaacatcctctcgtcgtggcacacgtccgacaccgccatggccgcctgctcgggaacatccatggcgacaccgttcgtatccggcgtcgtagcgctcctcgttagctactgcttgaaacatacactgaggaaacccgccctcgacgaggtgctgtactgcctcgccgcgtccgcgaaaaacatggaaaccgccgggttcgacaactttacagggttcgggctcgtggacccgtccggcgccatccagaaatatatcgaattaaacgaccgaaaaaatcctggggggtagaattctacgcagccaggtacttgtacgcgctcttcgcggcggcgttctcggcggccttcctcgtgctcccgaaccctattcccagaatgttatcccgccccgtcttcgcgaccgccctgaactcgccgccaccgtcattcctggtcaccacgaactccggaccggggcgccccgtccgcgcgaagtgcttcaccagcttgtccttgtactccaactcgtcggacaggagctccgcgatgttaacgtacttctcgtagacgcccaccacccacctctcggcctccgcgtacccggcctccagaaacaccaccgcaaccagggcttcgaatgtgtcctccatcacgtccgggtgcgttcgcttggactccgaccccgaacccatccgcatgtacgcatccaggccgagactcttgccgatctcggccatgacctgaccgcacaccaggcggttcctccgcttcgtaagaacgccctccgaactgtcgaagtaccgctggtatatgtacttcgtcataaccaggtccacgaccgagtcccccagaaactccagccgctcgttgttttcccggtgcgaacccgaacggtggacgaacgcctttttcaaaacctccggcgacacgcgcggcagacccaagcgtcgaatggtatcctgcgtaatatccattctgaataccacacgctccttccccggaaaaaaaaccgtatcgtatccgtttcagtctccgtctccgtgcccgtatcaatatccgtatcgtgcgcacaaacgtgctcgcgcaatcccgatttcaaaaacgttcccgcggaattcaaacgttacctccttggagtacaccgcgcctcctccaacgcgccgcgtatttcaaccgcacgcaacacgccccgcacgcaacacgcaacacgcaacacgcaacacgcaacacgcaacacgccccgcgcccgcacccgcacccgcacccgaaccccttctcgcaccaccatggcggaacccccacgcgtcgccgcgctggccctcgagatgtgcgcgtccggggagatgatggagatccgcgaaccgctctacacgcttagcgaggggtccccgcccgacagccccccggattcggtcgtcaaaacgtcctacttcttcctgcgtaaggcggcgttccaccgggtcctgccggcggtgcagaaacggacgaaggaggtacacggaggagcacgcctcgtgttcgccgggcgagccgaggacctcgccctcgccgtgctatgcaagaccccgatcccgctggaagtgacccacgccataatctacgtctctcgatcctacaacgactaccgaatggtccggcggtccggcgacctcttcttcaagttcttcagctcgtgcgaggaggcccaccgggaggccacaatacacaaacacatgttcaacacgttcccggacaaggtggtccccttcgtcgacctcacacccgctccccagatactccacaacgtccccaacttcgccttctccgagaacgagttccccctttgcctcgtcacaaaggcacccccggaaccctttattttcctcagcgacatcaccgacttccacgaggccagagtagcggtcgcgaaggtcaaggacctaatcgagggtctgtaccgggacctcgggttcgtccacggcgacgtccacggcaaaaacgttatactcgcgcgcgatgactcggtgcttctgctagacttcggcatgtcggagattcataacaaagatctatccgaacgactcaacgcagaaggggactccgcagatgtcgcctacaacaacttctcggacagggacgtattcctccacctgatcaatgacagggacaacgaacggagggtgtcccgagcggagtacatgcacctttacgacatcggcagagccattcaccgaggcgcgcccaggttcgaggccaggatggcgcgccacttcctccccgacgccaaggacgaccccgccgctaagcgaatcaaggcccccgacttcagaaaccacttcttcgtcgcgcacaaaatgatcaacctcaaatacgacaacctcgccaccaggcgccttcgcttcctcgcggacaagacgaactcccattcccaggttcacgcacgtgcccaggcaccctccgacaagcacaagcacaagcacaaccacgcccgggggacgacggccatcagggtgtaatttagatttcacgacaaataaccgccctccataagctgcacatactgcggtttcagggcacccgacctatcgggtaaagaacacccgcaggggtaccgaagcgacctgtgtggaaccacgctcccttgtaaatttccatccaaaaccaccgtcttgacccgcttctgcccaccgctcgtccagcggaaggtgacgctcggcgggaccgcgcgattctggtcgaggcccgcgtggtacgagtttgggcgttccaggtgcaccgaaaaccgcccgtcgccggacacggtcacggccccccggtttacgcccgcggcacccccgtcgaacgcctgcccgggactgtggaacgggagcccggaccccgaaaagctgtacccaacgtagaacggggcgggagcctcgtactccagtcgaagatcgtccacgccgcctgtcacgacccccgacaccgtcacgctcatcttcttcttcttgatgtttactgcatatatgaatgaactcgacagcaccctcccgcggcactcctcacccgaaagtgcgtttgtcctcgatttttttttacaggacctaggcccaacaacaaccatgcctatcccgaacgtcgctaaatccgcaaccacatcgcttgcagctcgcgcgccaaagttctcgtgccgtctcggagggttccacctcatcatgctcgcggcgtttacgctcttggggttctacgtttgcttcaaccaaatcaaagccctcaagatcgacgtcctctccctgaaggctctccttcaggactcccagagatttaaggcccccgggctcgcggaacaggcgacggtcgggtctgcggggggcggggggggcaagggagtaggaggagtaggcggcggcggagccgacggagacggcgacgggatcgcgtatccaccgcaggtcttcacgcgcaaccagaacggccatgaccacggccacggcttcgaaaatgtcgacaaccccgacgccgaggatctccaagacgcgggtctccgggacatgctttcggaccttgtgaacgcggccacgtcggaggagggggtcggaggcgtgacagtcttcgtgggcacgggtcccgaccacgcccgagagggacgcgacgatacccgtgcccacgagggaggacattacgctagcgaacctcgcgaggtcgtcgccgacatccaggacatcaccgatgagtccctcgcctcgggagacatcgccgatttccaggaggtggacgacgccgtagacaacctcgagaacttgaacgtaaaggacctcaaaaccctcgcggccgaaaaggggatcgttgtaaaggccggaataaaaaaggcggacatcatcgctctcatcagacacgccgaatcgtcggaatagtttttctacttcgttgccaacatgttggaggttatcgctcgggtcgttcacaacggtctccgaatcacgcgctttctgggccgaatcgcgaacgccccgcgaaccgcgcttatcaaacccctggacggactcccgatcaggctcgacgtcataaacaccaggtgcgcctccgaaaagcgccgggtcaggaacatctacagttctagaaacctcatcggcctcatcgtcacgaggttccttgatacgactcgaaggcggcttcacgtctgggacgttctgagagaacagcctatcagcgcgtcgctcctgtacgtcctcacgtacagggggggagtgcaaactatcaccaggacgcccgacgtcgagtcggcgtcgcggagcacctacttgatatcgggcaccgagtctatcgccggcgtcacgggtgttcgcaagagacgcgtcatcagcgcgttcgccgacaaccacgacgtcacgcgattcatcaagaagatcgaaaccagctccggtttcgtacgcctagggttctccgaagttcagcactacctccggcttcgggggttcaatcacccgatccgatccataaccattctgttcgccgacatgaaaaagatgcatcttgaccgttgcacgggttttcataaactacaatccagaaattgtgggacaccataggtccgctaagtccgtccctcaaaacgcaaggtactttatggtcccctcgcggggacctgctagcaaggttaccctgggggtttcccttgcagcgcgactgtgccgccatcgacgcgcacgacacagccgtgggggttaggtttttcctatcagaccaagggatgaggttgcggtccctgtcgcatggctctaagcgcagcttcgtatccttgcttggtgtagcacggcgggcgctctattcccgcgaggaaaatctgaaggatgctgatggcggcgtctttgtccctcgacttgtaaggagatgcgcgacatgcgttggatgaacaacgccgcagctcccggacatcgaccatccgctcgattcgtcccccttcggtagtcttcttcgacctcagcattctgacaaaaaatgtgggcatatggcaacgcgaacacactttcgtcgtgtaggcttcgccgaccttaacgaccttcgccgcaaatcgtgccgcagaggcttccatcgccttccgaggcacggctcgttacagctcgtcacagcaccctccgacatcgtgcagccattcactaccttcatttcgacatgtcgctaaggagggttgcaaagatatatggggtcgggaagtcgtctgtagcgcgctgggcgcgtgctctggaggttccagagacgaagggtaggaaggttaggcaaagcgccgtcgcgagactaaaaccgaaaatagcggagcatctgcaacagaatcctttcctgacagtaggggcgcttctcaagaaggtccgcgaacagggtaagaaggtcgggatgaccacggttcatcgagctatccgtgccgcgaacttcagcagaaaaaggacacgacctcggttcgccccaaaggtccccaccgcggaagaagggcgtactttcctgacctgtctgaacaatgcgtctgaagtcatcgccgtggacgagacgagcatctacgtggacgactcaccgaggtacggatacacgctgaagggaacacgttgcgtgcaccgccggaagtgtcctgtccgtacaggacgcgtgactctgcttttggctgtctcaccaacgcgcggcgtcgttcatcacgaagtggtcaaaggctcggtcacatcggatcgctttgcaggattcgtacggaacatctccgcgccaggcagcacagcgatcctcgacaatgcggtattccacaaaacggctgctgtgcgagaggccgctgaaggcgccggtatctcacttttgttcacacctccgtacagcccagagttcaaccccattgagggatgtttcagtgtcatgaaacaggcgctccgcacgcccggtgggtgcttaaacggggcgttagcgacgctcacggcgtcgaaaatctccgccttcttccgacattctcaagcgcacgttcaaggagttgccggaaactagcaaaaagcttaacgagagcacacaacagaagtaaataaactccgcttccggatctcacaacaagagcttaaggctacgccactggaaggcacgcaacacaagaaacgccgctgtcctgacaagagcttaagaagacgatcagcacaaaaaaacccgatggagggagacggaaggagccctgacgacgaggaggacgaagatgcgggggccgatctacgcgtcgtcaagcgatgtttaaggaaagcgctaaacatgtccacggacgagaaggatctgttcgtctcaagggtggaggagctggtcgtcgcggtgtccaggttgatgcaccacgggtcgcttctggcaaccaactacgtcctccgacggatgaacgacgggaaccctccttccgacgaccttctgacagaccagacgttctacaggcagtgtatgacgtactcttcttcttcggtacgttctggcgcgtaccctgaagtgaagtcgttcgccgacacgaagaggcacctcatcccccacacagagcaggtcccgtactccggaaactgtgtcaacgcagccgcgaggaagctgaaatcttccgttctcacgatcctgtcgcaccgcttccaccagcgcgtcacctccgcggtccgcgcaatgtttcccgatataccggaccgtgccaggatcgccataaaacagaggtgcctcggcagacccggagggcctcccatcgcactgactcgagaggcgtgggccttcgttgacgcggttagaggagacatcttccacggagccgacgtttattcgaccgcggtagaggaggccgtttggaattgtcgaggaatcaagaaggcggacagagaggccgtgtgcaccgaactcctagcggggcgaatgcccgagatggacagtcttaagggctcgggccgtgaggtggttacccatgttctggagttcctccccgcttgcagagcacacagaggagcggtccccgacgaagaagttaggcgcctcgtggccgcggccgcgggacgcgttttccggagggcgaccgatgagcagaagcaacaggtagtggaggatgtcatccacacaacctcttcagcagacaggcgtttcgggaggttgataagcgcggcgcgcagcatgctacgcttcgctggagtcatcagcatcggatggttgaagacacacccggcgcgggcgttgatcgccgtccgtcggatgatgctggaggtggaggatggcatccgtctcgccgagaagctcggaaagaaacgccgtcccaagcgcttccctctcctaccgatcttcgggcagaggaggcagatggtgacgttggatgccgacaccctggtgggtctgtgcaaggccgtgggtatactgccgagcggagcagggcggaaagccctgactgaagacttcaagcgatccctgcttagggttccagccggtttcgttttcagcgacaaaacgtccttggagagcgacggcgtcgccatcgtgttgaggacctcaaagaccaaccctctcgcctccgcagaaatggcgaccaaggatgacctagaagacatcgtctttgacagagtgttggcgaacgatccggggcgggcagacatcgccaccgtcgtcgactggacggacgaggaagggctgaagaggggatcgacgcgtctgacgcgcaaggagtactaccagcaggcaggcataaaccgccgtgcaaggaagcgccgcatgagggacagagcaatatccgaacacctgaacaaatggaaggaggccagcatcaagacagccgacccagaagcttttgaggaggctctgagggtcagaatgagtccgctccctggctccgagggcgacccctcaatcgaggttgtgtggggccaccaactggcccggtggacgtccataatggacatgaccgcgttcgccgcgaaacgcagaacactggatcgtttttggaggcacaaggttggtctcgaggcgcgacatgatctgagccgcaccgtcgtggtgtttggagacgggaagttttctgcgtcgggaagaggacaacgagccgtgcctcggaaggcgatggaagcctctgcggcacgatttgcggcgaaggtcgttaaggtcggcgaagcctacacgacgaaagtgtgttcgcgttgccatatgcccacattttctgtcagaatgctgaggtcgaagaagactaccgaagggggacgaatcgagcggatggtcgatgtccgggagctgcggcgttgttcatccaacgcatgtcgcgcatctccttacaagtcgagggacaaagacgccgccatcagcatccttcagattttcctcgcgggaatagagcgcccgccgtgctacaccaagcaaggatacgaagctgcgcttagagccatgcgacagggaccgcaacctcatcccttggtctgataggaaaaacctaacccccacggctgtatcgtgcgcgtcgatggcggcacagtcgcgctgcaagggaaacccccagggtaaccttgctagcaggtccccgcgaggggaccataaagtaccttgcgttttgagggacggacttagcggacctatggtgtcccacaatttctggattgtagtttatgttcaccgcttcttcctcgcgcccccccgagtccgcgcgcgcatgcgacccccgcccttgacgatcgcgtcgatctccgaagccgcgcgagccaggaacccgccgcctccgaagagaaacgcctcgtcgggcagcggacgcttctccgataactcctgcgacttatcgacctgcctggacttgtcctccttgttctccttgtcctccttgccctcccccgcgggcttctcatcctcggacgaccccctgccctggccctggtcccgcgtcggagcgaccggctcgccgaaaccgaacccggacgggctcggctgcgagggtttgtcccggggtgggggccgggggttgtcctcggacgaaaacccgaacgccggagccggcgccgtagacgcgggagcgggggccgttggggacggggacggggacgggacctgacccggaggcggagccggagcgggtctctgcgcaccctccctcctatcgaacggctgtttccgatcgtcaccgaactcgcgctgcggcctgggcgggcgctggtcgaactcgcgctgcggcctgggcgggcgctggtcgaactcgcgttgcggcctgggcctgtcaccttgcaccgtgtcgacctgtttgaccacatcgtcgatatcccgctgaagctggacccgaccctcctgctgctgctgttcaagctgcctcatcgggaaatccccgatgtgctccttgctcacctcgatgatcttatccatctgcttcgccatgagcttcagtctgtcgtgcgcgttcttgtggacagtctgaaccgtctttctcatctgcacggcgtcctgcgccgggatgatgctcgccatcgcgtccagcaaatccgacacgtccttcgtcgtcagcaccgcctggttctccgcgacctgcaccgaggcgctcgccatgagctcgaacagtttctgcacaaactccgtaaagttcatgaacaccgacgacaggtggaggtacttgtactcgtaatatttttgcatgacgatggccttgttggtccggttaagaaccgactccgcgctggcgcgcatggacgcgtcggatatctggctcaggagcgcgctcgtgtcgtcgccggacaaccgcgtgaacgcctggatgttcttgtacaggctgtcctccgaggacacgtccgcgttgttctcggatatgtacttctcgaagttgccaaaccactcgcgttccgcgtcgcttatatccttcatggaggatgcaaacccgatctggttcgtcatcatcgtgtccaacagggtactgtagttcttggcgatgtccgaaaccgtgccattcacgacctggctctgttgcgcacccattttctccgtcactaacaaaaaaaagcagactgtaaaaccaaatggtcgaagtcaccctgttagtcacaagcgtcatatccgctatcctcgccggcattggcgcggcggacctaaagaaatccgggatcgacttcgatcccctcgtcgcctccctcacgtccgccgtcgcgtccgaccccgaccaggtcatcgccagggaggccaaggaacgcaacaaggagaccaggacccttcgcgacgcggtcgtcgactccagggggcgtgcgttcgtcaaggagacgctcgacgaaaacaaacggttcgcggacgacgcggacgacgcggagcgccgcgacaagggtttcgacgagctgatggagagagcgatgcgacaaaacggacagaccggatgggacgaggacgaggacgaggacgaggagcaggatccgcaggatccgcaggaagcgaaggaaactcgacggatccgacaggagaagcgaaaagcccgccttgagctaaacgccggatccgaaaaacgaaaggaccgcatcccggacgaccagatggtcttcccggaccccatggtcatcgactacaacgagctcgccgccagcgtgccgctcatcatcgacaccgacgaaatgggggcgagcctggaccgcgcaggaaaacttaccatccaaaacaagaccgacgaaggcttcaaagcgtacatattcaacaaccgcgtcagcaacaataacgtttaccatctcctggacgccatggtcaaggtggaccgggccgacgcgctcgccaacgccatcacgctcttccaacaggacctatacgacggactgtcgcgacagaaacaaggaggcggttcaaaaaaaccgagaagcgtgttaaaaaccggtgaattatacgaagagcagcgacagggacagggacagagacagacgttgacgcagttaatgacaatggttcagcaacatgaacccccggacacccccaactataacaactacatccagtaccaaacagaaaacaacttgaatacagacgaagactccttcgacattaccaacacgtccggggacgtgttacgcgccgtcacaaacccgtacgctccgatgtggcctccggcggatttggagctgggtccgtccaccaagaacgttttcgaatacgctctaaacgccgaagccggttctggtaaagagacgttcctatacaccgtctccggccccaacttcgaaacgcaaacgctggagcgcgctccggccgaggccgaggccgaggccggtatacccgaggccgaggccgaggccggtatacccgaggtaaccaagcggtatatcgagcgcgttttagcgggcgacccgcccgataccatctactgcttttggtttacggcggataaggcgggtaacgaatcccaagaggggggaaaaggttttttccccaaaatgttcttgcgcaaaaccgccacggacccagaccaagcccaagaacccgacggtgacgcaccgaaggagggtgtagtaaaaaggcttggaaaacaaataaagggcaggatcacaaagtctgcgaacgcgaacgcgaacgcgaacgcggacccaggccaagtcgacggttcctcaaagaggctaacaaataagatcaccaatacagtccagggtttgaaggacaaggtttcgctccgcttggaaaaaaacaaatacgataaggtcatacgcagtgcgttggatcacatacaaaaacccgataacgtcaaatgggatgaaacaactggcatacaatcatccccgttttacgcggagaaggtcatacaacaggttgaaaccgataaaccaaaatcgaccgaagagttcgtcggtattattaaaggcctaggcggctctagcgacaaaaaactcatggatgtaacggaaactgtcttaagcctcgtgaatgaaattccggaacagacacccgaaaagatactggatttggtcacggaatattttggcccattgacaccaaacgaacaggtcatacaggatgtatttaaaaattcgggaggagacacaaacctacaagagttcgcagattacgcgacaagtgtgataaaggaatttgcagaggaacgaccaaatacgactggcggggtcatatattatatgtttaccaaagtaggcatcccgggcgacgaaaatgtaaagaagttttcggaatatgtcgtacaacgcgtgaatgagattccggacaagacgtccgaaacaatccggagtttggtcgagaattacttcgccccgtttacagtacacgccggcaaaactttcgatctgtacacgttcgggtccgcaaaaaataacaacctaaaaacgtaccgcgagacgtggacggctcttatacgtgcaatggatgccgacgcaaaagggctgtcgacggcggtcagcgcgcgggacttgtacccctattactacaggcaccagccgatccacccgatgtttttcctgccgcgacgcaagaacgacgggaccgaactcgcggaaacggggtctctcccggataaccttcaaagggaatggtacctgttcgcccccaacgcgatcgatccgttcatggaggtttcggacaccgccttcaacgctgtattcaaggacaggaaggcgttcctgctccgaaaacaaaaggagcgatcggagcgcgacacggtacccccgacccgggagataggaacaggaacgcaatcgctcgcacccaaaccgacgaaagaccaattggatgggaccaaccccgaccgagcaaatatggtccagagactaggccaagcaagtcgaaaaaacccattgacaacaaatgcaggtataacagtcaacacgctttcggacattcaaaaaaatcaactagaacggaaggggggcgcggcggaagaaaccccatttcaaatccccgtccccgatggggacccggtgttcctgataagcccgcccgtgaggccggcgacctcgatcgcggatatccagtcgcggtaccccaacatccggttcgacgtcgttccgttcacgggcgagatggtgtacctcgcgacatacgacgaggggctgcattcgcgcctcgccttccgggatctggacaacgatgtccacagggattcgcagagactcggcgagctcaccgcggcgaccgcgtgggcggcgatatccggtacggaggagtttcggcaggccgtggcgcgggtcccggagatcctcgacaaccatttccaggcggtcccgcccgggaagtctctgtcggcgattatcccgcccgggtacagcgggggtatcgtggtcaccgacgaggacgcggggaacctggagtacgtcgtcgcgggcgaaaacaggttctacgaagccacgcggaatcaaatggaagaaacggaagagacggggttcaaggtgggtctcgtcgaaaggccgaaaagacatacaataccgacagacaatacagacaatacaggagacgaaggaaaaccgcagaaacaggaagaggaggaggaggaggaagtaccgatcgaccaaataacgggacccgatgcaactgaaaccaacgtgtctgttgtaacaaacattgtaaagaacgcgttcgcggagaatgagaagactaaaaacatgaagctgaaaatagtggaaaacttgacaaacgccccccaagcggaatattttagaggtttagacctaccggccgaaacacttgcgaacttagaaaaagcccttaaccttttaagggaactcgtgaacgatccgaccagtcgagacttacttgaccagttagaatcttccatcaactttcgtgcatttatacctgacagtgacgatcctaccacctccaaaccactcacggaacccgagcaagcaacaatcagtaccgatatgaacacattcatagacgatcttgaaacctcgaagcctaccatcatatcaattgcgacaaaaaccattgtaatcgtctacaaaccggaagacagcggtgcaaccgctaagccaataacggaccaggaagatatactgtctaaactgaaacaacacgcaattgggaaatatatgaaagtcgaaaatccagacaaggtagacgacacacccgttttacaagtttatacggaaatttcagagctcgtcaaagcgatagaatcagaaatgaaaaacggagaacaggtttctccggtcgccttcaaaaaagggtcgataacgtttccagtaaaatcagatctgtttgatacttacaacgccattaacgaaaagttggagcaacaacaaatagtcctcgtattactgggcgacaatatcgaagaggcgttcacgaccgagttcgaatcgcatggcaaggagtttgaatacaaggagggagtaaaaacttttcaagaaacaataaatggcgagcttcaacccggaatagattacgcagataaacttttaaccaaagcggcgatattcgactttattgaattagagatgttgaagaataaaactgacgagtttattgacacatctgtaaaactcaggttggatgatagtatatcgacagatggtccttatatcgaaacgacaccagacgttatctcgtttgataatatactattcttcacgattcgacgtccgagcggtcggtacgccggaggagccgcgaacgcgtcccggaaggttgtcgcgccgacaccaacgcccgcgccgacaccaacgcccgcgccgaggccgaggccgaaaaccgtctcgctgcggtccagcgaatccgcggtgctgttcgccgtacagatcgcgcggtgcgcgtactatctaaacgcgtactgttcgttccacggacccccgcgtccgcgcgacggggattcggggcggatgggcacgggcgtgggcatgggcacgggcgtgggcatgggcatgggcatgctgccgcgggacctcgcgcggatggccgcgtgggacttcgtgggatccgtcgccgccgtctgggtcgtgtgggcggcggggctcctcgccgaggacgcggtaagtcgcgcgctcgtaagcgtcgtctcctcgtgggccgccgtaacgggtttctggatctcggccgtcgtgctcaaggcggatccgagctaccgcgtggcggcttccgccaccgtcgtcctcctcgtactcccgctattcttcagccagtagcgacccaacgaccagaacccgccccaacgccaacgccaacgccaacgccaacgcccgcaacgatcggatgaattatttcgatcgatcaagcaaacacaaatgctccctcccccgcaggtatgttcgtcgagggacgccggcgggtacgcgggggcccaggtctcgaacgtcccgatactgcgacaggaaggcgggctcctgtcgcaggtgttcttctcaaggaaaaacatcgacgtcgttcagaacagtctcaggtacagggtctaccgggaatccggcggccagttcgtcgtcgggcgccaaagcgatatcgagcttctgtcgatcatgcgcgacatctacgagagctcgcagcgccacgttcccgacgcgcaggtcgtctacgccgtgcagagactcaacgagcacgtccttcagaaagcggtccccgcggtactctcggcggttcggttccacgactactaccttcgcgacataaaccagccgaaccccgtgccggaggaccgtcccgtcctcatgtccagcaaagggtcgaaggtgctccagccattcagtcggctcgggtgaatcccgggcggaggttacctttgaacttttgtggcccttcaaataaaaacaaatggcgtcgccgctgaacgatttaactcttaacatcctctcctcgatcatcgtttccgtgatcatcgcaacgcacgccaggcgggacctcattttcctctctttcatcgtctacgcgatgtactttaccatcagcttcttcgtccccggcggcggccagctgaacgccgcgatcgcgatcagcgccgtgctgtacgccgtgttcgcgtggaccaccgccgacatggtcaagaccaccccctcctcgttcgtatcgcagtacgagaaagttcccattttcgagggatcggtcgtcatgaatgcccacacccataaagtcttcgacacgtacgacccccagaaccccaattaccggcgtctcagcgtttcgcagaaccggatgggaggcgcgcagttctcgtacagtttctgggttaacttcggaggcgcgatcgatagcagcatcgccggcaaaaccatcttcatgcgcggcgacaagaggaagtacagtccgtacatcaaggcaaagggcgcctcgtcgttccagaagtatttccagaacgttgaaggcagcgacgtaacgatcgcgtgcccccgagtgtatttcaaatcggaaaacaccctgggcatccaggtgaacaccgaccgcgaactgcttttcgaagcagaggtggggagcgcgtactccaaccaccacgcgcggaagaacatgctaagcctgataccccgacactgggctctaatcaccgtcatagtcgaggacaacgtccccatcaacgacttcgagaacggtatcgccatcaaaacctacgtcaacgataccctttacggaacctccgtttcccagggctcgttgcgaatgaacaacggcgccctgcacattctgggcggcgaccagtggcccgccgactccaggatgtccgacctcatctactacaactacgccctatcggattccgaggttcgcaggatcttcaacgccgggcccgacacatcggtgtccgattccatgaacgccctcggagggcgcaagagaaacgataagcttcaggtcggggactacaacaagatggacatccacaactacaacgcccacctacagaccttgagtttctaatccacgccggcctaaaccacgcggttgcgagcgttacaccggttcaccatatccgtgaaagggaaactcgcgtcggggtttagaaccgtctcgcaccgggagtccgcggactcctggttatagttcgcaaggtccaaagtccccgtcccgggccgcatcttcatctcggtcccgtccggaagcgtatacaccggggaacacacgtagttatcgctacacgagttccaggacctcgtccagtagtcgggacactccttcgccgacacgtcggatatcgccttgtgggcgtcctcgatgtcgttgtcgttctgcaccacgcgcagggtcgcgagtcccagaaccacgaaaattcccagcgcggaactcaccaggaaaatgcggatgttctggttgcccgtcagaacgacgaaagttatctccgcgacggcgatggcggccaaaagcactcccaacagtatcgacactacgctggagttctccttaagacccatttgtttttagcgtgtgtaaaaaatcttgcgtgaccgcctacgtgtgcacaaaaatcttggagacgaggtccgcccgggtcctgcccccgccttcgcaccgagtatcgacgaaaacccagttgtgggaaatcccgtgaagattgcccgccatcgtcgacaccaacatgtcaacgtcgtcgcacagttccgggtactcgatccaaatcggtttcaacggactcaagcacgggtacggcccgccttcaacggtaaacagcgccgtgcgactcgccgaaacgtcggcggcggcggcggcgtcatagtacacaggcgtcagtgtcagtttgcgcactgtgcacacggaggggacaacgtgcgtcgagaagtaatcccgccagatcttgtgcatcacatcgtctggaagcgatgacatgtttctctatatactctccaccttcttctttgcgtacagaaacgccgtctcccacggaaccagcgagtttctcgtcgcaatatcacgggtcttcctctgggcacacgactttgacgagaccaaactgtaacatctcgggaacttggccttggcgcggcgggccgcatacaagaacccggagtaacacgatatctccgccaaatcgtagttgcccagaccgaggatgtcgacgcagtgcttcagagacgccgcgtgcggggacatctcctgaagaatcaaggacagcatcacgggctccgaagacgtcatggcccggacctcctcgtacgacctcgccatcttcagggtcgcctccgcgacctcgtagatattcatgtccatcttgcgtcgatcctcgatgtagtccgacacgcctatctgctccaccgcggtaacggctcgaggcacgcttccgttgacgcccgccacgatccccgacagtttctccatcggcacgtccgggtacaacatgtgcaaatgttgtacacatttgggtcgcgcgggatagttcatcttcagaatcgaacacttcttgcggaacgtcgggtacttggaaaggttcttcgcggacgaggtcgcaagtatcgaaacgtccaaccccgataccgatgctaacaccaccgtccccaactgaagggtatcgtccagccatataaccttcctgctcttcttatcggaaccgggaggaggctcc

SEQ ID NO: 124 - DNA, 22400 bp, Tetraselmis sp.
  source 1..22400: mol_type = other DNA
cgccgcggcgatgaccgatccgacctacaactccgtcgtcgtcaactcggcgcacctgggcggcccgctctcgatcttcgaggcggcgtcccgcgtccgcgggtccgaacgcaaggtcgcgtgcgccgtggtctacctcttcgagacgccgctcgcggtgacgcacgaagggttcaaccgcttccggaactccgaccgcgcgttcaaccggttcaccttctcggggctcgcgcccgggaccgtctacagggtccacatcctggtcacccaggcgaccagcgcggacttcccgaacgtcgcggacgcggtgcgccggctggccatttcgctccgggggggcgacgcggcggcggcggcggcggccaggatacgggcggcgcacgtgtcggcgatggcgcgggcgtgggaaaccgcgatctccgtcgagccgcgcgtcgaggccaccgcgggcgaccagatcgaacagatcgagctgcagcgcgccatccggttcgcgcagtacacgctcatgggctccgtgcgcgacgggtcgctcacggacctcaaccccggcgtcgcgtcgaccgtcgacaaggacgggacgctcctgtgggggtcggagatgtacgtcatcccgtacctcctgtacaaccagagcaggaccgtgcgcaagctcctggaaacctccttccggaacctcgagaaggccaaggcgctcgcggacgggtcggggctcgccggcgcgctttacccgcacgtgaacccaaacctggactacgccgcccagcccttctgggacgtcacggacgcgcagtacgtgttcaagacggcgctcgtggggatcgcggcgtgggactacttccgggtcacgctcgaccgcgcgtggctcatccagaaggggtacgcgatcctcgcgggggtcgcggacatggtcgtctccaaggcgacgaccgtcggcgcgtcgggctcgggctcgggctcggggtcggcgccggggaccgtcgcgatgcgctccgtcctggacgccaacggccgcgcggtcgacaacgacgcgctcacgctgtacaccagccgcgtcgcgctcaaggccgcgatcgaggcgtcgtacgagctcgggtacctggtgcccgaggcctggaaaaccgttttcttcggaatcgccgcgccgcacttcgcgggcgcgaacttcgaaatcataaagccgaacgacgccgcggtcatcaccgattccgtggacattctgcacccgctggtgatgctgcaggaacacttctctgccgactacctcaaaaccctttcgctcgccaccaacaacgaacgcacgctcaacgccaacgcgctgttttacgggagtgcggcggggcccgggtacacgctcaacccgcagaacctcctgctcctggcgggcgtccacggcgtcctcgcccggtcgacccccgcgcacgccgacgcgttccagacgtaccttcgcagcttcctcgcggaggcgcagaacgatatttggggcgggttctcggacaagttctcctcctcgccgctcgcgaacagtcccgctctgtgcgcgcagttcctcactaatatcatgaccaacctctgcgggttgcacgtcgcgggcgggacgacagagtccgggttccggtacgaacactacggcgtcgtcgggcggttctccaccaacctgccgaacgccacgaacaaaatcaccgtcccgagtatcgggcgggggaaccagaccttttctatcacgaacgaaaggctgtacgttgtcaacacgccgtaggtaaatgctcgctggtcgaagcgaagcgaagcgaagcatggcaaagccatgcagatgcagattttactccgtcttgtgaacggccagggtagtgtagaaacacttaagagcgttgtaaaggttgtgaatcttcaagacaggcatcttcctaccgtttttgttgagcacatactcaccgttctcccttctggcggcgaaatccaggacggtcaagtccgtgtccaagacctgtttgataatgtcctttgtacccttgttcaaatgccaaatgaattgctttgtcatgtcttcctgacgtatggatttgttgttgttgacgctacctctctgagcctcgtacttctccagaaggacgtggatattatccaagtcccttgtcgtaacctcaagtagggtaccgttgatacggacgttttccttgaaattgaaagggtgcgcatattcgtgggtaccgggattgggagaccacttccccaacactgtctcgaaaacatacttgggtgcaacgggggcctcagccataggcttagtaaccttcttacccgaaacggcggtgaacttaacacgcggcgaggcggccgcggcggcggcggcggcggcggaggatgtcgcgttaccggtaccggtaccttgcagcttctgcaggagtttctcttgctctgcagctgccgaggtcaacgccaagagtcgagcacgacatgctgtaatctcagcctccttttcctgactcacgtgaacaacgagctctgcgtgatgagcttccttttcggctttcagcttcgagagggcatcctgctgcttcgagagagccttcttctgctccgaaagggaatcaatctgctgtgacagttccgcgatctcggacgctgtgttgaccacggctttctcaagattgtcaatgcgactaccttcctcagcgggaacgtcgatggattcctcttcggccaaatcggcccaggttgtcttggcctgaacggtgacctcggcggtgacctcggtcggcttaacggggacctcaacgggaaccttgtccttaaccttgttcgtattgagcggtgggaaggccgcggtgtccgtaaagttaacacgggcgggagtctggtcaacgggaacggacttgtcggtctctggtgatgatacaacactgagccattgcgggggcacgggcgccatggtgtgcgatgcgatgtgatgcgatgcgatacgatgcgatacgatgcgatacgatgcggtagttgttagtacgcgtgttcgtcgtctagtgagcgttagtgttcttaaatttaccaatttcagttttttcgtccggaccctttcgtcctgagccagtaccagtttcccgaaaacccaaaacagaaaaactgaaatagggaaaacgtgcaacggcacaacgcaaaaaccggcggtacgacagtactacatcgtgacaacgcgacaacgagacagcgaaacagcgcgacagcgagacagcgcgacactgtgacacttcgactatcgcaacgtgggtttattgaacatgaacagaacaccgcctttggagcgtgtgctcgaggtactgaaacaactcgatgaattttcgaccaacgatatgatagagttgctgcctgagatcttcaatgacgaatgcctcccgtttctaaaggacctcctctcagacggatatggagatctggacagcggtgtaatctctggtctcgttaaattgaagtatgaccttccgtacgtcgccgcgtgtatcggcgatctggacctcgtgaagtggtgtcataccaaagacatcgggtctactgacgacgtgttcgaaggggccgcggtgtacggtaagacagagatcatggactggtgcatgacacttgagaatttcaagattgataaggtcaaggcaaccaacctcgcgtacatattaaaaaaagtcgacggtgacaaaacctctatctgctggcttcgcaaactgtggaagtaaacttgaaccctcttatctacgcacgtacgcgtaaaaatgcgtacgcgtaaaaaaccagaaccaccgtaccgacatcatgggagtaccgtcacctggctgctgtggcgacatgttgatacccgcggttctcatttttgccactatgtcggcttgggttacaaaagcgtttccttcaacgagatctcggattgctgcatccgcgtttcgcaaacgccgctttctgttcgattttactactgcagattttgggcagcaaccattccccgaagaatctacaaaacgcttgacccacctgaacacggacgctgcggaggtgttgtacaccttcgcaaccttgcggtacgacctgtgaaagtacaaataatgtatagaagccctgctttggatactttgtggatacatctcctgtttcaaaacattttgaatagaactaaaaaggtccgtccatggacaagagcctgggacgaatatattcgggtaccatcccttcaattccatgcgagcctgacaggcccgagcttagctgggcggtgatttgtacccctgaattgtgatgggtgagctctgctcaaagcctgatgacgatatccgtcgtacagcgggttgttcacgtatatcacggtcgccaccttgttgtttgcgtcgtagaacttgcgggtcttggcgggcaccggccctgtgccgggctcaggtaccaccttgttcttcttcttcgtgaaaaagtcgcaaatccccatgattgcaatgctgtgtggcggtggcgttgtgtgggggcgttggtgtgttgtgaagtttgaatgtattgggttttttcaatttcgcttttccaaggtaattttataaaatcactttcgactttcactttcgactttgctgttgaaaccattccccgaaatctgtcaaaaaaccaactttagaaatcggcgtccaggtcgacgtctcccacggtcttggactgcattcccactccgctcctggcgtattccgcgatcttagcctcgaagaagtttgtcttgttagggatggatataagctccatgaacccgaaggggcacttcgcggcgccgtagagagcggggaacccgagtcgaagaatgagacggtccgcaacgtacttgacgtactcgctcatcatgtcgcagttcatgcccagcagggagaccggaatggcgtcggtgatgaaattgagctcgatatccaccgcctccttgaagattttgtgggccgtttcgacggggactttgtcctccaggagggagtacaactcgaccgcgaagtccacgtggagaccctcgtcgcggctgatgagttcgttcgagaagcagaggccgggcatcttgccctgggacttaagccaaaatatcgcgcagaagcttcccgagaagtggatcccctccacgcacgcgaacgccaggagcctggtggcaaagtccttgtcctccttcatccacttaatcgagaactgagccttatctcgcacggcgggcatggtgtcgatggcgtgaaagagacggtgtttctcgtcggggtccgagatgtaggtgtcgatgagaacgctgtacatctcagcgtggatcgcttcgatgaggatctgtgacgcatagaaggatcgcgcttcggtcgcctggacgtcgttgtagaagcgcatgcacaggttctcgtttacgaggttatcggaacccgcgaagaaggcgagcacgacctttatgaagtgcttctcgttgtcgttaaggttattccagtgttccgggtcaccggcgaggtcaacctcctccacgaaccatgacaaggcagaggacttcttgtacagatcccatagagaagggtactgtattggaaaggtagagcgtcttgtgtcgaccagggggttcgacttcatgctgtgctgtttcttgcgaaaaaaaatgtatcccaccggatgcttacgtccttgtgtcgtcgttacatgttgtgtcattgtgttgcgaagtcaggacccacatgagatacacccgtcgaccccgcgtatgcacgatacacccgcgatcggttctgcgtccttctcggtgttattgtcctgcttggtcatgatcgtgaacttgtccgcgctggcggggggcttgatgcggaggtagtacgacccggtcttcaggtgtttgctccacgagtagaagagcatgttggatatcctcgatatctccgggacgttaacgaagaggttcatcgactgcgactggcacacgaacgcccccctgtcggcggccatgtcgatgatcgtcctttgactgaggtcccatacggtcttgtacagatcctttattgaccggggtatctccgcgatcttctggatggatccgtcttccgcgattatgcgattcttcatttcgtcgttccaaatgcccatagatatcaggtcgtcaacgaggtacttgttgacggtgatgaagtttcccgcgatggtcttgcgctgggcgatgttgctcgtctgaggctcgaagcactcggtgtatcccatgatctgcgaggttgacgcggtaggcatgagcgcgacgctctgggagttcctcagaccgtgcgccacgatgcgtttcttgagggcgtcccagtcgtacatgtctggcttgaccccccacatgtcgaactgaaggattcctttagacgcgggggacccctcgaaactgctgtaagccccggggtaggcggacgaggggtccggatcgaagcggttcagaatgttgtattgcccggaggttatcgcgttctgtctggtctccgccatgtcgcacgactgttcgagggccgcgtggtatatcgtctcgaagatcttcttgttaaggtccgaagcctctgggctttcgaacggcatcctgagaaccatgaaaacgtccgacaggccctgtaccccgatgcctacggggcggtggcgcatgttggaccgctcggcctccgggatcgggtaaaagttgcggtcgatgatcctgtccaggttgaacgcaatgtccttcacggtggagtggagatattcgaaatcgtaccgaccgtcccttatgaaggcggggaggcaaatactggcgagattgcacaccgcggtctcgtccgggctggagaactcgacgatctccacgcacaggttggacgacttgatggttcccaggttcttctggttgcttttctcgttgcactggtccttgaaacatatgtacggggtccccgtctcgatctgcgctctgatgacggcctcccatagcttcctcgcgcgcacctgcttcttggccttcccggagctctcgtacttgttatagagcgccacgaactcctgcccgtatacctcggcaaggcccttgcattcgtcaggacagaagaggctccagggcccgtcggatttcacgcgctccatgaagaggtccgggatccacagcccgtagaacaggtcccgcgcgcggtgctcctctgctcccgagttcttccgaaggtccaaccactcgaagacgtcggcgtgccatggctcgagaaatatggcgaatgacccgaatcgctttcctgactggttgacgtggcgggcggtgtcgttgaagaccttgagcatggggacgatgccggtggagtacccgttggtcccgcgaatcagcgacccgttggccctgatgtcgtggacgctcagaccgatgccgccggcgaacttgctgatcttcgcggtctgtttgacagtgtcgtagatcccgtcaatgctatcgccctgcatcgtcgcgaggaagcatgagctcatctggggagtgggggtcccggcgttgaacagcgtcggcgtcgcgtgggtgaacaggcggttggatatcatgtgatacgtcctgaaggcccgctcgatgtcgtgaccgtggattcccagggccacgcgcatgatcatgtgctgaggcctctccacaatgaccttgtcgacgcgcgtgaggtacgcccgttcgagcgtcttaaaaccgaagtagtcaaaaaggaagtcgcgttcgtagtctatgttccactctatggagtcgccgtgtttctttattacactgttcagctcgtcgctaataagggggtagtgtttgccgtgaacgtcaacgttgtcgtaaaggcgtttcatggagtccccgaacgttgacggagtattcttctggcagttactgatgatgatgcggctggcgagctttccgaagtcgggatgcgtggtgacaagctgcgcacagagctccgcggcgaactcgtccagcttggacgtggtgaccccgctgtagagctggcttacaaccttctgcgcgaccgcgacgtggtccacgttgtctaggtcccttgagagtactcccacacggcgcaggatcttgtcgaaggacacgttttccttgcgaccgtcgcgcttgactacgaatgacatgttcctccagaagattttttcatagctcccacagtcgcgcgttcatttcgatactcgaaactggactccgctgcgtcccgaaacggagtataacgcacgccgtcggcgttctcggcgtcctcgacgttctcgggattgtcggcgtccgcggattccgaggcgctctcgcgaaagtcggcgttgtcgtccctcggcttccgggattcggatatttttttgctcggagactctacggtaccccggtacgtcgagtaggtattcgaaacacaaaggcttaacgcggcggcggggaggggggcggagttttcatctaccccaaaatgaagaccgtcggagcaattatcttgttcgttatctgttcgaatgttgcagggatggcgtcagcgtccgcgggcgaatgtgaagacacccgcttctggtgcaggtacacgtccgctctgtgcgggtacacatccgcgtatatgaaaacagcgtgtccgcgcacgtgcggcgcgtgcgtcctcccggacccggacgtggcggggtacgctccgacgccgacgacgaccctcccctcggagacgccttcggttgtgacgacgatgacgacgatgacgacgatgacgacgatgacgacgaccgttccggctcgggacccttcggacccttcggacccttcggacgcgacggccctcccctcggagactccgcccgacggtacaacgccaacgacaacgcccgaagcaactaccggtacgccggcgccagtgactccgcgaagccccgaaacggatgccgaatgctgggaccacgccgagggcgcgccctccgactgcgaagactcctcgtcggcgtcctcggcgtcgtcgggaatgtcgtcctcgcgaaaatgaaaccgaaacggtggaaggcgtgtctccgatgccgcgtgtctccgatgccccgggcgcgcggatgtaaactgttttccattttttttctgggacacttataattgttctcgtcaatgcacggaagcaccctccgacatcgtgcagccattcactaccttcatttcgacaggtcgctaaggagggttgcaaaggtatatggggtcgggaagtcgtctgtagcgcgctgggcgcgtgctctggaggttccagagacgaagggtaggaaggttaggcaaagcgccgtcgcgagactaaaaccgaaaatagcggagcatctgcaacagaatcctttcctcacagtaggggcgcttctcaagaaggtccgcgaacagggtgagaaggtcgggatgaccacggttcatcgagctatccgtgccgcgaacttcagcagaaaaaggacacgacctcggttcgccccaaaggtccccaccgcggaagaagggcgtactttcctgacctgtctgaacaatgcgtctgaagtcatcgccgtggacgagacgaacatctacgtggacgactcaccgaggtacggatacacgctgaagggaacacgttgcgtgcaccgccggaagtgtcctatccgtacaggacgcgtgactctgcttttggctgtctcaccaacgcgcggcgtcgttcatcacgaagtggtcaaaggctcggtcacatcggatcgctttgcaggattcgtacggaacctctccgcgccaggcagcacagcgatcctcgacaatgcggtattccacaaaacggctgctgtgcgagaggccgctgaaggcgccggtatctcacttttgttcacacctccgtacagcccagagttcaaccccattgagggatgtttcagtgtcatgaaacaggcgctccgcacgcccggtgggtgcttaaacggggcgttagcgacgctcacggcgtcgaaaatctccgccttcttccgacattctcaagcgcacgttgaaggagttgccggaaactagcaaaaagcttaacgagagcacacaacagaagtaaataaactccgcttccggatctcacaacaagagcttaaggctacgccactggaaggcacgcaacacaagaaacgccgctgtcctgacaagagcttaagaagacgatcagcacaaaaaaacccgatggagggagacggaaggagccctgacgacgaggaggacgaagatgcgggggccgagctacgcgtcgtcaagcgatgtttaaggaaagcgctaaacatgtccacggacgagaaggatctgttcgtctcaagggtggaggagctggtcgtcgcggtgtccaggttgatgcaccacgggtcgcttctggcaaccaactacgtcctccaccggatgaacgacgggaaccctccttccgacgaccttctgacagaccagacgttctacaggcagtgtatgacgtactcttcttcttcggtacgttctggcgcgtaccctgaagtgaagtcgttcgccgacacgaagaggcacctcatcccccacacagagcaggtcccgtactccggaaactgtgtcaacgcagccgcgaggaagctgaaatcttccgttctcacgatcctgtcgcaccgcttccaccagcgcgtcacctccgcggtccgcgcaatgtttcccgatataccggaccgtgccaggatcgccataaaacagaggtgcctcggcagacccggagggcctcccatcgcactgactcgagaggcgtgggccttcgttgacgcggttagaggagacatcttccacggagccgacgtttattcgaccgcggtagaggaggccgtttggaattgtcgaggaatcaagaaggcggacagagaggccgtgtgcaccgaactcctagcggggcgaatgcccgagatggacagtcttaagggctcgggccgtgaggtggttacccatgttctggagttcctccccgcttgcagagcacacagaggagcggtccccgacgaagaagttaggcgcctcgtggccgcggccgccggacgcgttttgcggagggcgaccgatgagcagaagcaacaggtagtggaggatgtcatccacacaacctcttcagcagacaggcgtttcgggaggttgataagcgcggcgcgcagcatgctacgcttcgctggagtcatcagcatcggatggttgaagacacacccggcgcgggcgttgatcgccgtccgtcggatgatgctggaggtggaggatggcatccgtctcgccgagaagctcggaaagaaacgccgtcccaagcgcttccctctcctaccgatctttgggcagaggaggcagatggtgacgttggatgccgacaccctggtgggtctgtgcaaggccgtgggtatactgccgagcggagcagggcggaaagccctgactgaagacttcaagcgatccctgcttagggttccagccggtttcgttttcagcgacaaaacgtccttggagagcgacggcgtcgccatcgtgttgaggacctcaaagaccaaccctctcgcctccgcagaaatggcgaccaaggatgacctagaagacatcgtctttgacagagtgttggcgaacgatccggggcgggcagacatcgccaccgtcgtcgagtggacggacgaggaagggctgaagaggggatcgacgcgtctgacgcgcaaggagtactaccagcaggcaggcataaaccgccgtgcaaggaagcgccgcatgagggacagagcaatatccgaacacctgaacaaatggaaggaggccagcatcaagacagccgacccagaagcttttgaggaggctctgagggtcagaatgagtccgctccctggctccgagggcgacccctcaatcgaggttgtgtggggccaccaactggcccggtggacgtccataatggacatgaccgcgttcgccgcgaaacgcagaacactggatcgtttttggaggcacaaggttggtctcgaggcgcgacatgatctgagccgcaccgtcgtggtgtttggagacgggaagttttctgcgtcgggaagaggagaacgagccgtgcctcggaaggcgatggaagcctctgcggcacgatttgcggcgaaggccgttaaggtcggcgaagcctacacgacgaaagtgtgttcgcgttgccatatgcccacattttctgtcagaatgctgaggtcgaagaagactaccgaagggggacgaatcgagcggatggtcgatgtccgggagctgcggcgttgttcatccaacgcatgtcgcgcatctccttacaagtcgagggacaaagacgccgccatcagcatccttcagattttcctcgcgggaatagagcgcccgccgtgctacaccaagcaaggatacgaagctgcgcttagagccatgcgacagggaccgcaacctcatcccttggtctgataggaaaaacctaacccccacggctgtgtcgtgcgcgtcgatggcggcacagtcgcgctgcaagggaaacccccagggtaaccttgctagcaggtccccgcgaggggaccataaaataccttgcgttttgagggacggacttagcggacctatggtgtcccacaatttctggattgtagtttaaactgatttgtttttctgtgacagatcgttatgaagccgacatttcgacaatatataaattttatggccccaaagtaaaatgcgtgtttgggttttatccctcctggcccaggccgtcgttctgctcgtatttttcattttatacagtgtattctactacgcaggcgtcgctaaattcaacaaggacaagatggacctcatggacctcatgcattattcggtgatttgccagtctagcatcggatttggggatttgttcccgacctcgaatattgcgagggttatctcatggttacatgcgatcatgaccattgtcgtgatcgcgtacacgactcttggtgagtaacggaacggctgcacccgcgggcattttgagtatgcacaccggcttccttcccggaaccgcgagcagatgcgccacgcgacggctacattttgtaaatttatacgaggatgaacggggaaccgttgctgagtcagcaattttcgccggcgagatacggatttaaagtatttttttattccaaggataagtgggcaatgaaaaaacagggcggccggtgcgcgtacaaaaggcggcgtcgccctcgagtggctttcgactttcacttctgatttttcgcatccgcccatccacccacccacctctccctccctccctccccccccctgggtctctcgctcaatccacaagctccgacatgggcacgggcacgggaacggccatgtgcacgagcacggccatggccatggccatgaccaacgcgcccgtttcgcagaactcgtcccgcgacgtcgtggtcccgcctccgaaccgcccttgcccgagacccgcgctccggctcggcgggaacgtgacctgcggtatgcgcgaggttctcctggactggttgtacgaggtgtgtgacgactgcatcgagcgcgactacccggcggagtgtttcgtcgggtcctcgccgagccgcgcgtccaagagtcacgttcacatcatgcagagcgcggcgtggtacctggaccagtacctcctcgcccacgaggtggataagaccgagttccagcttgtcggaataaccgccctgtggatgtccttcaaggtgcacaaagggggggcggtggcggtgacggcctccaagatcgcctcgtattgcggcggagcctacacggggcgccaggtcgcgcgcgcggaggtcgagatctgcagatcggtcggatggttcctgtcgagggaggttctcgtccagaccgttttcaaggtcgtcgaggggtgtacgcccgttccgagggtgatgacggacatctttctgtccaatacggtgtaccccgtggtcgagctgttcaacgacgtcgtcacctacgactacgccttcggggcagtggcccttgaggacctcgcgtggaccatcgtgctcctatcctgcgacgtgatctacaggtaccgcgagccgctccgcgagacatcggtcggcaatatggtgtcgctggtgaatctcgtcgcgcccgccaatgacaatgagattttcggcagtgccggtgccggggccgccggggccggagtcggagtcggagtcgccggggccggagtcggagtcggagtcgccggggccggagtcggagccggcgggaccggggagtttacgctcgccaacatcccgatcctgtttccgagagccaaggtcgaggtcttcaatagactgggcgccgccatcgtccaggaggcgttccgctcgcgcgcgcggtaccacaacttcgaggatcgtcatagggaagcgctcattattgtggagtatatgaacaaatgaaaaccgattttgcgagtgtaatcgaatccatcgaccagaacaatcccggcatcgggaaatacggcgcgacgctcaagagcagcatccgcaagctgcgcgacaagtgcgatcccacgcgctcggataattttgttctccttctaaacaactacgagtccacgtacgagtgcctccgcggcgtcacccggaacgataagacccttaagtcgaacataagtcacctcgtggggatctttaggcggtacgttcccggcctcgcggcgctggtttcgggcgacgccgcgcggttctggaactcgcagataaccgcgctcgataaaaggatacgcacggacgacccggagaacgatacaggggaggacgcgtcgtggggcagtctcacgtggaagaaggtcgtcgccgccaagaaacagctcgatgtgggcacgttcgagaggctgggcatcgacgtgtacacctccgcgggcgtccccccgaggcggggcgagtgggcgcacgtcatcgcgtacaacgtccaccagccgaaggacaagccgcccgagcagaactggatgtacatccccgacaagggcagcaagaacgccttcgtcgagttcaactcgttcaagaccaagaaacacctccggtcgcagcgaatcgatattcccgcagagttggttcagtcggtccgcgagacgttccggagaaacaaaatgcggtacccgagcaatatcttcgccttggataacttcaacccgcaaacgcagtccaacaagttcaactcgctcctcatgcgatcgctaaacaaggcgctcgaccggaccgatatcaagcggcccgccaacatgttccgccacctgttcctcacggacgtgtttcacaaccggttgtcaaaaatgtcggacgaggagctcaagctcgtcctgcgccacatggcgacgtcgctcgagcaggccgtctacacctaccgcatcgccaagagcaaaaagcagaccggtgggtccgggtccgggcccgggtcgccggcgttggcgtcggcggctaccgcggccgtgctcaaacaccccctcgccatcaaaatggacattctgcaggggctgcttcacgacctggacccgcaaaatgtgtgaccgtagataaacacacaaatgctctttagcgacctccccatagtgagcatggcggacgccgtgaagaccatcgccgaggcgaaggggattgtgtttgtgagcgccaagggcgtcgacggcatcaagatgccgctgaagaaggcacgcgaaaccgtcacgcggtccatggggtccgaggcggccttcgtcccggtcaccgataactggaagtctcccaaagacgttctcgcgaaggacctcgcgctccagctgaaggccgacacggggtccaagttccctcttattctctcgatatccaaggaccggtacgagaagttcgccgagaaggagctcgacgacgggttcaagggcaacgccctggtggttctgcacgcggcgcccacggacgcgaagctcgaggagattcgcgggttccatctcaagagcaaagagattctaggcgaaagcaagcccccgaaggtgtttcccgaacacatcatgtcggtcatggatatcgccaagaagctccccaaaacgcccaaggtgttcctcgacgccggcggcgggttcatgatttacgaccaggccaagcactacctcgacgcggggatcgtcggcgcggtcctcgcgctcaacgtcacgctcgccaagtccgagaagatgaccatcccgtacgtctacaacaacgcggaggagatggggcccgtcgaggagaccaagggtgtcgtcaaggtcatcaagaagggtgacggcacgcccgcgcccgcgcccgcgcccgcgaactcggacgcgggtcccgattccgaatccggagccgaccccggtcccgacgcagacccaggtgcttccgtcgccgcggccgccgccgcgaaacccaaatcgaaatccggttcgaaacccgcctcgaagcccaaatcgaaatccgggtcgaaacccaaatcgaggtccgggtcgaaaaagtgaatgagatacactgtttttgtacaccaattcgccgacgcaaccgcgcaaccgcgcaacacaaagcacccgcgcaacgaagattaccgcgcaatccagagtacccgaagtacccgcagtacccgcagtacccgccgaacggattcggaacccgagttggagttgaaacgtcggaatggggaggtatgagatgtccgccgaaatggagctgttccttgagaacgtgggtaagtccgagcacaagctcatgaacaagcccgacaccttcgaagttctcgcgaggtcctttatgatgtgcgccggtgccgacatcggtaaggtggtggatacgtttctggtgaccatggaccgcgtttcggaatccgaaaacaagcaagtgactctctctatcatcaggcaggggttcgccgcgtaccaggcgctataccaaaagcaacacggtgagccctacggagttaagctgttcgggtccgtggtcacccacgacgacgacggcgacggtgaaggtcccggcaccggtacgatttctgtgggcagtcgccacttcaaggactccgttaagacgtgcaaggtggttcgccgcctcggcgaaggcggggtggccaccgtaaccctgtctgtgaatttcatattcgatctgtgtttcctgggtcacggaagcaccccccacaagtccgttatgtgccaggatatgaacaaggccactccgtgtgcgttcgggtacgacggcgccgggtccatcgtccgggtcgcggcttccaagcgccggttcaaaagagggcttccggggcttccggggattccgggacgtccaggcgacgcggatcgcgggtccgagaaaaaggcgcagaagtctcacggtacgaccccggtcgaccgcgttccgaagagcatctttacaccccccgccacacaggggaaggaggatggcgaggacgtaattgtcatttccgattcgacggactcgggcgaccccggcggcgagtccgcgggcgacgagacggatcccgatgatggcggcggtgtacgcgcgatcccggtcgggagcgcgtggaccgactgggttcccggtgacgaatcggacccgtacgaacccgacgttcacagcagcgacgagagcgatccccgttccgacgggaactccgacgcctcgggcgtctcggacgagtatctgcgtatgatccaggagtgtattcccgatgtatacgacgtgttgaaagccgaaggtatcgaaagggccataaggctgtgcaagacccttgttcacagcgacctgtacagcaagtatcaggagaaaccggagaagctggaggagctaaaggcccgcgtcagaaaaattctggatatgggcgacgaggaagatgtcgacacagatgcgtgcaatgaggcacttgcagacgcactaaggtgggtgagttttcaaaacatcccactgtaaaagggactgtgtcccgagggtgtccgtccccgtgacacatttggtacgtaaccatcacacagtttcacaactgttttgatttcggaagtccgaacttaacttttgaacttgtaacgtttaaattttagtccgaatcggacatgatcagccgcggcttcttggacgggcccgcgccatcctccttccttggtgattcggccacgccttggatctgcagagccagggcgggcttgccgtggatctgtttctgcgtctgtttatcgttcgtaacacgcgcgccgggggggctgctcttggcctcggctttcttgtcgcgacgcttcttgtcggcaccacgttgcttcttgacggactcgacggttcgcttggagcgcgcctgtgtttcagtgcgctgaatgagctccttcaccgcctcgcggaacttaaccatctccatcacggccagaaacgcgtcgccgtcgtcgcacacgagggtgttcggcggagagaccgcgggcgtgtcggtgaacgcgttgtcctgaaccggatcaagaaccagccagtcggccaactccttctcgtacttctcggtgatttccaccctggtcttttcttccgcgtcgtcgtactcgcggtaagactcgttgccgatggtcaccgtgtctttacctctcccttgctgaagccgttcgaacccgcccgtaccggagtggccgaggcacgcctccgcccagaggcggttcgcggacttggggccgtcggcgccgtcgacccggatggcctggaccttctccttgtaaactgtcttggaggtcgggtgttggccggggatctccttcagctcgtaagagatgtttatcttcgccttcttcatctgcttaccgaccacgtcgtgaatcagggtcttggcggtctgaaacccgcggaaactcgcggtcgggaccatcgcttgggcggccgatacgtaagggtccgggaacgtcccggtcggcagctcgaacacgtgggccgaggcgtacccgttgatacctttgagggttccgtccctcgcttcgcggagcgggacagcgtgaatggacgatatgaacgcgtccacctgttggtcgagagggagatccgggaacttccgggttgtctcgccgtattcgtacggctgcagcggatcgtcgtcgtacaggtagaaacagtccctgacccgtgagacgcatatgcccatatactgacgagagtcgatgtccttatcgacctcagcgtcgtcagcgtcagcgtcagcgtcagcgtcgaccttatcgaccttatcgatcttatcggcggggtcgtccttctcgaagacgtgtccccccagagactccagcaacatcgcgtactgatcgtcgctcagggtatccgccaaagcctgtagtttggaaacgtcgacctcgggtttgcgaaccggcgcgggcggtgccgggggcgcaccgtccgactcgggccgggccagagtatcgacaacgatgttatcggcgggcgccgggaaccaaacgtagttgtggggcctgtacgagaccccggtcttaccgtggtggcccgcgtacgctaccacgcgaacaacggcctgtttggattttgttttcttaccgacggtgccgtcggtgccgtctgaaattatccacagggactgttgcgtaacctcgatgcacagaacgatctccggaacgaaatggtcccccgaaggagccttccagatggggacctccacggtcgcgtactcgttgttcaggcgtttgaaccgcttagcaaccgtcttaccggaaccggacccggcactgcctctgtacgcgcacgcggacgtcttaccttgcgcgtccaccgcaaacgcgaacttcttgttctcatcgagtagggggttggactcgctcgaaagtataatctcgccatacctgttcttgccgctgctctcgggggttttagggttgcgaagtgacatgttcaatttgttaccagttaccagttgtcgggtttggaggcttgaaggcttgaaggtttgaaggttggggcgtgtatacaaaatcccgtacggatttaatatttttttttgttttcgtaatcatgtcatcgggatggctttccgtgccaccggaatgacatggattgccaccggaatgacatggattgccattgcaatgacatggaatgccattgggatggggggagggtggtctgcggtggtctgcgatcagacgctctcgatcttgtcgtccttgtcgtccttgtcgtccttgtcgtccttgtcgtccttgtcgttcttgtcctccttgtcgttcttgtcgtccttgtcgttcttgtcctcctctgcagggggcggcttcttcatcttggaaatcgcgcgcgcggtaactctgatccactcgtcgcgaggcagatcccggaactcgtcctcggataggccggaatgatgcaggagcttttggaggaaaacgtggctgagagggtgctgttcaccctttttgttgcgggtgattttaccgtcattccagactttgttgtactccaaatggtacctcttccgaagggtggtcttaaacgtgtccccggaaagaccgcacttactgctgattctcgcgtagtggcctttgcacccgcacgccgaacaatgggtcttggtggacttacctgtgttacccttcgagtcgcccgaggcgtcggaccgttccgtcttaacggcgtgcgcgaacgggtcgttcggatcgggtatcccgggattggtgtccttcttaaccttcttaaccttatgtgcgccctcggggtcggaaacgccgctcatctgtacgggattgttgtcctcatcgcgggcgcgcttactgccgccggggtttcccgcgcgaagacccatcgccttcttgcagaagtgcttaagctcctcgggtgataactcggccagaatgccgtgcataaccttggtccgatcctcgggaggaaggtccataatgtcttcgatgaagggggtcgcgacattgtcgctcatggttcgggcggatggacacgtgtgcgtggaacgggatgaatgtgattcaatgcgtgtttgtgtatgtgtatgtgtgcctgtggtagcggtgtggtagtgtgcggaatagggtgcggaattcacattttttgggtccaccgctcggtggacgatgtttgaaattacagtccgtgtctctggaacaccacacagaggcccgggatgcggctggtgtcccggatctcctgggccgcgggcgacgaaatcatatatacatatgatttatgttccgcgtcaggtcgaggtactccaggcttgggcccatttcggccaggataagtgcgcccgcggacgtgatcatattgtacatcaggtccagatgtttaaggcggggcatgcgcgccgcccggatcgtgttcgcgcccgcgtcgcacacctcgttgtagctgaggtcgagcagttccactcgcgggaggttcgcgcagatgtgctcgacccccacggagtctatgtagttgtagctcaggttcacgtgcgtgagtgcgagtgaggcggtggatgtcgcgccccgcatccacaccaggtgttcgctccggatgtcgcagttctccagcgtcaggtgtgttaggttcgagagcgtggccagatacgaaaggtggccctcgcggcccaggttccccatcatcgccgccgcgaagtgctccaggttccgcagggttcccacgcggcgcaggaaggtccccccgccaggatccgcagggttccacgaaacgtccaagaactccagattggtgagcgcgaacagatccccgatttcggccggagacaacaacatgtccatggcgttgagccgcttgaggttcgccaggcccgggaggttgtggcgggggagccggcaaaaactggtgtccagatcggtcagcgactgcgggaactcgacggcgtcggtggggtccaccttcgcgtccatcaggcccagccgttttaggctcgtcgcgcccttgagcgcgcgaaccgcctcgttcgtgaggcgcacgcgcggcgcgacgagcgtctccaggaacgaacagtggcgcagaacgacgtccaggcccggtagcgaaacgctcttgtacacgaatgggtccacctccagcgcgcggaggtatgtcagatcgcgcgcgtacaggtcgcgcgcggggcccgtcagcagaacgcgcgacacgtacctattggggtacccgggaatcggcctgtggccgctagccggaccccccctgaaccgggtcagggtgagctccgcgtgctcggtcttgcccacaatttcgtcccgctggaaaatgtcccgccgctccgtgaaaaggtcgaccatcgttcgcaacgccgacgacgcctggtaaaacccgcgcgagacctgtttcgtcacgtccagctcgtcgtcgctcagaaacgagaatatgcggtacgcgcactcccgcggaaggtacggcgtcgccatctcccgtgggaatggggtgggagtgggagtgggaagaaacgggtcgcaaacacgctaaaaatccaacgaacgcaaacaccccgcgacgaa

SEQ ID NO: 125 - DNA, 21530 bp, Tetraselmis sp.
  source 1..21530: mol_type = other DNA
gggaaccagaaggcactcgatgaccatgctttcggggcgcgacagcttagggtggaatcccatcgccgcgatgtcgtcgtcggcgatgcgcttcagaatcgtgagcacgtcctcggcggacatgctgagcttttcggaagcctggtcgtcgtcggcggtcgcggagcctccttcgacgtcctcgaaggcgagctccatcgagactcgcatgaaccggtcgttcaggaactgcttgttgattcgaaccggttgcatggcgccgcacccgtgcgggttggcgttcccgcacctggccttgttggtcgacgacttgctaatcaccttcatgagcgcctcgaatcgcttctggccgtgcaggcgcatgatgctcgccatgtccgggtgcgacggatggtacagcaaccgcgaacacttccagcacacgcaccggagcaccttgatgaccgtgtcgaacatgagcgcgttgaaacacggcttcgcgagctcgatgcgtcccgggtggccggggcaaaacttcatgctctggccgcacgtcgcgcagttgtggttctggtccgcgcccatcacgagcgacatggtcccgtgcgaaacgggcgtggatcctaaataggaatccgtggagttgcactccatgacgctcttctttcggatctcatcggtggacagcaacctgaactgcacgctcctgaccggcttgatcttcgacgcatacggatccgccattggtaaacaaaggatttctttttattgtgggcacaacgcagctttatgttgttgttgacctgaatcggagcgacagaccgagagctgggaccctcgcaggacgtgtgcacgcgcaagtctgcgttttaatccctgtggtgacacaatggtgacacaatggtgacacaatggtgacacaacggtgacacaatggtgacacaacggtgacaaaatgcttcgtgaacaaaatgtctgcgtgttacgccacgatgttttttcgatatggaataaaaaatggatgtcgtttatgtcgaattcgatggcgcgcaagtgtcaatacgtacgtgtttaatccgtgacgaaatctttgtatcttgcatacagtttttgtctttgatcttcaaagaacaagcaaaaaataggttttataatttgagaaagtcgcacgatttctcttcaattctcgttgaaaaggaaaaaatacaatatgtaaaccaagcggggttagataacatattgtctttattcagagcaaggaaggtgaaagatttcataaccacctatcgcgatgctcttatgttgaaattgttcggtaatgcccgcctgagcgaggaaaatgttaacatggttgacaacatggggaaactcgactccatttctagaatgttcaaagacagacagtctgatgacccggtaagtgacccggaaaatgacacaaatataatgtctgcggtcacggaagattccggagattacggaacatacctctacattcgaatagcgcttcccgaagatattcgcctgaacgcggttgctaaagagggaaaacttttgacaacaaacgttataaagttcggaataacccgaagtcctcacatcagaaacggtgaatacatcaagaacggacacgacaacggatatttcgcgttcatgtacctgacgaataaggaagtagcctgtaacacggaggcaataatgcggctaaagctcaagaatgttacggtgtataactcgttcgaatatgtcgacacagctcgtcttgcgacattcctcggactagacgtcgggacggggtatcagtggtacttctacgtagcggagtgtttgtacgcgtacatcttgaaggtctcaaagttcatatggggagacgagattaacaacttcgggatgcgattcttaccgaaacaggtcgacggggggctgtgtgtacccggaacatccagtgatattgctcaaaaactcaatctcatatatgagaagcgtgaccttaagagggagcacgcgatcgcaatgaacatatacgatgagagtggaagggtgcaggacctgcatcagcccatccttgtgaaaaagctttatgaagtcgaaactgtcaatggggcgggtacggttgacgatgatttgatcaccaatggagaacaggttattgcgtacaacatcctgaatggaaacgagatggtcttcgacaacaatgacgactgtatgaaatattttggaatttcgtccatgcgaacgctcttgagccagagggctcattttctcggttgggtgttccatcatccccaattcaaacgatggcaacctccgctaggttttatgttcagggatctatctaaggaaaaacagaaaaaaacaaacaatttgttttatgtcaagtcggtagatgagagcgatggaaaagtgcagtactttgagaacaaaagagaagcggtgttaactctgcgctacaagacttcggacttgggttacctgcgggctttcataaataaagaaaaggtggatccttacggacgaaagtggtacatttgcgacccgagttcggttggtgaaatggtggaaagaagttcactgttcttgcaaacatcttccaaacttgaatccaaggttgacgaacgaacaagggggcgggttatcgcgcgtgatatagaaacgggggaggaaagagatttcggcagttgtacggctgccgccgattatttcaagattcatcggaagaagatggttgacgacatagtggatcaaatgcgacaggcttatggacacgtgttcaggtttgtcaccacacgaaaacgttgggaccctccggaatatttcaagtacgataagaactcgtacgagttcaaaacggaacgcttcgttgttcagaaagatagggaaggaaatattttgggacttttcgaatcgcagaaggcggctgccgatatactcggcgagttttccaagaagatcggtgatcacttacgagcccaaagatccgacaagcacggaaggacatttcacaacgccgcgattgaagagtgcggacggtggattgaattggatcctgttcagcccgtagaagaacagccgttcgagggcttcgacaagggaataatagtatacgatatcaggacgggggaggatgtcgatcatttcaaaactccggaagctgcaaaatcgtattttgagatagacccccgtctcatcaggaaacatttggttgatcagcctcggcagtgcaacaatatggcggtaaggaacgttcataacaaaaaacgatggtgtcctccggccacactcgttacggacggagaatacaccgacatcaggagcgattacgtggtgggtgagaaggacgggaaggtgcttgtgatgtacgagtcgatcacaaaagcttcttcaatcaggaactgtgacaggctgcgggttggaaagacaggcgacgggttgttctggaggagggctttcaaacgcgagtatgatctttgggttcctgtgtgaaggaccccatgtttttcgcggcgcgtatagcggtgtcccaaaaaaaaatttgtttccaaaaatggacaacggccaccgtatcgttgcgctggagagccgtatcgcggagttggagcagcatgtgacgcagctggtcgccgccgcgaaccaatcggaaaacggtacgaccaatcgctacattcgcgaggttgactacgcgctgcacagtctcccagtcatcgacacctccaattacctccggtccaagccttatccttgtgccgatgcgggaaaggtgtcgcccgccgccgagaatccgggtgctacccaggctggacacatcctgccccccgctcatataaacgagatcgagcgctgccaccgcttcgccatcgaacggcatggcgaaatcaccagcgtctcgaatgtgccgaaccttcaactgcgcagcgatcccctcatcgtcccagagaaggtgagtccctggtacaatccgccgttcgagattaacgcgccaaaccgaccgttcgaggtgaatagtaacatcggcgttccccccgattacgcccccccggttaggtcgggtacgagcccccccgtgacagccactggcccgttggcgatcggaaacaactactggagatccgttgcgtcgagcgaaaatgcgtcgtcgtctgtccccgtatcgaccgtcgcggggacacacgtcgacaccgtgtgggggcgttggtattgggaactggacaccgacgccctgtgcgccaagacgggtgctgaaaaggtggttcccgcgggggccgcggcccccgcggcccccgcggccgaggagtcgaacggtgagaaggccgtcgcggccgaggatcctagtgctgataaggcggtgccctcggccgtcgctgccgaggagtcgcatggtaagaaggttccgggcccgggtacagagaagccgactttgtgggaggcaagtttgcaatcgaatgtcaatgctgcggatgatttgaaaaacaaagtgtgggggcgttggtactggccgctggaaaccggtggcgtcctcggtgcgaagccggacgaagaaaaagcctcgcccgatgtggcaaaagacaatgtgtcgcccgatgtggcaaaagacaatgcgtcgcccgatgtggaacaagacaaagcgtcgcccgatgtggcaaaagaaaatgtgccggcagccgccgaggtgtgcggtgaagaaaatgtgtcttgtgagaacccgtccgctgcggactcgcctgcttccgaggcggaggcgggggcgcggggagggtggtggcggggctgggctggaggtctcgcggggatggtgctcagaggcctgggctttcgtcgcaggggttcgtcgcatttccagcccgtggtggccaacttcccgtcgtgcgaccacgcacccgccgacacgaatcgggaccgcgacgtcccgtcctcgcctccgcctccgcccccgccacgcgactccgaataccccacacagccaaaatccccgccgtcgtttttcgacgagatccgcggagactccgaggcgatcgggaaaaccctaaaacacgatgagagcgcgtcggacgtgacggatccggaggatccgcaggaacctgtcgacacgggggaaccggatgaaccggatgaacctgatgaaccggacgtgacggaaacggatgattcggatgaatcggacgtgacggaatcggatgattcggatgaaccgactatagactcggagcccgtgaagtcccagccgaaatcggatgattcggaaaagtgtgttttgggaaatagagtggaagccgaagcggaagccgagtcggattcggaatccggttatggctcggatgacgcatgggataaagacatctggttttaagacccctgattatgggagtccaaaaaaagtttacatttcagattgttcgggtttcctcaggcgccgcgcgcttgcggcaggatcggggtacgccgggtccgtgacgcgggcgcatcatgaggtcttccacgagctgcggaaggccgtcgaggcggactgtcgcggtctcgccttcgtgtacctcgccaagcgagcgaatgatcgtggataacagaacgcggctgtgcgtctcgaagtacggaagaacttgaagcggcgtgcgccccttggagtcggtcacgccgagcgcctcctccggaaccaccttgagcacctcggtgaaaaccttctccgcgggggccttgctcgcgagaaggtgaaggaccgttcccccgccgcgcacccggtgggtgagcagaagctccggggcgtgacgcgccgcgtgcgcgaagatgggcgagattgcgtcctggaataatcctttgacgtcgttggcgcggaggaactcctccagcaccgtgataccgtctccgggcgcgtcctcgtcctcccccgcgtcctcggggttctcagcgtcctcgtcctcccccgcgcccgcgtcctcccgcgcgtcctcggggttctcagcgtcctcgtcctcccccgagtcctcgtcctcccccgcgtccgcgtcttcctgctcggcgtcttcaacccgcgccgcgaggggcacgacgccgaggcttagaagtttgttaacggaccccgcgtcctggcaacggatcagcgagttggtgtcgaaggcgacgccgtgctccgtcagggtcgtcgcgactctccatatcttgttgtagatggcttcgttcagaaggtcggttgggctggtcggggcgtccgcgaacataccggtgcgcagacattcgcgaagggtgtccgtgtgcgtttcccagaaatgcaggtcgaagaagagagagaaggaagaggtcgggctccacataagcaacgccgcggcggcaagcgaacgctgggtgttgtccaagttcaggtcgtcggccatgtcattcgtccatttgcactcttttccgaacctgatattccgggacgcggaccagagatccgcttggcggatacggggctcgcgctgaagggcgtcgcggatcgcttccatgcacctgataccgcctccggcgacggacgcaagcgccgcgcgggcggcgatcttgcactgcggggtggcccgttcattcgggaagcgcgccatggcggcggtgttgcggtggttggcgggttgtcgcgggtctgtgacgggtggtgtgcgcgcgtctgcacgggtgggtatgtgcgggtctggggtgggcaggcgggcggtgggttgtgtggttgtgttggcggttgcttgtgctgcctgtgggtgaacgcgcttattttcgccagcgtggatgtgccagcgtggcgccgtgccgtcacacgtggaccgtccgtaccccgtaccccgtaccccatttcctcgtcgtaaatttgtaaatttacacgcccataaaaatgtaaactaaaataaaataatgcagtacctcctgcgcttctccgtcgccgcccttcgaaaacacgcccgccgacacaaaatcaatctccacggcgcgaccctgaagaaggatatcgcgtcccacatccacaaacacgaatccgccgaggttctcaaggaacagtccctgaaaatgtcgaatgtcccgaaaaaaaagtctgataccgttcgtaagcaaaagtccgctacggatgcgaaaggaaagtcgacgtcgaaatcggcgacagtgtcgaagtcctcggggaaatccgccgcgtccaaggccttgaagggggccagcgtatccaaagcgtatcgtggtaattcaaaggttcagacggggcgaggcgcggggtgttcaaccatgcgcgaacgtaaattattcgacgaagtatttgataaagtggccgacaacagggtactgttcaaaaagttaacgtttcctcctgacaccttgaaatgtttgaacgaagcaggaaacgctttatgtcgagcggttttaaattatgaaaatcaacccacaaatggtgcattacaaaaagaaatcgaagatacactgaacgaatataataaactcgtaaataataccttaaatatccttaaaaaaccagccgaaggggaaagcgtcctcacgcccgagcaactccgggagatagaggatgaatacaccgctatggaatgggaagagttggaggctcggttgaatgctctgaaaggcgatcatcaaggtttttagttttttatttcaggagattatgcatcctgtggtgaacgctgaggctgagcaggagctctgtgcgccgattcttgaccgcgtgaaccttgtgctcgccctcgagtatttcccacgtcctgtggaagtagaggagcggcatgtcgtacaggtcctcggggattgggacgcgccagtcgtcccggaacctcgcgagcgcgacggagttcgcgcgatccagtgcgccgcaccactcggcgatcgtcgtcgcggctctccaacagtcccaggcccagtcgcagtcgcggtcgcaatccgactcccagtcgaagtcgaattcgcggcccgactccaagtcccactccaagtcccagtccggctttaagtcgaagtcgcggtccgcctttaagtcgaagtcgcggtcgcattccaactcgcgcgcacgcgcacgctcactggagtcgccggcgcgcccggtcgtgggcgggggcgtgggccttcccacggacggcgtgtgggttgcgatcacctcgcggagggtggtcatcggcgtcaactccgtgtcgtagcggtaccgcgaggaccaagacgagggcgtttgccaaccgcgtccggcgaacaacgaaaccatggcggggttcaggaagtgtgtcgcgctgctccgcgttgagttgagttgagttgtgtcgcgctgcgttgttgtgttcgtggacgaggaagcagttaacacttagccggcagttagccggagcgtcgaccaccgcctcggttaagcgtttgttttttcagctgtttgcctcaggcgtcaaccagttcgtcgacgatcccgtacttcaagcactcctcggcggtgaaaagcgttcgggcgctcttgagggactcgatgacattgtcggggagtttcgttcgggacttcaggatccccttgattattccgaaattgagcttggtgttgtggatgacatcgtcgaaaatttgtgtccttgtgaagaaaatcgtgcccgcaaggttcagggtcgcgtgcgtgtacatgacgcggtgagtgcagcagagaagagggatgacggaaataagatcatggaaggacccgtcaagcagcatatacgttgtggcgggtatggattttacgtggttggcaatggcgacggcgtcgaacgtcgaagtgatcgaattgagcgtggaccggataacgacgtttcgtagttgcgaggctcccgataccattcggctaatttgcgagacggtatccaagcctagattttcagcgtcgcgctttatgacaaggttgtttacgaaggtgctctgaatggtctttatgaaggagataccgcttttgggtccggtatgaactgggtcgataattcgatcgacgaccccgttctttagggcccacttcgcgtccatgataaggtcgtgtttcaaaagctccttcaggtcggtgtctttaagtttcgtgtgctggacgtaatcgtccgcgatggatttgtacattgttttccatttttttctgggacacttataattgttctcgtcaatgcacggaagcaccctccgacatcgtgcagccattcactaccttcatttcgacaggtcgctaaggagggttgcaaaaatatatggggtcgggaagtcgtctgtagcgcgctgggcgcgtgctctggaggttccagagacgaagggtaggaaggttaggcaaagcgccgtcgcgagactaaaaccgaaaatagcggagcatctgcaacagaatcctttcctgacagtaggggcgcttctcaagaaggtccgcgaacagggtgagaaggtcgggatgaccacggttcatcgagctatccgtgccgcgaacttcagcagaaaaaggacacgacctcggttcgccccaaaggtccccaccgcggaagaagggcgtactttcctgacctgtctgaacaatgcgtctgaagtcatcgccgtggacgagacgagcatctacgtggacgactcaccgaggtacggatacacgctgaagggaacacgttgcttgcaccgccggaagtgtcctgtccgtacaggacgcgtgactctgcttttggctgtctcaccaacgcgcggcgtcgttcatcacgaagtggtcaaaggctcggtcacatcggatcgctttgcaggattcgtacggaacatctccgcgccaggcagcacagcgatcctcgacaatgcggtattccacaaaacggctgctgtgcgagaggccgctgaaggcgccggtatctcacttttgttcacacctccgtacagcccagagttcaaccccattgagggatgtttcagtgtcatgaaacaggcgctccgcacgcccggtgggtgcttaaacggggcgttagcgacgctcacggcgtcgaaaatctccgccttcttccgacattctcaagcgcacgttcaaggagttgccggaaactagcaaaaagcttaacgagagcacacaacagaagtaaataaactccgcttccggatctcacaacaagagcttaaggctacgccactggaaggcacgcaacacaagaaacgccgctgtcctgacaagagcttaagaagacgatcagcacaaaaaaacccgatggagggagacggaaggagccctgacgacgaggaggacgaagatgcgggggccgagctacgcgtcgtcaagcgatgtttaaggaaagcgctaaacatgtccacggacgagaaggatctgttcgtctcaagggtggaggagctggtcgtcgcggtgtccaggttgatgcaccacgggtcgcttctggcaaccaactacgtcctccaccggatgaacgacgggaaccctccttccgacgaccttctgacagaccagacgttctacaggcagtgtatgacgtactcttcttcttcggtacgttctggcgcgtaccctgaagtgaagtcgttcgccgacacgaagatgcacctcatcccccacacagagcaggtcccgtactccggaaactgtgtcaacgcagccgcgaggaagctgaaatcttccgttctcacgatcctgtcgcaccgcttccaccagcgcgtcacctccgcggtccgcgcaatgtttcccgatataccggaccgtgccaggatcgccataaaacagaggtgcctcggcagacccggagggcctcccatcgcactgactcgagaggcgtgggccttcgttgacgcggttagaggagacatcttccacggagccgacgtttattcgaccgcggtagaggaggccgtttggaattgtcgaggaatcaagaaggcggacagagaggccgtgtgcaccgaactcctagcggggcgaatgcccgagatggacagtcttaagggctcgggccgtgaggtggttacccatgttctggagttcctccccgcttgcagagcacacagaggagcggtccccgacgaagaagttaggcgcctcgtggccgcggccgcgggacgcgttttccggagggcgaccgatgagcagaagcaacaggtagtggaggatgtcatccacacaacctcttcagcagacaggcgtttcgggaggttgataagcgcggcgcgcagcatgctacgcttcgctggagtcatcagcatcggatggttgaagacacacccggcgcgggcgttgatcgccgtccgtcggatgatgctggaggtggaggatggcatccgtctcgccgagaagctcggaaagaaacgccgtcccaagcgcttccctctcctaccgatcttcgggcagaggaggcagatggtgacgttggatgccgacaccctggtgggtctgtgcaaggccgtgggtatactgccgagcggagcagggcggaaagccctgactgaagacttcaagcgatccctgcttagggttcccagccggtttcgttttcagcgacaaaacgtccttggagagcgacggcgtcgccatcgtgttgaggacctcaaagaccaaccctctcgcctccgcagaaatggcgaccaaggatgacctagaagacatcgtctttgacagagtgttggcgaacgatccggggcgggcagacatcgccaccgtcgtcgactggacggacgaggaagggctgaagaggggatcgacgcgtctgacgcgcaaggagtactaccagcaggcaggcataaaccgccgtgcaaggaagcgccgcatgagggacagagcaatatccgaacacctgaacaaatggaaggaggccagcatcaagacagccgacccagaagcttttgaggaggctctgagggtcagaatgagtccgctccctggctccgagggcgacccctcaatcgaggttgtgtggggccaccaactggcccggtggacgtccataatggacatgaccgcgttcgccgcgaaacgcagaacactggatcgtttttggaggcacaaggttggtctcgaggcgcgacatgatctgagccgcaccgtcgtggtgtttggagacgggaagttttctgcgtcgggaagaggagaacgagccgtgcctcggaaggcgatggaagcctctgcggcacgatttgcggcgaaggtcgttaaggtcggcgaagcctacacgacgaaagtgtgttcgcgttgccatatgcccacattttctgtcagaatgctgaggtcgaagaagactaccgaagggggacgaatcgagcggatggtcgatgtccgggagctgcggcgttgttcatccaacgcatgtcgcgcatctccttacaagtcgagggacaaagacgccgccatcagcatccttcagattttcctcgcgggaatagagcgcccgccgtgctacaccaagcaaggatacgaagctgcgcttagagccatgcgacagggaccgcaacctcatcccttggtctgataggaaaaacctaacccccacggctgtgtcgtgcgcgtcgatggcggcacagtcgcgctgcaagggaaacccccagggtaaccttgctagcaggtccccgcgaggggaccataaagtaccttgcgttttgagggacggacttagcggacctatggtgtcccacaatttctggattgtagtttataccacgttaagttcgtacagaatggaatcaagaacttccttctggcccatgaccagagccgaatattggtgaaggagaaccacggcgtctttgcagatgacgcggtatggggcgaatatactgatgaatgtcgcggccgaggctgacatgccttccaccaatacacacagtgcaagcttggtcctgcccaacaacgcgcgcatagaaagaccatcctccatggatcctccgggggagttcatgtgtacgacgattggacgaggttttgtcgcggtctcggtttgcattccgtctctgttggccgcgaggatgtcctgtgacagcatttccagtttttccggtgtgagtaccccgtacaagaaaacgtgttgcaccttgggcccgtaaaagtcgtggtccttcattttcgagaacacgtcgaccgacctcttgatgaaggcgggcgaccgtgctatagacgctttccgacgcggaggcattggtttgagataacagatttttccatttgtgaatggcaaatgaatttgtgcaggcgtttgtgtgtgatgcacggaacagcgaagcgccccggcccgcgacctctcggaaacaagatgcgctgttgcgaaggcgtcagattcgcggcgcagcgcaaacgaaggaacgaggacggtcacacgcacacgcacacggatacgggaatggacatggactcggactcggactcggacgcgcgcacgcacacgcacacgcgcgcgcgcacgcacgtgacggagagggagaaggagtggttgagggagctgggggtggggtggtcgcgtttgggcgagcttgagcccgcgggcaatccaggcgcacattttccgcctaaaaatgacaatgagtaacgacgcgcccgagttttccgatgacgagatcgcgcaatacgtgcaagccgccataccgtcgatatccgccttcctggaggcgatcgacgagtggtccgatcgcgacgaggagtacccgctgggaccgatccatttggagggggcggtcgctcgcatcacggtccagcttatggggaacgtggtgttgttctggcgcgggagcgtggggcttctgaaacaggtttgcgaatcgggtatccacaatctgaacagcctcctggacgagaaaggggacttgacatcgcgggacatcgcggggatcgtttaaaggtcaatccccgacctgcgaaaaatatcatggaactcgatcatgatctcggccttgtgttgtttgagaatggatgcgagggtcgactggtcgaacccgccgtagaaataattagaggtgtaattgtaattgtaggtgtagttcgggatgggcttcgcggggggtacgggcggcggctgaggctgaggctgatgctgcggttgcggctgtggttgttgtcgcagaacgtgttcgtacgtgtttcccgcgtgtttcccgtacgaatggttgggaaacccggaggcctggttggggttgttcccgaacatggttatttttttcaacgggttttattttccaacacaaatcgacgcaaatctgtcacggacaaagcaatgtggctcgcggcgctgttgagcgtagcgttgatggtcctcctgtttttgtcgatcgcttccctcaacagacaaaaacgcctccgcgagccgttcgtgtcgtttccggagaccgtggacctgacggacggaagccacgcgactcgcgcggtcgacccgacgcgggagcccgtaacggcgtcctacgtcatagaagggacgtcggagctccccgaccggttggggttccaggcgcccgacccgggcgagtcggacggtcccccggacataagaacgggcggcgtgttcgtggacgaggaggcgggtgtgccgctgggatactacgcccccggcaccacgtccagagttctgctcgcggacttcagtttccaaaccgcgacgaacgtcgatcggggcctcggtcccgatcccgatcccgatagcgatcgcgaccccggcgccgacgcgtgccagggccactggacggcggaccgccggtgcgtttacgacggggacgattgttcgggtcccggtacggaccgggtcagcttgtggaaggatatgggggcgacgtacgagtgcgttgcgcaggaggagtgtaaaaccgggttctggaacgtcacggggtgtacggtcgcgggggacgagtgcgagggcgacgacccgaaccagacccacgtgtgggttaaagaggggtccgatttcatgtgcgaggcgcaaccgatatgcgccaactcgtggtattcgccgaccgcgaacgcctgcctacagccggggtcggcgtgcgagatacggggcgaggcgggggtggtcgaggacagggacgggggatacaggtgccagctgaccatgagttccgtcgacgggtacaggttggcgaccgaggagaagaccgttgccaccgaggacgagtgttacctggcgtgtatcgccaaggacaccgggtgcagcgcgtattccgtttctgggacccggtgctataccgcgggttcctcgtcgtcgtactacacgttctccgaccccgagtccaggatccatttcacccccgccgcgaagctttacccgagcttctccgcgacggaggaggcggcgggggtgcgggtcacatggcagccgttcaacgccacggggttcacgatgtatagatcagacacgcccgccatggatcccaaagaggttatacccgcaccggggaccctcgtaccgtacgagtcggaccaaacgtggtacttcaaaccggaatacgagatgggcggtgggataccttcccttccgataaggaagtacatacagaccgaacgcgtggtgacgttcgaccccggagccgtggtgttcacggtcgagaaggtgcccggcttccaccagaaactgcgcgtggtgtgggtggtgtccatagaagacgacatgcagacccaagtgcagtaccccggtaccgagaggaacgtgtacccccacggctcggcgaccctcaccttcgagacggtgggcgcgaagacattcgggatatacgtcatgcgcggggggcaggaggtgtattcggcgacaaaaaccgcggaggtcgcgtgcgatcccgataaggtcggtcggggggacggcacgtgcggataccttaagggggggcttacggtagtccgggcacatggtatggcggtaacggtgcagtgggttctggagatgggcgagggcgtcaccgcgagcgtgtttgtcggcgacgatatagtgtacgaagatatcgaacccagtggttcgatcgtcgaggaccggattaccgagccgggcgaaaccgaaataaaacttgtggtgtacaagggcgacgccgtagttttcgagagcgagcctcgagcggtaaccttggcgtgtcccacgggacacgtttttctggagggggtagggtgcgtggaagagtgttcggcgaacccggcgaacggcgaatggaacttccgcgacgacgggacctgtttcctcgagtgtgaaaccgggtacgtaccgtatgataacgtgcgatgtgtcccggaagaaggggcgtcgtgtggaccgggggagagtgttaagttcggggcgtggaaggcggatggggccggcgggtgcaggttagtgtgcgacggcccggggtacttcaaagatcgcgaccagtgcttcgagttgtgttccggaacggcggccccgcggacgcggtggtcgcacaacgctgacaacgagtgcgaactcgtgtgcgaggaccccgcgttcgtaaaccggggaaccgcaaggggcggatgtttcgaggagtgttcgctttctccgaacgcaaactcgagctacgtcaacgacagcgcgactggcgcgtgcgttttggtgtgcgacgacggatacgtcgactacaacggcgcgtgcgtcccggccctcgggaggtcgtgcggccatggcgccgtcgcgaacggggagtacctcgcggacggaatgggaggatgtgtgctccagtgcgagcaggggtacggtatcgaagacgaagacgacggcgtttgcaaacaaacgtgtgtcggcgccctaccatccggcgcggagttttaccataacgcaaataacacgtgtgaaattcggtgcgcgaacagtaagcacacgctgtacaatagtggcggtgagttgtcgtgcgtgttgaaagagggggagcagtgtgctgccgtgtcgagcgggaatgcgatcgcggacggcgagggtgggtgtacggttcagtgcgacgacggtcactacctgcactacgatgcgtgtgtcccattacctgcgatcaaccgcttcgacgttacgctcgacgacgagaacgtccaagtgcgttgggacgtcactctgccgactgggatggatttggttttgttaagacgtgcagtgtcaggcgacagaaacggcatcgacgacatcagacataccctgggttcccagaccggggacatgacgtatcgggaatcccgccccggggactacgacctaactctccacattgccgagaccgatgagtcgaacggtaccgtcacagttcacgataccgataccaaaagagtctcaatatcgtgcgggagtgggcgggtgttttacaggggctcgtgtgtagatgtagacacagattgcggagccgacatgtcccccgtttcaaacggcacgcaagtcgtgaacgcggacgggcagtgtatccttcgatgtaaccgggggttctctctcgatacatccggggaatgctcttcggacgtatcgactggaacgtccgatccgactctaccttcggacgattcatccgattcttctgattctgctgcgaggtcggggtgcgcggtcccgacgttgttgaataccggcacgttggtggattacacaaaacttgatatcggggaagaatggtacgtgaccgaggcccccatcaagtacgatgaagaggagtcgtgcaaggcagaatatccgggaaattgtgacccgtgtttcgtgaaagatgccgacacagtcgaccactgtgcggatatatgcaccaacacggacgagtgcagagctttcacgttttacaccaagggaggctaccttgaaaccgacaagaactgcaaactcatggcgggggaagaaaaccgaagtacagcgccctacaccaccgacgagaaaaggttccagtcgtacgttcgccaggactcgggcgtgagttacctccacgacggaaccccggttccatcgtcggggagtggtacatcgggatgcgcagatcccacgttatcggagaccggtacactcaacacgtatacgaaactcgatatcggggacgacctttacgtgaccgaagcccccatcaactacgcggacgaggcttcgtgccagggagatctaggcgggtgtgatccgtgtttcgtgaaagaggccgacacagtcgttgactgcgcggacatatgcaccaacacggacaggtgcaacgctttcacgttctacaccgagggaggctacctggaaacgggcagaaactgcaaactcatggcgggcgaaacgggaggtgtcgcgacctatgccaaagacgacaaaaagttccagtcgtacgttcgccagggagccggcgtgaggtacctccagggcgggacctcgtcgcaaccccaggattcccaacaacaggttgaacaacctgtgaggagtagagaaatagacgacgagtgctttaacgcgaactggccgagtgtggccaacggaaaatacgttaacgcgcagtatcagaagtgtactctgaaatgtgacccggggtacgaaaagatgggggcgaactgcgttacgtctcaggacgtgtactacgaaaaccttacggcggaccagaaaaacttgtacccctctggtgtggacgcgtggaccgggtgcgagtgggttatgaacaataaggaagggcacgcggacacgtacagatcatattgcgattcacgcaccagaacgagcgaattctccacggcgcacataaactgcgcgtggcacgcggacataatgaacgcggagttcgagaacccggattgtaactccgtttacgataaccccataaagactccgctgaaccgatggaaatcattcgaaaaggaacacggtgtcccagtgggggcgacgtactcgacgggacaaaaagagtgggttccagaacaggagaccgggacgctgttccagttgaagagcgggcagttcgagttcgtggacactgggcgggttgactccttcaggtacggtccgtcgggacaacccagcggcggaggcctgctagcaggataattttctggtcggtattttcgaaatttgaatcaatttacatggtgttggaaacctgcggtgcggtgcggtgcgctaaaacatttcgtcgaacgtcgcgtccaggacaatgtggtgccttccatcccgcttcgcgggcgccacggtgacgcgggtgagcttggtctttccggcgccggtgagctcggtgtcaaaccagatggaccccagacttcccgccttgaaccattccctcctcgggtcagaggacatgatttcgaacagttggtttgtggcttcgtggaaccacgggcgcatttccccgcgtgcgctgcctgggtagcactggggttcgtggagactgatgtccacaagatcggcgttgaatgcccccaagagacctccgttgtccgcgatgatcttgttcacgttgtcggcgacccctgtcgcgagttgcaccgaggcgttgacatcttcctgggacacgcggaaggtatcaacagcgccggtcgacccgacggagatggcctgcatgtttgaagaggtagacgttgtggagtgaaggaaaggtgaaatgtgctggatggcggcggcgaccgcatgtatttatgttgattgcgttcattttcattgatttgtgttgattcgatttgatttcatttgattcgccgcgtacagtaacatgccacgtaacatgccacgtggcaaaacgctcaccgcgtgaagttcgcacacttccattcacgcgtgctgcgcgaagatcacttttcggatcatacggttacccaaattacgaccctctgggtgttgcgttagttttgggaacgactgtaaaaaagtaagcagcggtttcaacaagcgttgcgtagacggcttcaacgctggcgcgccaccagggctttaggtccctcggggatgcgtcggatgcgtcatccgggttgtcgccatcgctgtcgtctgccacgcagtcgatgtagcgcgcgatgtcgtggtcccgcaaacacaagaggttgggaaggttgacgacgttggtccacgggtccccgtcgtccgcccgcacgcgtttcccgttgacgaaccacacgcgcctcccggcgtgctgccaccgggcgcgcgtggggacgctggcgaccgggtcgtaccccacgacaaagcggcgaagatccaacacctcatccacgcgcgccacgaacgccgagttgccgacccgcgggcacccgaacacgtagcaccggcagcgctcctcggccgcctcgtcctttaccatcgcggcgcaaagggtggcgacgccgccgcccagcgagtgccccgtgacgacggttcgcgacctgtcggggtgtgcgcagcgataccgtttgacggcgtcgaccgcggcgcggtactgcgagaagaagcccgcgtgcacgcgcgcaccggggtcggtgtcctgcatgaacggcagtgccttcttgatgacggcggcgttgaccagagcgtcacgccagctgtcggtaccgcggaacgcgacaaaaaccgtgcgatcgcgttcgcggtacgcaaacacaacctggacgtcgctgtcgtcgcacccgaagcgttgccagtcggtaagcgcgcggtggacggcgggccaccgcgaggcgcgttcgcaccgggggcggaacgcggacggcgtgaggcggtccttgtcgtacgcgtacgcgcataggaacgcgcacgtgagcgccgtggaggccgccatagcgtttttgagaacgaagattttacgtataagattttatcgcacgatcacaagcgcttgcccggtagcggccatgcagtgaaaaagcatgtgcaccggtgtccacatcgggttatcgaaggagtgcaatcggtcggaaaggaaatacaggcaccccatgaacaaccatatcagccacgacagggccatctcgggaatcttccacgcgccgtaggcggtgtatatcaagaaacctgaggttgccacgaccttatcgattatcatatgggtttcggacggttggttccaatacagaatgctcacgattccgcacacccacgaaacgcttcctaaggcgtactgtttcaggccgaatgcgaagataccgacgagaacgaacaagtagctactgagaaccagctcggggtacatttgtttaaaaggaatgtgtgaataaaaaacaatgtgtcgggaagaaaaggggtgcccggcgcctaatttacctggcgtcgccgaaggcgtacacgtcgttcccgcgggggcggttcacgaggtagtaacgcagaaactccccgacggacgccaaaacgaaggagatgcatactgtggatgtgtatatgagggggataacgacaatggcggggtactgccccttcgaggagggttcccccgcgagagggtcgaaaagcatggggtcgacgattccagttttcgggtcggtggtgggaagcatgttcacgggcacgggcacaggcacgggaacggtggcgaaggcggtcgcggggagagcgacgtagttcagctggtaggtacacatggaaatgaccgcaagaatcaagacgacggggtaaagcagcaccgtggcgacgggaatgaggcgtttgaaaaccacgtgatcaaagtgcgacgcataagcccactggtacgcgcctgtgagcacgaagtccgtgacaactggaacgaacgcacccgaaaacgtgcacatgacgacg

SEQ ID NO: 126 - DNA, 13790 bp, Daphnia sp.
  source 1..13790: mol_type = other DNA
aatttcttctatctcttgattttttatttgcgcaaactttacaattatattccaatccatctaaattagaagacttcttatgaaaatcttctaattttttagtttctttacaattagtacactctttcatactttaaaaccaataagggaaatggtttttcacattttcactcttttttatattgaaaaacctaaaaccagatttcgtattagagaaattagactttacccaattacttggaggagaaaaagcagggtaattgtaatattgaaaatcagtgcttgtactgtcatcaaaaagccccaaatgggaatctcctttagaaaactcaataaaattaccgtcatataaaccattctctttcaaatagtggtctatctttttagcctgcttatcatctaagtgtggacggaagccaaattttagagattctgaatctttaccatgggtttccagtattgtgtgtttacctatcttaaagtggtctataaattttttctgagttttaactgaaactttatttgaataccgttgttctaaaataccttttacagcttgagctacaaaataactgaaaacgcccgaatgattatcttccactaaaaagttatattgaatttctttatagtcatctactaaagaatctacaagttttaagctaaatgaaacacctaaatcaaaagcttctttatcgttcatattttgaggtaattcatgtccttttctagtagtttgaccacctaaaccatccatgtagtcgcctaaattgcttataatcaacaagttagatttttgataagtttttgtgtgttgaatcattaaatctaatcttctaaataactcttctttgtcccacttaccttcatacaaagggtccccattaccattaacatccatagcaatatgagtatctgtaaacactaatctatcgaaccattcgtcagaaacatgttctaatttttttacttctgattttataggggtaatatattttggtataatttcttccaggtgtttgtctacatcaatagcagcgatttcttcagaagtataaaacactacgttatagaaaggtataccagaatgactaattaatttatagcttctaattttattaacatccaaaccataatgagaacagtattgttctatgttcattagttgcccatcagctccaatagcagtaaaacctttttgtggcttttctttatcgtttgaatagttgttactatctgtaaccgtatcattctccaaatctaaatcaaccttcccactcctaagtagtctgctaagtctatttctatatttttcactgtattcaattcccaattcagcgcaatgtcttcgacacgcttctgtaatgttttgttcttgagtgtagtactctaatgctttttcaattttaaataattccatattttgtttttaagtttttagaacgcagttcctgctgcggcgatttttattgtttacaaatacccaaattccatggcagttatttctcctatatcaaataagtcaccttcaccatcctcgtcctcataaataccacctattttatcatttagactatcccatttttctgcttttattttaaatttttcggcgaattcgtgagcccatctcatagcttgttcagctgtaataagttcttgatttagtgttaccgcttctttaaaagggtctaactcctttattttacttctaaaaaattcttctgctgttatcatactattcctctaatctttttgttaatatttctatttgtcgttttaattcttctttttcagatattttatctttttcttgttgttctaattgttttgctatttcttcttctatccatttttcaattttttcggcggaaaaagataaaagacagataggcacataagaataatcttcattattccaatcctcgtatggtatcccatcttgattgtaaactacaatattttcatcttcaactctaaagctatagtagcctaaaaaagattcaaaacttgtttcgtgatattcagacctcgcacccattagatagatgtatttatcttgttcccacatttcactttgtttagatgataatttgttcattacgtgccataatttttctaaatctaatttcataacttgtgtccgaggataccctgttcgcttgaccctttagggtagggaggaatcggactattcctttttaattaaacatttttttggttctctatatattttttaactgtttcttctgatacgtgacccacagtacctgcgtaataggaacgtgtccataaacaaggtagtcttgattttaattctggaaactcttctcttaatttaaaagaagtatacccttttaattgagatacaattctatggactgaatctttaacagaggcttgtagaaaaatatgaacatggtcttccattgtttccataacttctattttataattaagttctgttgctttttcaagaattagtatttttaaaattttttgaataatatctgtcaaaacttttcttctgtattttgtacaccacactatgtgatattttaattctgattttgttggcatattaaatattttttgcaaatttataataaatatttgtttcctgcaagtatttaatgatttttatttttatcaattttgttttttaatataaaagtattatttttgcactatgaaactaatgaaaacatacaaatttaagttaaatccttctaaagcacaaaaggaaacttttgagtcgtgggttaacacttctcgttttctttataatcttgcattaaatgaacgtataatggtttatgaaatgcgtaaaaaatcagtttcaaaatatgaccaatataatcaattaccagaacttaaaaaactatacccttggataggcgaagtttattcagacactattcaagaagttttagaccgtttagataaaacatatcaaaacttttttagaggtgctgggtttccaaagttttctaaaaagggtgagtataattcttttactttcaaacgctcttttaaagttaatgaaaaaactattaagttacctaaaataggagaagtaaaatattttaattctcgtgacatagttggaaaacaaaaaactgctacaataataaaagaagataataattggtttatttgtataaccgctgaatacgaaacaccatttgaaactattgaggttgataaccaaaatccaatagcttttgatatgggtggagttaggtttttagcattatcaaataatacatttattgattctcctgaatttatgaaaccttttgaaaacgaattaagaatcttacaaagaaaattagctcgtcaaaagaaaggtagtaaatcaagggaagaaactaaacaaaaaattagaaaaatttacaaaaaaatttctaatcaacgtttagattttttacataaagtttctacaaatttatcaaacaaatattccgctttatatatggaagacttgaaattgcaaaaaatgcaacagaatggtttttctaatgtaaataaaatgatgtctgataaaagttttggtaactttaaacttcttttatcttataaattcaaagaacgtggtaagcatttaggtcttgttaatccagcatatacttctcaaacttgtaactcttgtggtactgttgataaaaaatcaagaatgtcccaatcagaatttgtttgtacaagttgtggaacagtagataacagtgacgttaacgcttctaaaaatatacttcgggagggcatctcgaagggtacaaaacgtaaggcattagtctaagcgtgtactcagaatcccatttgcttcagctatgggagttgtcaaacttttgttatatataaattatctacaaattcccctggttctagtttagcatttcgttcaattaagtcaattaacatcccttttgttactaaaacttttctttctatatcttgagcatcttcgtattcagaatctgaccaattaatgttatctagtgtgtatgttatttctatcataaatattttttcttaattacttttgcccaataatctgttgttactttaccttcagcactatggcttgtccaggtgcaagggtgtttttcttttgcttcttttaatctttcttgcggcgattttgatttatctgtgtcaaaatggtaagcgagataacactcccaataatggtcacaatcttccggtctaaaaattaaagcaagttgataaccaaataaaacaaaactccacactggattactctcaaatctatagtctgtgtttgaccatttagttttccatctcaaaccaacaaaatcaaaacctactgatttatcaacaaaataatgacatttcattttttcatcatacaattctgtaaaagatttttcttttcttttatattctggattattcttattaaagtttcttgtagatataatttcttttactgctgcatcaatagctctttgtggagtagctttaactgattttcttggatagaaataaggtgtaccaatcgcagttttacctacatataatttcggcaagaaaaatttaaaaggagaaaaataaacctttaaaaattcaaagtctcttaaaaaccaataaagtttggaatatttatattgcatacttacaaaattttattttaccatcttcttcaatgtactctctaggataccaatctttaataacttcattacaagtcttacacatccaataattatctatcatttcagtaggtctacatttaactttttgagttttctcaatgcactcctctttagctttttgtagctcttcaattagtaaatctattttaggaatcatctcatctaaaacttctaattcagaacatccataaataggttgcacatcaatttctaaatttgcatcaaatgattggaatttagattttccatcatcataaacttttatttctaccatcctgtttcttttttaaaaacgtttaacatgtcttcatctgtataatgaaaaaacttttcagcattttctggcgtatcatttttacgcatccaattgtgaaaagcaatagcaaattcgtgtgttatttgttcaagtttattagctgtttctacttttaaaccgtcaaatggctcgcatagtttttcttttaacatactttactatttaaaattttctctctttcttgaacacttaatttactaaacaaatctaaccactcttctaactgcatttcagaaacaatgtctgtttgattattttctcttttaattactgtatatccgtggtcttcaacaatttcaatgtgttcttctaaatcaactttatgactaaaatcataattaaggtcttccaatgcttcaactaaatcatattcatcacctctgtctacaagatttgcattttccattgcatagtctattacttctctactgtttaaacttcttaatagttcttcagtatcatcatcaataatatactgtatcttttctaattcttctttatcttgcgccgctaaaagttctaaaaaaccttcaacaactgcttcttcatccaaagaaagtttccattcagattggataaactctaatatattttttacttttctattttccactctaccaatcatttaaaaatttatctaattcctcttttgttacaattttagctgtaggtgttctataggcatctacaatagttacagagtacagttcaatatcattataatcgtcataacctaaattaaaataatatgctgtagcatcttgatgcttatttattttattttttatcttcatttttaaaccgtttttactattacacttacattattataacctgcgtcaaaagaaattaaagactgttgaccatactcaacaaccaatctatctattatctctttaaactctccaagtgtaccatcaaagtcacctaattcactaatatcaatttcattttttgttatcataatttttttttgcaaatttattaattcttttttaattcaccaaacttttgaacaagtttttctacaacacactgttgacagtataattttatcttacttttatagtctgttggttgtaatagttttattaaattattcattttcttttttctttaaagctgttgggaaatttaaacccttgttaaacattgtttgagccgttttaaggtaattttcaactccttttgataggtaatcattacttcttattttatcttctattaaagaccacatttcatctgtattaattccataataagcacagagtccagatgctgtgaatgaactggagacaacctggttgtgacctgaatctacaattctatctattaaatgagagattaaattaaaacattgctcaacatcttcctcactaacatcttctggaatttcaatttcaccaacaaacggaacaaaggaattttctttatatcctctaacaacacttcctacagcatcccctctaaatttagcatctgggtcgtaactattatacagaggttgagtgcatctttcattacttaaatctaaattaataaacttatctaaatcgtgagcaattccaaaccatagttgcttataatgttctatacttgtaggtgtttctccaaataaaaatacgaatttacatcctgtttttgacggcgaagaaaatgcaaaaatacaatcttttcttttctcaaatatataatccctaagctcttcgcaatggtctatgttatcatattcaaaaataccaaacggacgaaattcttttattgactcgtaatttctaatagggtcaaaaatagcagacggcgttgtaaagaacagtctctctgcttttaacctatctttctcaactttatcccctcttgcaccagcctcttgaattagtttaaaagattcaatcatctctggtttaggagaaatgatactgttaatcagttgacgcagtgttatgttccccgaaggctttattgtttttatgccgttcttataccattggaaggataaatctaaataattactcataactccctttcaattcttcagctaattcaacaatatattcatttatagtttgctcactccacgagttttgcacaagaagtcctttaaaagctgaaaaatattgctctaaagaaacatctacatttgtaaattcaactgtactgttttgccaatctgtgtttaatgctaatgttgtcatagttcaacttttattttatctgaatttttagttgttaaatgtacactactatctacagtaattttgcttctatttggatttcttttccatttttcgtggcgaattacctgctgtaaatcaaaagcaattctacaagattcgtctacattttcactatatatgccccaactaccgttttgccctattgaattatcttgatagagaatatttcttgctcggtgtaacaaatctttagctttatcttgaattaaattgatataagtaaaatctttattaaacttattgtatagataattttcaaaagtagtatgctctactattctatcaaattgtccaacacctactcttgaatataaatcaagtgcactttgtattacacttaactgttcttctgttatttctaattttgccaaaatcctaattttttacttgtactaaaaatatctaataagtcttgtctggtactttcaaagtccaattcattctctttacaatagttttttaattctttttcagccgattttttattatttttaggcggcgtaaaaatttaaaaacatattcactgttatcccaacatccatcatactctactttttcaaaaaccaaaaccggttcataattaaattctttctcatttttatacaagtcaaataaataaatatctccttctacattactaacttgtctaactgctgttgcttttaatcccatttttattaaattttatttctccatcttttaaatctatcataatcactcaaatacccagtactcctacgctcttgtccctcaattaaaggagctgtagaaccaaataaccacatttcaaaaccttcttgttcttcttgtggaagttcatcaataaatatgtatggtatttcactgccttctatataaacttgtaattctttattcttcgtatccataggttattttataaaacatttcttcatttcttaaattttgttcaactataatttcatcaatagactctacagtaaacccactggtttgacctactaaaagtttatcatcttcaaaaacttctatatcttctaatttaataataccttccattatcataatgttaatctctctcattatataatcagaattagtgtgtagctcaaatccatcttttaaattaacccataatctaatagtttctatttgatatttaggatgtaattggtcaactacacaatcttctggttctattgataatcctgtataaattttaattttcataattttaatatctttgaccacaacttttacattggtcatttatttcacatttaattaacttacaatatcctactgtttcttctccatatttttctaaatcttcttcactattcacttatttcaattttaaaacaatacctatctactctatcagatgctttctttaaagcttcttctttattttcggcgagaatagaaaaattaaaaaaatctttctcatttcctccatcatatctataccaaactgttatattatatgtcttcatattttatattttttaacaaaggtaatatattaacaaatacaagtcaagtatttaacctaatttagaatgattataaacaaacttcaaatctctttttcattttttctaaagtttcttccggaacattgtgttcattaactccaccatgtctattttctacaattagtgagaataccatatatccgtattttttagcaagttcaaaataaggttccatttcccattcttgagtaaatgtatttgatactactattttttcaaatccatcttccattctatgttcagttaatagttgacaccatttatgtgctcttttaacattttctggtttccaaaaatagttaccattttggtcaatatgatacatatctgcctccaaatgaactcctcctaacgattttgctaatgttgattttccagctcctggtgcgcctcgcaaaataaataattctttactcatgtcttccaattgttaatttattttttaatagttgttgtataagttcgtaagaaaatagactgtattctccaaacatattataataagcatcaattccaacatccatacttttatacttatgaatttcttttactaaatgcggctcatctccatggttgtgtccatgaaggaaaaaagaaccgtcctcttgaaaattccaacaaaaatgagggaaatgtgaacagcaaataatctgtttctcgatgtttaattctaaataatcgccaatatataaaagtttatcacattctgataaagcactgtgtaacttacctctattacagtggttgccaaaaagcataataacatttttacatactaaactatctaaaaactgttcatagtttttctctcccatcatagtatctcccataagtactaaaaggtcattctctcgtacaagtttattagtttcaactatgatgtggtcattcatgtgttccacgctatcaaactttcttccaaagtctataactgctttatggtctatgtgaaaatccgaagaaaaataaactttatctacatttaatgtttgttttggaaaactacttaatattttaactttcatatctaaattcttttatgttatttgtatttatcattatttgaactaattcattgtcttctgcaaatttaggatacatatctaactctcctttatttaacatgtcatttaacctgcttcttaattcttgttctttatcttgtaaatactcttttgagggtaaattaactcctgaataattcttatgaagctgttgaattttttctactgttggtaattctccatctattaattcatctgccatgtacaaacttctcaaagcatgaaatttctttttatctgaatttccgtgaagttttaaatccctttttactactccaatataagcttttataattttgtaagttcggcataaaaataaagaattttcaaaattaccacttaatattacaatgtcggctatcatattacaatctcctgaaaataaattatggtagaattgtttctctgtcatccaaacatattgggtattatcatctccatcatactgccatgaatggatattaggtaaatatctcgccaaagaagtaaaagacagatagaaatcatcagaaataacccttacatagtcaaagtcactattttcattagcaataccatgcaactggctaccaaataaatattctttgaaagatagcgtacataaatattcatgttgttcttttgttattttataattcataatcttctatattctggtttaatcaatctatatatttgctcatctattcttttaccatttcttagagaaaataataggtgtttgtatttatagtcttttataacttctgcaaaatctttatctaaatctactttacctatttccaaatacttttcccaagcttcatcttcaatttctttaaatttatatattaagtgcatttcatattctgaaatcgcatcaaaatattcatctggaacatcttttaaaatctctaaaatactatctccgttttttaagcatccccaaacagcagttgttgacatttcagacattaatttatgtaatcttaaatattcagctccttttattttacatctttctccgtttgaaaatctaactacataaccctcttcgttatcttttatatcctcatgtaagttttctaaagaagcgtcttttttatgaacctttgcgtgaggaagtaaccaacagtttattggttgctcttctcctgtttcagttttaaaaactcctgttaaaattacatcttcatagtctccataatctactacaattctgttttctttaaaaattatttcaaaacaatatgtgttatttttatctaaagatttatagtcatactttgaaagtaattcaaatccttttgcagcttgttcagaagtaaaagaacctcttgatgcaaatacccattcgccgccaaaaaagaataaaatacctaaagaaccgtcatacttagtatatatctcatagtcattagtaacaacagttttagcttcagataaattaaaaaactttttgaaaggtctagctacaacattacctaaatcatcaaccactaaacctcttgtagacaatgttacatcatcccaaagattttcccattgaactttatcagtatagttgtagattgttaaaggtaaagttggatgtacctgtgaataaagtaacccgtcttctacgtatttgtttaagatatctttcatagtttattcaattacccattttaaatggtgtattatatcattccaataatcagcttcttcttttctgttttgttgtataagaagctcctggtctcttttaattattttaatctcttcttctatttgctcttttgttttcatagtttttcgccacataaaaagttaataacactgcaaagatatagctaaatatttaattaaaaaagaaaaaggtagaaaagtttaactctctacctttatttgtattgattctaaattagtgatgatttcttcaatgggtaaatcaagagtgaaacattctgtatgtcctttaaaatatgtattagatttgtatttatattctttatatcgattatgtaattcttgctctaaagatgcgactttaaaaagagatgttgataatttgtatattacagaagctttgtattgttttcctgaatcgtaaaatataccctgtattcgttttttaatatatctggaaatacctatcttatagaaagtttcttcatctttttctaatttcataatatataaatcacaaggtatattttttgtatcttcaactgtaatataatccttaatgtttgaggttattatagaacacacaggacaacccgcagaactatctatgtgcgtattaggtctttgaaaaaatgacccatgatgtttacaaataatctctacattctttctgttattaatgtagtctacctttgaatagtcatagtaatcaccatgtattaatttggctttttctataaactgttctgtgtttgactgattccacggaatcattttagcacacttccaacatttcttaccacgtagatgtttttgagcgttttgttctagatttccatgtaatggacaaatatattttattttagaatttgtgtttttataatcagataagtcataaattaaattattgttaaattctttaaatcttttcagcatatcttcttttgatatactatagtcaacccctcttttttcgtaagaacatttttcacaatcacttcctctcatgtgagagtgtccattctgtttaaattttccgtgtgttgggcaaataatagttaaatgttcatttaattgtttataatcttctattaaagaataatcaaacttgaaattatgaatttgattacttttattaataaaatcttctttacttgttctgtttaaatctcctctaacctccaatccacatttaggacaattatcacccctgcgtatatgagcagaagggttttgttcaaatattccatgagtagaacagataattttaactttagtgttattgtttacataatcaacaatagaataatcatacctatctccatgcttttctatagctcttttaataaattcttctgttgttaatcttatgtttttagttagttttattacatcaattttataataatttaataattcccccatccttttatcaggaatattaaagtgtttacataagttggttatacagaatttgaagtttttatctttttttaattttaaaattacttcttttgggactaattttacccatttactatttttcatttttgacttataaatgcgaaaaagcctgaacaacggtgatacgagcacacattgaacagacttttccaaaaaattataaatattttaaatataaactaggctcgtatttctaatttactttgcaaagatataaaaagattttgaattatccaaatagtttaactaaattttaacttttgatggtttaatttcagcaggaactccatatttttcaatcaaccaatcttttttatagaggtcaaattgacgctgagttggaattttatccaagcaatattttttataattttcatattctttttcaagtttagctttttcacgagcttctttacgttcttgttctaatctttcttccgtgccgtctattttatgtataattttgtaacattcattaacataatagtcataattaatattatattcttcaaaaggaacttcgtaatatttattaaaaattgtcactaaagtaccaccagcctcaatttcaatagttctttcctcttttaatttacggaaagttttaccgttgttagaaatataatatctgttagttttctgttgtgtttcagtattgccttctgaatcaaccgtttcacacttccatccgtgtgtagcgttaaacgttttacaaaataaataaatatctttactttctttaattgtctgttctacgggaattcctttaagaaaataatccgcaacagctaaagaaacaatcccttgacttaaagatttatgatattctccatctttaatcatttcgtgattaggtttaaaagtacctttatatt

SEQ ID NO: 127 - DNA, 21125 bp, Daphnia sp.
  source 1..21125: mol_type = other DNA
aagctagatatgaaacatacctatcagaagatttcattaaacaattaaacagttttgaaattgatttgggagacattggtagtatctcaagaaaagatttacctaccgaagctttagatttagatgcacaatttagaagagagtcaactcaaattaagattaatgccggagataatttaacaaaattagaccaggcgagaattcaagaaattaataagagaagattatttgctaaaaacccaagaaccttggacggagagtttaaaccaggattaacagaggtttacaatgaagaaaaaggaagatacattgtagagagaacagacgagtttgataatttatcagcagaagataaagcagaggctaacgttgcctacggtttaaatatgattgatttaattaatcaagaattctataaaggacagggagataaaggaggaatcccaaataagttttttgaagctttagatgcagcagaggaccaagttgaatttctttcaaacaattcttacataggatatcctcaagatttttgggataactttaaaacaaattccgggttagtggcaagattaagagctgtaggtactgaagaggcagatagtattgcgggtagcattagaagacaacaagctattataaataatattttaaaacaaaatacagtttataatagaccttctgaaaccaatttctctgatatgaagaaacttcacatggcacaagtcaaagaagcgtcttctcttttggaaactttctatgagcaagcaaaaagaatattgccggcacaagaagtagaaaatcaaattacagcagataatacagttaatgatgcctatcaaaaagctattgaagatttagagattaaaacagctaaagaagaattagattttattttagagcacgtaacttcaaaaagtagagatagtattatcgctgctaaagaagttgctagaggagatagaaatgtcccaaaacatttagctcaatactttaaagaaggtgttagcggagaacaagcagttcttgcttatgctaaaactaaattattaccttactttaagagaacggaaccggtaggatttacaaaagcatggaatgatttcagaaacggaaacatctctgccagagagtttatagctatggaagatgtggttaatataactccaaacttctcattctatgaaaacacagataatgtaaaccctaaatggttagctaacaataaagccgggaaagaacaatttacagaggcatatttaaaaagagtgagagataatgcattctttgacaaatacaagatagtaaatggagtggcaactcaaaacgtaaaagattggcaagccagagagctgttgttacaatatcaaaaagaaatgattgagttcaatggtttaacaggagttcaagatttatatatgatgcctcaagttagaagaacaacagttgaaaaagttacctctacaacagtaaaagggttaaaagaaatagttaaagatatcactacttttagacctgaagatgtggaattaggagaaacagttgatggttctgtagcaaaaattggaagtcaattattgactataccaacttattataacagacctttagatgaccctaaagaacttactaataatgtcctgtacgcttatttactttatggtaaagcagcaagtgagcatagagcaaggagagagaacattagtgatatgttagttttatctgatactatgaaagcgtctgaatttgcagataaagaatctgatagaaccaatgcctttaagatgttacagagtcaaattgattataatttctatggggttaaagagacttttaaagcaaattatagaggagtagatttggcaaaaacagccagaggtattaactcattctttaaaagtacagcattagctggagcagttgttcctataacatcttatttgacagctaaaactcaacaatcaatagagttattagtaggtcaagttattaataaaaatgcagttgtaaatggaagaaaattattctataaacatgcaaaaggagccgcagctgaagtaggaggatttaaatctgatagcttcttcaacgttattggagaatctttaaatgtatataatgcattaaacagatatgaaaactctaaatatagtagaacaggaagaattgctttagaaggtggtggtaacttacatagtgctgctaactttggaccaattggtatggctatggcaacagttatttctgaccttagaattgtagatggtaaaattattgactacaaccaatttaagaaaggtttcgccgcaaaaggtttaaaaggaaatgtatctgaagagtgggttaaaaacgaactgttctctacatacatggaattagctgtaaaagatggagtattagattttaataacgagactttcaaaaaagcaatagaatcaaaaataaaattaccagagggacaatcttttgaagattatatgaaatacaagagagagtatttatctcaaagaattttatcaacaattcaaagaatagatagccaaataccggcacaacaaaaatctatttgggctagaaactctggagctaacttctttttaagtttcttgaacttcttacttgtacaaacatctttgaaatttaagaaaaaacagtttaacatttctgaaggagaggttcaagtgggtaattatagagagacttgggaatttttagtagataattttagagaccctaaaaatatttatgcgaactataagaaagctggtccagaaacaaaattggctttgagaagaacattaatagaacttgcagttgtaaatgcacttgctattgcggctttagctctttctaaatatgtagatgatgaggatgaagtaccatatccggttgcattaacagattatttcttacagcgtgtagctttagaaacattaggctctacatttgctttaccggcaactgtggcaggtgttgttgaaaatccactacttatctactcaaaaggtaaagactggttagcagtggagaatttatttaatggaaatgcagataaatacgctttaaaagtattaccttatgctaaagacattaaaaaaatatacgacccaacaacagcaagacaatcatacctacatttccaggaacaggatgcagcaatatccgacatatacgacagatttgcttggtttaccaacatcttacccgaagtgatgcagggagaaaaagtagaagaataaaaaaattaaagagagacctaaaaaatctctcttttttgtttgtatatctaaaaattagtcatatatttgcacaataaaaatattaaaatttacacattgagacctaaaacagaaaaatggcacaactaccaagaaggagattgtggaaaacctattgagaattattttaagaaagggttttggaaaagatatgatagaaaaaaatttttaaaaagagcattaaaagatgaaagaagataaaggaatagcacatcaaatagaatactctagaccacgtggtattacaaaaagagatattatgttagtagctgtgtacatttttggaaaaaatatacaatacacagaaaatttaataaggaacgaagaagatttagaaatagctttaaatcattacaatttaataagaaaatggaaactatgaaagaagataaaggaactccgttttacacatacaggaaggataaaggatttgtaatcaatggttatataaaagaagatgataaataacatagaaaaaattaaagaactattgaattttaccaatacaggagatttttattttctcttaattctaaagagaaaaaaagaccagccggaaggagaaagagataatcatcaatcagtaagaacaatcaaaacttattgtattgaaagtttagagcatcttgataaaagatatgatgagattatacaactctgtgaaatttttaaagcaagagcttatattcatgttcaaaaacagaatcatagtgatgtttcattggatatgttagcgttacttgcagagagaattagaaacggaaataataatcaaaaaggattatttgattcagtagtaggacagttaaaaacacatgaaaaaaggtggattgttgacattgatactgtagacgtgctttattttatgggggtaaaagatgctatacataggtgtaaaccggaaggaaataaaatagaagctgtaatacctacaaaaagcggctatcatttaataactaaaagatttgatgttatggaattcaataaatattttcctgaaatcgacattcaaaagaaaaatcctactttattatactatccaaattcacttaattatgaaaaatagagaagactctataaaagaaatgttaacagttagagcattggaaaattttaataatatgcaaatgatagaggagtttaaagaagaagggtttaggaatacatctgcttataatataggttataaaaccgccaaaaaagaaataaaagacagattaaacgcactaaaaagtcaattaaaacaagaaaaacaaccaaaactaactaagacattaaacacagaattaatcaaagagttagagattaaaatacaaatactaaaagaactgttatgagtaagttaaacgcaaacattccatatcaagaagcatgggtaagggatgcttttctctattcagattggacaaataaagaattaactaaatgttatatatttggagtaaaagcagttctaaataaacctttaatgttccattgtgaattagacaacggcgtagtatggttttcacttccaatacacgcatttgtacataaagaagattttgaaaaaccttgcgaaaacgaagaagaattactttctttacttcagtactgggatatgcagagttcggatatagctgttacaacttttagttatttacaaggacataaagtagactgttttaatagaaataaaaagtttatgagaggtcaatatctatttactattgacgactattatgcagataataactcacttcctttaggttacgcaaatgacccagataaaaagtgtttccatattataaaattagagaatggatttttctgtgcttatccaaacaattacttacgtttttataatctaaatcattgtgaaccttataatactccgccaaaatataaaagaaacagttggaactggagttgtgaatatataaaacctaaagaagattaaatgaaaaattattaaaattatgacaaaatgtcaacggcacaataattgaaaagaagaataccaaaaccaaaagaaaaccctcaagacattaatttgctttgagggttattttttaccatttaaataagatagcacaatatcttttagttcttttcggcacgctaaaaaataaaagaagaactgaactttccttaataaaatccaatcttggagagaataacttctcaatcaacagtagtattaaaagtaatagtatcataattctttaatttcgttatcattatttaatacaatccaatagtcatctgctcctgtatcagtttctacaagagcaagagaaaactcctcacctctaaaaaagtttagtaaatcagattgatattgatttccactatcctctaatatatcatcttctttatcagcccatataatatcatttatactgatactccagaaagaatctttagtgcttgtatctatcaagtactcttcaatatctgaatcgtagcttacatgttctgcaattttagcataaacattttctaattcttctattaatttcataatctaattttataaattcttttacactcgtttaaataattcttcaaattttcacaacactctctaaaatctatatcttcttctaaagaaaatcttttattttcagtttctcgccgaaaaagattaaaaagagaactgtcaatatcctgcaaaatagataaataaattaattctttatctctactctctttaagttgaaacctaagctcaactacttcatcttcacaattcatttttcgccgtttttatattaatatttatttttctaattgtgtatcaatccaagcattccaatagtcccaatcatctccatagactttttcaattattctattatatacttctatctcctcttctatagggttagcaataactttaccactaataaaaaaaggtataggaggtattacaagataatgaaattccgtaagataccctttatctgaaaacttttttaatagttttttccacttatccatattaatatttttccattactactattccgtttatatcatattgtctgcctgctaaagattgagattttaaaatccagccttgagtcatcatttcttttatatattcttcttgacttgttgcacttttaaaatgtttaacgataaaaaattttggagttgctggttttaccgtcattattgatgctgttcctgccgccgttaaaagtataaaacaacagcctaaaataaaatttctcataattatttgtttaaagttaattcttctcccactaaagtaaaatacaaattctgaatctgatgaacatattctactttactattaaaactaaaccatttattctctttattatctctcaaaaataaattcgttttaaatcttctatccaagaaaatagcaatatctccttttaccatagagttgtctaattctttctcaaacccaaaatcctttaaccactgttctgttagtggaattggtttaaaatgcattattttagtatcaataataccttcagacttaatccaatacatttcttttcttttaggtaagttgaagataccttctacttttctaacctctcctaataattctaagtaatttccaatcctaagttcctgtgcttgtatcataattttctttttaatttattttctcccgcaaagataaaactaaaaaacggaataaaaaagaaaaagctccgaaaaattaacttcagagctttatttagaattagtttagattaacgactatgattagctatagaacaattttcagagaacgtaatccatcttatattatttatagtgtaccctttagatgtatctttcctatctatagaaggagatacttttaattcatagtcactatcaacccagttattaaataatttaatatactcttcattatttaaagaccatttataaaaatcttctttactcaatatttctaacccctcatataaatgagatttattttttaggactccttttactcttgacaacatatttctataagttcttacaagtttaccctttaaagttctttcatatacttttgtaactatgttattgttagaatttcttctatctcttgattttttatttgcgcaaactttacaattatattccaatccatctaaattagaagacttcttatgaaaatcttctaattttttagtttctttacaattagtacactctttcatactttaaaaccaataagggaaatggtttttcacattttcactcttttttatattgaaaaacctaaaaccagatttcgtattagagaaattagactttacccaattacttggaggagaaaaagcagggtaattgtaatattgaaaatcagtgcttgtactgtcatcaaaaagccccaaatgggaatctcctttagaaaactcaataaaattaccgtcatataaaccattctctttcaaatagtggtctatctttttagcctgcttatcatctaagtgtggacggaagccaaattttagagattctgaatctttaccatgggtttccagtattgtgtgtttacctatcttaaagtggtctataaattttttctgagttttaactgaaactttatttgaataccgttgttctaaaataccttttacagcttgagctacaaaataactgaaaacgcccgaatgattatcttccactaaaaagttatattgaatttctttatagtcatctactaaagaatctacaagttttaagctaaatgaaacacctaaatcaaaagcttctttatcgttcatattttgaggtaattcatgtccttttctagtagtttgaccacctaaaccatccatgtagtcgcctaaattgcttataatcaacaagttagatttttgataagtttttgtgtgttgaatcattaaatctaatcttctaaataactcttctttgtcccacttaccttcatacaaagggtccccattaccattaacatccatagcaatatgagtatctgtaaacactaatctatcgaaccattcgtcagaaacatgttctaatttttttacttctgattttataggggtaatatattttggtataatttcttccaggtgtttgtctacatcaatagcagcgatttcttcagaagtataaaacactacgttatagaaaggtataccagaatgactaattaatttatagcttctaattttattaacatccaaaccataatgagaacagtattgttctatgttcattagttgcccatcagctccaatagcagtaaaacctttttgtggcttttctttatcgtttgaatagttgttactatctgtaaccgtatcattctccaaatctaaatcaaccttcccactcctaagtagtctgctaagtctatttctatatttttcactgtattcaattcccaattcagcgcaatgtcttcgacacgcttctgtaatgttttgttcttgagtgtagtactctaatgctttttcaattttaaataattccatattttgtttttaagtttttagaacgcagttcctgctgcggcgatttttattgtttacaaatacccaaattccatggcagttatttctcctatatcaaataagtcaccttcaccatcctcgtcctcataaataccacctattttatcatttagactatcccatttttctgcttttattttaaatttttcggcgaattcgtgagcccatctcatagcttgttcagctgtaataagttcttgatttagtgttaccgcttctttaaaagggtctaactcctttattttacttctaaaaaattcttctgctgttatcatactattcctctaatctttttgttaatatttctatttgtcgttttaattcttctttttcagatattttatctttttcttgttgttctaattgttttgctatttcttcttctatccatttttcaattttttcggcggaaaaagataaaagacagataggcacataagaataatcttcattattccaatcctcgtatggtatcccatcttgattgtaaactacaatattttcatcttcaactctaaagctatagtagcctaaaaaagattcaaaacttgtttcgtgatattcagacctcgcacccattagatagatgtatttatcttgttcccacatttcactttgtttagatgataatttgttcattacgtgccataatttttctaaatctaatttcataacttgtgtccgaggataccctgttcgcttgaccctttagggtagggaggaatcggactattcctttttaattaaacatttttttggttctctatatattttttaactgtttcttctgatacgtgacccacagtacctgcgtaataggaacgtgtccataaacaaggtagtcttgattttaattctggaaactcttctcttaatttaaaagaagtatacccttttaattgagatacaattctatggactgaatctttaacagaggcttgtagaaaaatatgaacatggtcttccattgtttccataacttctattttataattaagttctgttgctttttcaagaattagtatttttaaaattttttgaataatatctgtcaaaacttttcttctgtattttgtacaccacactatgtgatattttaattctgattttgttggcatattaaatattttttgcaaatttataataaatatttgtttcctgcaagtatttaatgatttttatttttatcaattttgttttttaatataaaagtattatttttgcactatgaaactaatgaaaacatacaaatttaagttaaatccttctaaagcacaaaaggaaacttttgagtcgtgggttaacacttctcgttttctttataatcttgcattaaatgaacgtataatggtttatgaaatgcgtaaaaaatcagtttcaaaatatgaccaatataatcaattaccagaacttaaaaaactatacccttggataggcgaagtttattcagacactattcaagaagttttagaccgtttagataaaacatatcaaaacttttttagaggtgctgggtttccaaagttttctaaaaagggtgagtataattcttttactttcaaacgctcttttaaagttaatgaaaaaactattaagttacctaaaataggagaagtaaaatattttaattctcgtgacatagttggaaaacaaaaaactgctacaataataaaagaagataataattggtttatttgtataaccgctgaatacgaaacaccatttgaaactattgaggttgataaccaaaatccaatagcttttgatatgggtggagttaggtttttagcattatcaaataatacatttattgattctcctgaatttatgaaaccttttgaaaacgaattaagaatcttacaaagaaaattagctcgtcaaaagaaaggtagtaaatcaagggaagaaactaaacaaaaaattagaaaaatttacaaaaaaatttctaatcaacgtttagattttttacataaagtttctacaaatttatcaaacaaatattccgctttatatatggaagacttgaaattgcaaaaaatgcaacagaatggtttttctaatgtaaataaaatgatgtctgataaaagttttggtaactttaaacttcttttatcttataaattcaaagaacgtggtaagcatttaggtcttgttaatccagcatatacttctcaaacttgtaactcttgtggtactgttgataaaaaatcaagaatgtcccaatcagaatttgtttgtacaagttgtggaacagtagataacagtgacgttaacgcttctaaaaatatacttcgggagggcatctcgaagggtacaaaacgtaaggcattagtctaagcgtgtactcagaatcccatttgcttcagctatgggagttgtcaaacttttgttatatataaattatctacaaattcccctggttctagtttagcatttcgttcaattaagtcaattaacatcccttttgttactaaaacttttctttctatatcttgagcatcttcgtattcagaatctgaccaattaatgttatctagtgtgtatgttatttctatcataaatattttttcttaattacttttgcccaataatctgttgttactttaccttcagcactatggcttgtccaggtgcaagggtgtttttcttttgcttcttttaatctttcttgcggcgattttgatttatctgtgtcaaaatggtaagcgagataacactcccaataatggtcacaatcttccggtctaaaaattaaagcaagttgataaccaaataaaacaaaactccacactggattactctcaaatctatagtctgtgtttgaccatttagttttccatctcaaaccaacaaaatcaaaacctactgatttatcaacaaaataatgacatttcattttttcatcatacaattctgtaaaagatttttcttttcttttatattctggattattcttattaaagtttcttgtagatataatttcttttactgctgcatcaatagctctttgtggagtagctttaactgattttcttggatagaaataaggtgtaccaatcgcagttttacctacatataatttcggcaagaaaaatttaaaaggagaaaaataaacctttaaaaattcaaagtctcttaaaaaccaataaagtttggaatatttatattgcatacttacaaaattttattttaccatcttcttcaatgtactctctaggataccaatctttaataacttcattacaagtcttacacatccaataattatctatcatttcagtaggtctacatttaactttttgagttttctcaatgcactcctctttagctttttgtagctcttcaattagtaaatctattttaggaatcatctcatctaaaacttctaattcagaacatccataaataggttgcacatcaatttctaaatttgcatcaaatgattggaatttagattttccatcatcataaacttttatttctaccatcctgtttcttttttaaaaacgtttaacatgtcttcatctgtataatgaaaaaacttttcagcattttctggcgtatcatttttacgcatccaattgtgaaaagcaatagcaaattcgtgtgttatttgttcaagtttattagctgtttctacttttaaaccgtcaaatggctcgcatagtttttcttttaacatactttactatttaaaattttctctctttcttgaacacttaatttactaaacaaatctaaccactcttctaactgcatttcagaaacaatgtctgtttgattattttctcttttaattactgtatatccgtggtcttcaacaatttcaatgtgttcttctaaatcaactttatgactaaaatcataattaaggtcttccaatgcttcaactaaatcatattcatcacctctgtctacaagatttgcattttccattgcatagtctattacttctctactgtttaaacttcttaatagttcttcagtatcatcatcaataatatactgtatcttttctaattcttctttatcttgcgccgctaaaagttctaaaaaaccttcaacaactgcttcttcatccaaagaaagtttccattcagattggataaactctaatatattttttacttttctattttccactctaccaatcatttaaaaatttatctaattcctcttttgttacaattttagctgtaggtgttctataggcatctacaatagttacagagtacagttcaatatcattataatcgtcataacctaaattaaaataatatgctgtagcatcttgatgcttatttattttattttttatcttcatttttaaaccgtttttactattacacttacattattataacctgcgtcaaaagaaattaaagactgttgaccatactcaacaaccaatctatctattatctctttaaactctccaagtgtaccatcaaagtcacctaattcactaatatcaatttcattttttgttatcataatttttttttgcaaatttattaattcttttttaattcaccaaacttttgaacaagtttttctacaacacactgttgacagtataattttatcttacttttatagtctgttggttgtaatagttttattaaattattcattttcttttttctttaaagctgttgggaaatttaaacccttgttaaacattgtttgagccgttttaaggtaattttcaactccttttgataggtaatcattacttcttattttatcttctattaaagaccacatttcatctgtattaattccataataagcacagagtccagatgctgtgaatgaactggagacaacctggttgtgacctgaatctacaattctatctattaaatgagagattaaattaaaacattgctcaacatcttcctcactaacatcttctggaatttcaatttcaccaacaaacggaacaaaggaattttctttatatcctctaacaacacttcctacagcatcccctctaaatttagcatctgggtcgtaactattatacagaggttgagtgcatctttcattacttaaatctaaattaataaacttatctaaatcgtgagcaattccaaaccatagttgcttataatgttctatacttgtaggtgtttctccaaataaaaatacgaatttacatcctgtttttgacggcgaagaaaatgcaaaaatacaatcttttcttttctcaaatatataatccctaagctcttcgcaatggtctatgttatcatattcaaaaataccaaacggacgaaattcttttattgactcgtaatttctaatagggtcaaaaatagcagacggcgttgtaaagaacagtctctctgcttttaacctatctttctcaactttatcccctcttgcaccagcctcttgaattagtttaaaagattcaatcatctctggtttaggagaaatgatactgttaatcagttgacgcagtgttatgttccccgaaggctttattgtttttatgccgttcttataccattggaaggataaatctaaataattactcataactccctttcaattcttcagctaattcaacaatatattcatttatagtttgctcactccacgagttttgcacaagaagtcctttaaaagctgaaaaatattgctctaaagaaacatctacatttgtaaattcaactgtactgttttgccaatctgtgtttaatgctaatgttgtcatagttcaacttttattttatctgaatttttagttgttaaatgtacactactatctacagtaattttgcttctatttggatttcttttccatttttcgtggcgaattacctgctgtaaatcaaaagcaattctacaagattcgtctacattttcactatatatgccccaactaccgttttgccctattgaattatcttgatagagaatatttcttgctcggtgtaacaaatctttagctttatcttgaattaaattgatataagtaaaatctttattaaacttattgtatagataattttcaaaagtagtatgctctactattctatcaaattgtccaacacctactcttgaatataaatcaagtgcactttgtattacacttaactgttcttctgttatttctaattttgccaaaatcctaattttttacttgtactaaaaatatctaataagtcttgtctggtactttcaaagtccaattcattctctttacaatagttttttaattctttttcagccgattttttattatttttaggcggcgtaaaaatttaaaaacatattcactgttatcccaacatccatcatactctactttttcaaaaaccaaaaccggttcataattaaattctttctcatttttatacaagtcaaataaataaatatctccttctacattactaacttgtctaactgctgttgcttttaatcccatttttattaaattttatttctccatcttttaaatctatcataatcactcaaatacccagtactcctacgctcttgtccctcaattaaaggagctgtagaaccaaataaccacatttcaaaaccttcttgttcttcttgtggaagttcatcaataaatatgtatggtatttcactgccttctatataaacttgtaattctttattcttcgtatccataggttattttataaaacatttcttcatttcttaaattttgttcaactataatttcatcaatagactctacagtaaacccactggtttgacctactaaaagtttatcatcttcaaaaacttctatatcttctaatttaataataccttccattatcataatgttaatctctctcattatataatcagaattagtgtgtagctcaaatccatcttttaaattaacccataatctaatagtttctatttgatatttaggatgtaattggtcaactacacaatcttctggttctattgataatcctgtataaattttaattttcataattttaatatctttgaccacaacttttacattggtcatttatttcacatttaattaacttacaatatcctactgtttcttctccatatttttctaaatcttcttcactattcacttatttcaattttaaaacaatacctatctactctatcagatgctttctttaaagcttcttctttattttcggcgagaatagaaaaattaaaaaaatctttctcatttcctccatcatatctataccaaactgttatattatatgtcttcatattttatattttttaacaaaggtaatatattaacaaatacaagtcaagtatttaacctaatttagaatgattataaacaaacttcaaatctctttttcattttttctaaagtttcttccggaacattgtgttcattaactccaccatgtctattttctacaattagtgagaataccatatatccgtattttttagcaagttcaaaataaggttccatttcccattcttgagtaaatgtatttgatactactattttttcaaatccatcttccattctatgttcagttaatagttgacaccatttatgtgctcttttaacattttctggtttccaaaaatagttaccattttggtcaatatgatacatatctgcctccaaatgaactcctcctaacgattttgctaatgttgattttccagctcctggtgcgcctcgcaaaataaataattctttactcatgtcttccaattgttaatttattttttaatagttgttgtataagttcgtaagaaaatagactgtattctccaaacatattataataagcatcaattccaacatccatacttttatacttatgaatttcttttactaaatgcggctcatctccatggttgtgtccatgaaggaaaaaagaaccgtcctcttgaaaattccaacaaaaatgagggaaatgtgaacagcaaataatctgtttctcgatgtttaattctaaataatcgccaatatataaaagtttatcacattctgataaagcactgtgtaacttacctctattacagtggttgccaaaaagcataataacatttttacatactaaactatctaaaaactgttcatagtttttctctcccatcatagtatctcccataagtactaaaaggtcattctctcgtacaagtttattagtttcaactatgatgtggtcattcatgtgttccacgctatcaaactttcttccaaagtctataactgctttatggtctatgtgaaaatccgaagaaaaataaactttatctacatttaatgtttgttttggaaaactacttaatattttaactttcatatctaaattcttttatgttatttgtatttatcattatttgaactaattcattgtcttctgcaaatttaggatacatatctaactctcctttatttaacatgtcatttaacctgcttcttaattcttgttctttatcttgtaaatactcttttgagggtaaattaactcctgaataattcttatgaagctgttgaattttttctactgttggtaattctccatctattaattcatctgccatgtacaaacttctcaaagcatgaaatttctttttatctgaatttccgtgaagttttaaatccctttttactactccaatataagcttttataattttgtaagttcggcataaaaataaagaattttcaaaattaccacttaatattacaatgtcggctatcatattacaatctcctgaaaataaattatggtagaattgtttctctgtcatccaaacatattgggtattatcatctccatcatactgccatgaatggatattaggtaaatatctcgccaaagaagtaaaagacagatagaaatcatcagaaataacccttacatagtcaaagtcactattttcattagcaataccatgcaactggctaccaaataaatattctttgaaagatagcgtacataaatattcatgttgttcttttgttattttataattcataatcttctatattctggtttaatcaatctatatatttgctcatctattcttttaccatttcttagagaaaataataggtgtttgtatttatagtcttttataacttctgcaaaatctttatctaaatctactttacctatttccaaatacttttcccaagcttcatcttcaatttctttaaatttatatattaagtgcatttcatattctgaaatcgcatcaaaatattcatctggaacatcttttaaaatctctaaaatactatctccgttttttaagcatccccaaacagcagttgttgacatttcagacattaatttatgtaatcttaaatattcagctccttttattttacatctttctccgtttgaaaatctaactacataaccctcttcgttatcttttatatcctcatgtaagttttctaaagaagcgtcttttttatgaacctttgcgtgaggaagtaaccaacagtttattggttgctcttctcctgtttcagttttaaaaactcctgttaaaattacatcttcatagtctccataatctactacaattctgttttctttaaaaattatttcaaaacaatatgtgttatttttatctaaagatttatagtcatactttgaaagtaattcaaatccttttgcagcttgttcagaagtaaaagaacctcttgatgcaaatacccattcgccgccaaaaaagaataaaatacctaaagaaccgtcatacttagtatatatctcatagtcattagtaacaacagttttagcttcagataaattaaaaaactttttgaaaggtctagctacaacattacctaaatcatcaaccactaaacctcttgtagacaatgttacatcatcccaaagattttcccattgaactttatcagtatagttgtagattgttaaaggtaaagttggatgtacctgtgaataaagtaacccgtcttctacgtatttgtttaagatatctttcatagtttattcaattacccattttaaatggtgtattatatcattccaataatcagcttcttcttttctgttttgttgtataagaagctcctggtctcttttaattattttaatctcttcttctatttgctcttttgttttcatagtttttcgccacataaaaagttaataacactgcaaagatatagctaaatatttaattaaaaaagaaaaaggtagaaaagtttaactctctacctttatttgtattgattctaaattagtgatgatttcttcaatgggtaaatcaagagtgaaacattctgtatgtcctttaaaatatgtattagatttgtatttatattctttatatcgattatgtaattcttgctctaaagatgcgactttaaaaagagatgttgataatttgtatattacagaagctttgtattgttttcctgaatcgtaaaatataccctgtattcgttttttaatatatctggaaatacctatcttatagaaagtttcttcatctttttctaatttcataatatataaatcacaaggtatattttttgtatcttcaactgtaatataatccttaatgtttgaggttattatagaacacacaggacaacccgcagaactatctatgtgcgtattaggtctttgaaaaaatgacccatgatgtttacaaataatctctacattctttctgttattaatgtagtctacctttgaatagtcatagtaatcaccatgtattaatttggctttttctataaactgttctgtgtttgactgattccacggaatcattttagcacacttccaacatttcttaccacgtagatgtttttgagcgttttgttctagatttccatgtaatggacaaatatattttattttagaatttgtgtttttataatcagataagtcataaattaaattattgttaaattctttaaatcttttcagcatatcttcttttgatatactatagtcaacccctcttttttcgtaagaacatttttcacaatcacttcctctcatgtgagagtgtccattctgtttaaattttccgtgtgttgggcaaataatagttaaatgttcatttaattgtttataatcttctattaaagaataatcaaacttgaaattatgaatttgattacttttattaataaaatcttctttacttgttctgtttaaatctcctctaacctccaatccacatttaggacaattatcacccctgcgtatatgagcagaagggttttgttcaaatattccatgagtagaacagataattttaactttagtgttattgtttacataatcaacaatagaataatcatacctatctccatgcttttctatagctcttttaataaattcttctgttgttaatcttatgtttttagttagttttattacatcaattttataataatttaataattcccccatccttttatcaggaatattaaagtgtttacataagttggttatacagaatttgaagtttttatctttttttaattttaaaattacttcttttgggactaattttacccatttactatttttcatttttgacttataaatgcgaaaaagcctgaacaacggtgatacgagcacacattgaacagacttttccaaaaaattataaatattttaaatataaactaggctcgtatttctaatttactttgcaaagatataaaaagattttgaattatccaaatagtttaactaaattttaacttttgatggtttaatttcagcaggaactccatatttttcaatcaaccaatcttttttatagaggtcaaattgacgctgagttggaattttatccaagcaatattttttataattttcatattctttttcaagtttagctttttcacgagcttctttacgttcttgttctaatctttcttccgtgccgtctattttatgtataattttgtaacattcattaacataatagtcataattaatattatattcttcaaaaggaacttcgtaatatttattaaaaattgtcactaaagtaccaccagcctcaatttcaatagttctttcctcttttaatttacggaaagttttaccgttgttagaaatataatatctgttagttttctgttgtgtttcagtattgccttctgaatcaaccgtttcacacttccatccgtgtgtagcgttaaacgttttacaaaataaataaatatctttactttctttaattgtctgttctacgggaattcctttaagaaaataatccgcaacagctaaagaaacaatcccttgacttaaagatttatgatattctccatctttaatcatttcgtgattaggtttaaaagtacctttatatt

SEQ ID NO: 128 - DNA, 22001 bp, unidentified
  misc_feature 1..22001: note = Fanzor polypeptide
  variation 2646..2701: note = n is any nucleotide
  source 1..22001: mol_type = other DNA
cccctctccctcccttgtacgcgaatcgtgcgcgtgattgtgtggcacacagacgctcgcagctgggcggaagccaagatgctccggcgacgtcgtcatcgaggtgcgctctcaccaccaaccacaaaccacgaatccaggatcggcgcgggagggggcaggcgagggctggagggggcgggcgccgagcatggtggttccccgaagctcatccaattcgtaaccccgcccaatctatggtgtgtgtgctctacagcagcggcggaccggtcgccgcggtcgccaaggccgagacctcgcggaggaagaccatcgccggagcctcctcctatttccgcggtaccgcacctcacctcttcctcgttcacgttgtgacacacgcacacgcaccaccgcacacgcacacgcaccaccgcacacgcacacgcatgaccaacgactaacgacaattggctgcgacgcgaagtcaactcggagagcgacatgaaggtgctgctcaagatcacgcaggagaagttcaagaacgaggtcctcaccaacaagcacctcaaaacccacggcgacatcgtactcaagaacccctacaagcaaggtaaacaacatgtttatatttcggatatattatacatatgtttctatagatgtatgtttatatgtatgcacatgtttatatatatacactcatagtaatgtcgtgtgtgtgttgtgttgtgttgtgttgtgttgtgttgtgttgtgttgtgttgtgtgaattgtgtaacgtgtgtgcgtgcacggcagtgccggcgccatcgcctccgcgaccattgcccaaggacaccggcacggagaacatgaccctgggtatatatctctccgaacgcgacacgacacacgacacacgacacacgacacattcaccgaagtgctgtgaacaaccaaaccaaccataacgttgcgttggtcgtcgcagacgagatcatcaacgacagcaacccgtacgagatcttcgcaaatgtacagcacatcggtggcgggtacgttgcaaaaataactaaaacatatctcatataagatatcgaatatctaattagatagtatattgtagatagtagatatcaaaatgttatctgatatctaaatacgacacacacacacacaccacacacacacacacacacgatgtggggtcggttgggcgagagagcagagggttctcgcaggtctactgcgcggtgatgaaggagagcgggcagaaggtggcgatcaagaagatgtcgctggacgagtggtacgagcaggatctgctggtggagatcgtcatgatgaaggtcagcaaacaccacaacatcgtctcctacatcgacacctaccgcgacgaccgcaactacctctgggtccgcctcccccccatctccctgtcgtgtgtgtcgtgtgtgtcgtgtgtgtcgtgtgtgtcgtgtgtgtcgtgtgtgtcgtgtgtcgttgtgtcgttgtgtgtgttgctgatcgtgtgcgtgtgcggtggtgcgttgtggcaggtggtgatggagttcatggaggaggggagcttggagaaggtgatcgacgcgttcccgcgcatcaagatgaccgaaaagcagatcgcctacgtctgcttcgaggcacgcccccgcccgcccccgcccccagctctctcgttcgctaacgcgtgtcgttggtcgtgtcgttggtcgtgtcgttggtcgtgtcgttggtcgtgtcgttggtcgtgtcgttggtcgtgtcgttggtcgtgtcgtgtcgtgtcgtgtcgtgggaaacaccagatattgaaggcgctcgagtacatccacgggctgcaccgcattcaccgggacatcaaggtgcgtaggggtcatcgaccactcccccctgcaagaactgtctgctgacctgggtcgacacacacacacacacacacacacacacacacacacacacacacacacacacacacacacacacatttattgtcatgaacgaacgacatcacgatcgtgggtcagtccgggaacgtgctcatcgggtccaagggcgagatcaagctcggtgccgccccgccgctctctcttctttctttgccgccgccttcccccgaaagctaatttgatccattcgcgcgtgtgtgcgtgtgtgcgtgtgcgtgtgcgtgcgtgtgtgcgtgtgcgtgtgtgcgtgtgcgtgtgcgcgtgtgtatgcgtgtcgtggtgtcggccattcaacgggagcagcggatttcgggttcgccgtgcagctgacggaggggaagcggaagcggaacagttccgtgggcaccgtctactgggtacgccctccccccccagtcctcacgatacacacgacacacacgacacgcgggccggctaacgcgttctgctgctgctgctgctgctcccactcgacgtcgaccaatcaatcgcgcaatgcaggaggcgcccgaagtgatcagcggagacaactacgacacgaaagtggtgcgcgcgccctcactcggccacacacacacacacacacgtgctccaggtactccaccacgcacacgcacacgcacacgcacacgcgcacgcacacgcaaccaacgacacgacacactgtacagttcatctatcagggccacgtcacaattgccgaggacaacgtaatccnnnnnnnnnnnnnnnnnnnnnnnnnnnnnnnnnnnnnnnnnnnnnnnnnnnnnnnntatgttgtgtgtaaacgtgttctctctctctcgttgttgcacaacaggatatctggtcgctgggcatattggcgcgtgagatggccgagggcgatgccccgtattttgagctgccccaaatggccgtacgttcccccgtccacccacacgacacagacgaccaacgacacgacacacacgacacacacgacacacacgacacacgaccaacgactcgacacacacgacacgacacgacacgcttctatcgctcacgacacgaccaacgacgcgtgtggtggcgcaggcgctacaacggatcttcagcgagggcattccgccgctgaaggaccccgatcgctggtcggccgccttccagcacttccaggagctgtgcttctaccgcgagcccgagaagaggccctcggccaacgagctcctccgcgtacgttttcttcgcccccttccgcccccttccccttttgcgtcgtgtgtcgtgttgtgtgctgtcgactgactggcgtgcccgacgcgacaatacacacacacacacacacacgcacacacacacacacacacacacgcacacacacacacacacacacacacacacacacacacacacacacacacacaacacagcatccgctgttctacaacctggcgccggagtcgctcgaggtggtggacctgatgcgacgcgccaagcagctggagcccggccgcaagggctcctccgccaggaggcgaagccaaaagcacggcagcgcccgcgactcaagctgagccccagcagccgccgccgcaccagccgctcccgacacggtcgcgctgtgtcgcacaacaagaatataataatttagtaaaaacgatttactatttctgtcagcagtcccgcatccagcacttcgaaactgtttgccaaattcagctttcaaacccaaacccaaaccgaaataataaggaagggcgagggtaactggttgacgccgcgtcgggccagccaccaatggcggttctcgtgcgggccgccgtcggggatgcaggccaatagggcgtcgaggccgaccgggtttcggccgaaatactcctcctccctctcgaccgccgccacgcgcgcattccagccgagcgtcgtcgtcgtcgtcgtggtttttgtcgtcgcctgttgtggtggagtcgccgacgtcgtggaattgaggcattggtgcagctgggtgaggaattcgaagtaggccatgtggtccaggtgctgcaggtgggcgctcatgaaagcgcgcctcagctcccggtggtcgaggcggaaggacttgtccagcactgttatgttctgtttctccaccgccagaaactgatcaccacacacatcgtcgtttctgccatgtgtgtcgtgtgccgtgtgtcgtgccgtgtgtgtcgtgtgtcgtgtgtcgtgtgtcgtgtgagcggtacctggtgcatcatgaagtagacgtaggccatggggtacggcatgtcgtcgttggtgcggaagctgtgggaggaggtgcgttggaattcctccggccagcgggcctcgaggtcgcgcgcgatgcgcctgtcgatcgtgtgcggtacatgcgatacaacctgaccacatatatgcacatttggaccttgtatggaatatatatataaatatataacaatatattcatattgataatatgtttacaaaatgaaaaggaaggaaaaaacatgccttgcgagccaggttcccgaatgtacggtcgtacaaccgatccaccgtggccagcctctcggaccagtggttccaggagttctctatagcccacgcgtccaagtacacctgggaagagagacgggttacatcaatatatctgtatagatatgtgtgtgaatatatttatggggtgccatttggccattgacgggcgagtaaaagtcgtcgagggtgacgggcgagctgaggaagacgtcgtcgttgaagtagacgaacctggccgacaggccgcgaatgcggtgaaggtggcattcgatggcgctcgaggaaaacgtgggcaggtgcgacttgttggcgaatatctcctcgtgcctcaccactctggttgtgtggcacaaccacaaccacaaccccacaacatcaacatcaacaacaacaacatcaccaaccacattggcgtcttcacaggcatatatctaactaaactaataaacaactcataactaataaccaaaaactaatgaaatatacaaaactaaacagatgatggggcgagcgaagacttgcctgatgcgagggtgggcgaggttgagccagtaggggatctggccgttggtcacgatgaagatgttgcgcacccacggcgcgtgcttctccaccgatcgcagcgaataccgcaactcctgcgctcgccacgcccacacacatgcatgcatgcatgcacgtgggacaccatcagccacgcgtggctgctcctctgtctctcatcggcatcgtacctccatgtcaaagacgcggttgagaccgttggggtccattggctggtccgcagccgccggctgctccattccgcctatccacgacacacgacacgcacaacacaccacacgcacaacacaccacacgcacgacacacacgacacaaaggtgtcaggcgggaaaacgggatgcgtgaggattgtgcggcacacgacgcaccgtgggcggcgtcgaagagggcgcgtgcggccagcatggcctcgcggaagagcggatcggagccgttgacccaggagtagaccaggtccaccgccgcctcgtcctcaacagaggagctctcaacagcatcattggggggttgctcaggggctgctgctgctgctgctgctgcagatgcaagtgacaacggcggcggtggtgatggtggcggcggtggtggtaatgatggtggctcgtggtggagctcggccagaagtagcacctggggcgaagaagaggtggtggtgacccattgaagcagaaggggaaggtgcagcgccaggaacaggagcgcgaccacacagcagggcgagcgccaagaaacaagaaatgccattatagtgtcgatttcatcatcaccatcgacgccttgctgctgcttccagtgtgcggactttcacctgaccatatttggcaagaagtgcaagaaaatccccaaaaaaaaaagccggcattgtgtcttgtggccgggtcgacgctggtgaggcggatgtaggaggagaagacgatggcggccgagaggcccacgacgatgttgcccgcgcactgggtggaggccttggtctgcgaggtgcgcagggagaccacctcgacatcgggcgcgccgttggtgaaggtcgagcccggcgcgatggccacgggcagggcgaagggcggggcgtgggcgacaccgagggcgacggcctcaatgtctgcgcggtgctgctggtcgccctgggcgacgaccagatggtgggactgatcgagatccacgccgtcggcgaccttgagctggacacgatctgcgctcgtgacaccgaggtggccgccgggggcgtgagcgacaccgacgcagaggccgaaggtgtgagcgacacagaggcggtgagtgaaggcgtgagcgacaccaatgcggaggccgatgtcgtgagcgacgccgggagacgccgagcagagaccgaaggagaccgacgcttaggggctgaccgacggcgtgagcgacacagagaccgactgcgtgagcgacatcggggcagaggcggatgaggaaggcgattgtgtgggcgacggggaggccgagctcgacagagaggccgttggcgaggccgtgctgctcggcgatggcgacggcgactgcgacgggctcgaagatggcgacggcgaccgcgccggagtgatggaggcctgtgagcccgagggcgagggcgtggcagacctggtggacgttatggaggatgtcaccgatgcgctgggcgttctggagggcgacggcgtcatggagggaggccgacagaaggcgacccgcactgaatacatattttcgtgatttagtttaaacaacagaaacaatgcaaacaatgtaaacaatgtgtaccgggaacgaaattaattaatttatagtcaatttatttttaactgtacaagttgcgaaccaccgccaaaacaaacactgccgcctacgacgaagaagaagacgacgacgaagaggtggaggtggtggcgatggagggaacgatgaggcaggcggccgttgtgtggtccatcttgcccgggaactggcggtagtccgtcggctggcgcgcctgcgggctgtgctccatgaactcgcggcacacgcgcgtcgtcgcgtagcagtggtccaccagccgcgtcgtgatcgcgcgcggcgtgagcggcccggcctcgagcagctgctgcagcgccgccgccctgaaccggtccttcgccacctccacctccaccgactcaccaccgccgagcgccgcctgcgcgtccgactcccacgcgtcgtctttgagctcgagcccgacctcgctcggcaggcggcccagcatctgcgggtcaaagttgtcgtggacgccgtccgagacgagcagcagcacgtcgcccggctcgcagggcatgaagtagagcttcaggttgcgcaggtcgggcgcgccgccctcgagatagggacccagccggccgcccgggtcgcgcacgtcggtcacgttcatccggttgcccgccgtaatgtccgtcacctcgccaccgccgcccttgccgccccgcgccggcgcgtagtggaaggccttgcagtcgcccacgctgcagcacacaaagccccactgcgaagattcctcgcattcctcgccatggtcaccggcattcttggcattcttggacgagtgcggcgcgagctggaggaggaggccgccgatgagggtggtggtgccggcctcccaggtgtcgcccttgccctgcatgatgcggcggtcggcctcggcgaaggcgcgcagaaggtagtgggcggcctcgtggaggtcgggcacgacggcgtcgcggccgcagcggcgggtgaggtagtcgcgcagggcggcgacggcggagcgggcggcgtcgcgcgggcggtggccccagttgcagccgtcggccagcgccacgaaggcgcggttggcgtagagccgcacccacgcgcaatcggcgttggggtcgccgtcgcgctggcccgtgggcagcagcgggtaggtactgagcgaccgcgcgctggcccagacggcgccgttgtcggcgttgtcagcgtcggcgtcccaggcgaggccgccgccgtcgtgcgtgggaacggcggcctcgtcgcgcgtctcccagagcacctcggactcgtgatgatcgtcatcgtgagaatcttcttgatgacgatgatgacgacgatgatgattgtcgccattgtcgctactcgcgccgccgcggccgctggggtggttgaccacggcgtaattgggcagctcgcgccaccaatcgacgcgcgtagcggtgacgaggcccgccgagcggctcctccccgcgcctatggtggatcccttcttcttcatctccatcaatagagatcgatcgttcgtgtgggattctatagtgctggccggtatgaattcgattcgattgggctcgccggtatggatgggggctcgtcgaatcttcttcttcttcttcttcttctgcttcttctgtgttgatgatgatcttagctgcgaccgccagtgagagggattcgccgcaggtcctcttcctacaagtcgaacgaaatgtggaagttcgatttgttctcgtcgctggacaatgcccccaccctggcccaaaagaaaaccatggttggaaatgccagaagaaactcaagcgtaatttattcgtcaatttaaagtgctggtgggccacgtggggaacagtcatttttaaccaactcagagaggggtccctcccaaattgagctattccaaacgctggttggcctacgcggacagcctcgatgtgggctcaaaagcgacctcactttgcgctcttctctggtggagacgtcccgccgcagccgtcgtcagttgcgcccggatcgccgcaccatcagcccccgccatccattcagttcctcacctctcgaaccggttgttgttgctgttggaatgaaacattctttttcacaatctcaccacggcttcggccatgcgcgcccaacaggccaatcgccgaccgaatcgcccacgccctcgtcctcgaagtcgccctcgccctcgcgctcgccctcgacctcgacctcggtgtcgcgctcgccctcggcctcgctgtcgcccacgcctcgacctcgaagtcgccctcgccctcggtgtcgcccacgccctcaccgtcggcgtcgccctcgacctcggtgtcgcccacgccctcgactcttagctgggcctgccccgccgggtagttcatggccgagcccgttggctccaaagccgcgcgctgctaccggcgcttcaacatctacagcggcgactggggcggacaaccgagctggttccgtagtgaaagcaacgcgggctgctcaacgactacccgtgctttggccgactggcggctgtttgcatgaaggaggccacgcttgcctgagcagctgctgcgttcatgatcattacaaagatgtaccaagaacatgaccaaggagagccaaataaagaaaaagaagaatgatggatgacggtgatggtgatgacttacttaaccaacacgtgatgagagtgtagaaggccagggcatactaaaacaaaccatcacagacctttccaactgtgtggaacattcctctaggccctcatcagcaactccatcaaccattcgagtcctaaacattactgggcagtcccaacaaaaaccagataaataaataaacgagttttcgtagacagccattggaccgaccaaaacctacacgtagcatcaggcgtggctttaaatagtcagcacctcgcaaagaaacacaacactttgcaccaaactgagtcacagacagacacctatgcaatgccctctgggcgagaccaatgaacgcccgtggctccaaattccgtgcaacactgcaatcatcaggcaccagacccgccagctcattgaggctggtggagacacctacgtgccatcaagcgaggccaccaaatactttggcgtgacagcagcctgcctgtgcaagttggccgatcggggcaacctgcacacacgccacattggtgacaagggcaagcggctctaccactgcagtgacctcctctctcaattccccacagtcatgtgctccaaggatggatgcaccatccagaccacaatgaggccaccccacaagtgcatcgcctacaccagggtctcaagcaagaagcagtggcccaacctcaagcgccaaattgccaagctccaacgcctctgccccaaccacaagatcatctctgaagtggctagtggcctcaacttctggcgcaagggtctctgcaccattctggaccaatgctttgcaggcctggtcaatgaggttgctgtgctgcaccaagaccaactcgctcactttgccatggagctgctggagcacatgtttaagtgccacaacgtctggcttgtggtggttggccagggcgatccagctgtggccaccactctcaacgccctcaatccacagtgcaagctggccaatgacctcattgccatcaccaccttctttgtggcgcaacaaaatggcctccactctgcagcgcattgaagagcacaccacaatcgagcagccctggaggaaggctgaggaagcacaacaagcaagccttctgaggaagaaagcaaggaacaaggcggcagcaaggaaagcgaacaagatgagacagatggcagcagcagcagcagcagcaacaacagtggtgggaggcgaaaaaggcaaaggacaagtaggtggcggcagcagagggaagtggaagtggaagggaccacccagtgctgaggggggtggtgatggggagggtgggatggtggctttcaatggtaagatgcggaagatatgcgtctttccaatggcccaacagaagacgctcctcaagtgctggattggcactgtgcgctggacctacaaccagtgcgttgctgtggtgtgcagatggcagtgcgcgccaaccaagaaggcactgcgcgctcactttgtgactgagtttggcctgcgagaggtggaacagatcaaacgcgccaagagtggggttggcagtggtggcaacaacaacaacgttggtatctcgtgggtgttcaagacaccccatgacctctgcaaccaggctgtgggccagttcgttacggcctacaagaacgcggtccaggcacatgggtggggcaagtttgacatcgccttttggttggccaagcgcctgcagcaggagatggtggtcattcgctcgagggactggaaccggacccgaggcgagtacgcgccgatctttggcaacaccatgcttcgctcgagcgagtcgctcccggccaagatggaccacgagttccaggtcacgcgcaccaagctcgggtggtactacatctccataccagtgccactggatgtgaagcatccgatacagcaacagcagcccgatgcggtgggagggggtgataaccaagcccctgccgtcgcgccacacgctgctgccgcgatcgatccgggcgtgcggacgcccttcatggtctatagccccgacgaggcgcgtgtctacgagctgggtgccaacgactttgggcgcatcaggcgactgtgccaccacctcgacgatcttgtcagccgcatgaccgaccgcgacgttagaaagaagcggcgccgccggatgcgtcgggccgctgcgcgtatgcgccggcgcatacgcgacctggtcgacgacctccattggcgggcggccaagtggctgtgcgagacttttgagaccatcatctacccgcactacgagaccagcaacatggtcgtcgggaagagcaagcggcgcgggctgcactccaagaccgtgcgtgcaatgctcacctggtcgcacttttggttcaagcagcacctgctccacaagatccgcgagtacccgtcgggatgccgcgtggtgctggtcgacgagtcctacacgtccaagacatgtggcgggtgtgggcggatcaaccacggcctgggcaagagcaagctcttctggtgcgagcagtgcggtttccgcacggaccgggactggaacggcgcgcgcaacatctggctcaagttcctcacggaatggtgcaacggcagcagccgcggcaacgacgatgacgacaaggagcagcagcagcagcagcagcaataagcgtccgaggcaaaggcggtggacggccgatcctctggactttggggcttacacccctccgccgagcgaaccaaaaaccgctcggtggtgcatggatctggtgcaggacgaccgcaggcatgcccgcgtgaagctttgtattaggtttaaatttaagcgacctcaacaaggagctatagtaggacaacaagcagcaatataggaaaaaaaaataaaaaattgcgtaaatgttggtgtttcacagccttgtcgtgagcgtgctcaaccatactcgcctgcactgccacaaaatcattttcgttctgtttaattttcaaaaagcgcaaaaaacgatcttgtttcttttcttcgttaccctgtcacctttaccttttatggttcgttccaccggttttggtgtgaaaaacgcaggccagcttctttggcgcgcacaacaagggcgccaccccgcatcgcaagatgaagcagctcctccgttacaggcccgcctctcttgtgctcttcttctgtgctcttggcctgacgctcttcggtggtggggtcagtggcaccacctcccgaagcccgccaattcgacttcaagcaccccctcctcgcctcctgtctgggtctgccccgccgggtggttcatggccgagcccgtcggagccaacgccgcgcgctgctaccggcgcttcaacatcctgaccgacggcggcggcggacaacagagccagttccgttccgggagcaacgactcgagtagctgcgcgtcagatggcgcgcgcctggccaccttcagctcctacgccgagttctacgcggctggtctggcctgcaacgactcgtccgatgcgagcaacgcggccaagtactacgagcccggctgctgggtggacggcgccagcgccgccccgaccaccagcagacaggcttgggactgggccacgcccgacatccccgagaccaacgccttcctggtcggagcggagagggacaacctgtggagcggaggtgagccgtcgggcaattggtgggagaaccacgcctaccccgagcagtgcatgcagcttttgctcaacgggctgctcaacgactacccgtgctttggcctactggcggctgtctgcatgaaggaggccacgcttgccacctgataatgacccagtatatatcaaggataattctcgtaataacactaataaaataagaatagaaatacaacaactcacatgatgaagcctagcagccctgcacctcacaaacgaacgaattaacgaacccaaggacgagaagatttgcagcttcatcaacaccatcaacagcgtcctcctcaacggcagtacgtctcccatgcatgtgcgtgtgcgtgtgcgtgtgcgtgtgcgtgtgcgtgtgcgtgtgcgtgtgcgtgtgcgtgtgcgaggggcctgacaggcaagggcatgtgaatgggggtgggggtgttgtgtgccaccatgtgccatcaacccggggagcagaagcagcagctccagcgcctgtcgtcgtcgatggcactctcctccccgacgtcgaaccgatgcagtgccttgctccacctgtggcacgaccagcgcaacacggcgtcatcgtggtcgaaccgtcggacctcgctgtcgacgcgtgcggcgtgtgcggcggcgacaactcgaagtgcagcgattgcctgggcgtgccgcatggtgcggccctgttggacgcgtgcgtcatggtgcgccgatccaactggaggttgcggggtcgtgccaaccaccaagcctgaagatcgtgtcggccttgacgcggcggcactgtgaggctggccatcatgcctgatttgtggaatgtacggggtacccgtgaagatggtggtgtcgaggtcggcaccagcgctggagaccccctttcaggatggcggcacacttgtcgggtgagagtgggccgtgggggcgttccaccagcgccagtgtgtgtgtgaatggaccaccagtgggcagctgcacctcatcttcatggagctcccagtcagttccccttaccaagccttgttacttttcctttgcagggaaggttgcaaaagtctttcttcttactcgttactgttgcgagttacatgtcattggtaggggtggcgtcattcctctgccgggctctctggcacagcgcaaccacacctgcagccaagagcgctgcgagggtgaagctgcccaccagggcgaggccgatcactgccgcgtggtacctccccgccgtcgccgtcgccggctgcggctgctgctcctcgtcgtcgtgggcgtgcacagtgcaggcgaaggcgaactcgaccgtgaaggtggtgttgatgaggtggctcctggacaccacgcggtaggagcccggcgtgagcaccggcccagcgacggccactgtgccgcggtcgagcatcacgtcgggcatgggctgcggcccagtgatggagatcacgtggttgaacaggtcgcggttctcgagcaccaccacgtcgcccaccgccagccgctggcccgcgaggcgccacgtccgcgcgtccacggtctgcgactccaccaggcgcagcaggtgcctggtcggcgcgctcctgtaggcgccggtgcgcggcgccacgcgggtgaccaccgccgggtccgtcgcggcgtggaagtgggtggtctcgaaccacgcgtgcacgtcgtccttggcctccatcacctcgcagcagtggtcgtacgccgcgcggttgttcgcgtcgtcggcgtcggcgtcggcatagacgcagcgatcgcacctgtccctgatcttgcgattgaagcgcacgctgaaccggaccgatacggccgagctttcggccgattggagcacgtactcgcctggcccggtgacgaacaccctgaggctgttacccggaagcaacctggggtactgggcaacgatcttgaacgatgacgacgggctgtcggccggccgcccaaagagccggaacgtgtagccgttgttgtcgtgcaggttggtgacgagcagggtctcgccggcgtcgagcgcgccgatgggcaggagcaccgggccgaagtcgcggatgacgacggtggcctgggcgaagggcaggaagcagcacgtcgtgttgtcgccgccgcacacgccgcacaggtcgtgcaccgcgcccgagttgggcacgccgtcgcagccggcgcactgggagttgtcgccgccgcacacgaagcacttgtcgagcttctcgcgctcacacacgcacgccctatcgcagcggtcccccccgttccacattccacattccacacattcagcacattaattaattagttgagttattgctgggaggtggggcgttgtcgtacgggtcggtggggaggcgcccgccgaagcactggccggcgcagtccttggcggcgttgaactcgcgcccggtggtgcccagcacgcactcgccgcactcgtccaccacggccttgccgccgcacacgcccgcgcagtccatatcgccccccacacactctgccactgctggcagctgccaacgtaatacgtattatgttctaagtaaataaattaatactacaaatactataatcatttgtaattaaataaaaatggcgtaacgtaccgagcgtcgggtggcgcacgaggagccgtcaccgccgcacacgccgcactcgtccacctcgagctccgacggcgcgaccagcaccacgccgtggaccgccgggttgttgtagtcgtgccacaggtagaggcccgggctgagaaaccggtgcggcatgctcgccgcgcccggcgccagcaccgccgagagctcttgcaggctggccatgatcggcgcgaagcggtagagccccgggtacaagtacccggcgtcgggcgacggccggttgaggcaggtcaggtcggaacacgccgccgacgacgacgaccggcggcagaggcagcgaacagcagcggcgacgggcgatgcggagctctgctgctccttcccgtaccgcacggccgggtcgaaggccaatcgcctcgcctcctccgcgggaaggagcacgccggtggcgttggccagcgatgacggggaaccgagccgccgcttccgttcgacgagcttcgccaccaccgacacgcgcagcgagcgctccacggcggcgtcatgacgtgggcgaccgaggacctccttgccgtcgtcttcgaccatcgtcgtcgtcgtcgtcgtgttgtcatccgtctcctcctcctcctcctcctgtgcgcagcacacgccgcccatcacgaattcctcctcataggtgcccaagtcccgagccgcctgttggctgcgccggcggacttcaaacgaggcaccgcccgagggccgagtcgtcctcctgtgcgtgcgtgcgtgcgtgcgtgcgtgcgtgcggccgtgggttcgttgcatgtcagttggtgtcccataggagataataattatgaaatataatgataacgacagttcgtaccagccagggaacaggtcagcggtgtcctggttctgctgtgactcagcgcccgactggccgccttcgccgccggtggatcggcggcggagataggccgacttggagtcggtcgcgggcggttcaacggcgccggaaggcgttggccgctccaccacatctttgatgcgcatcatcgacaaatagttctgctcgcaacaacacacatgcacacacacgaacacataaacacaaggacgttagttcgaactaacatgcgcgggggaacggaacgccgggtccaaggaaaaagtgcgcggatagccaccttaaggaaagcgtcgagggcgtcatcgtcgggcaggtcgcccggctgcggctcgagggcgtggccctgctgggtggccaggcgcgacagatcgaccgcgggcgcgccctggtagtcgtaggccccgcccacgacctccacgttccggtcaagcaggttctcccacaccacgaggtcgcccacgcgcgcccgcgtcaccatcgacgaccacgatgacgacgacccaccgttgtcgatgctgttgtggtggtggtcgatgcgcacgtagtgccactgggcatgcgccggcttgggaatgcagcacgtcgatccgtcgccgccgcacacgccgcacgcgtccaccgccttgcccgacagcgccaccccgtcgcacccgccgcacgtcccgttgttcccgccgcacaccccgcacgcgtccacgcgcccgtagcacgccacgctcaccgtctgcgccacgtgcgagatcacgttggccgcctccgtcgagaagcccgagtgcaggatgacggcgtgcagctcctgcttgccgaacagcgcccggttgcgcgtgtcccagaagagcttgacctcgtagcgcgtcgtcgtcgtcgtcgagcccatcacgcgcggcaccagcaccgtgccgatcaaccggccgcccgcctggctgcccacgccgccgccgtgccacagctgcacgagcacgttggcccgcgtgaaggtgtcgcccagcaccgtcgccttcacctggtacccgatcgtgagcccgctcccgtcgctcgccatcaccgcgctcagtccgatggtggggtcgagccgcagggtctggagcgtgtagccgctgttggccatgtcgtggaacaggaggctgtaggcgtggttgttgtcctcgtgcatctcgtcgagctcgtcgttgtcgtcgatcgtcgcgtggatgttctgcacgccgtcgaagaggaacaggaaccacacctcgcgcttgccctggcccgggatcagccccacctcctcgatgccgactgcatttggtgtggcacacgcaacacaccacacacgcacacgaccaacgaccaacgacacgcacacgacacgaccaacgacacgacacgcgctgagtgagaccctaggagtgagaaaaggagcaatggtttgcggggggggggggtactgagggcgttgtcgtcgagcaggcacgcctcgtcgaggcagttgtcgggactcccgcgccacagcgccacgcgcacgttgcgcgcgtccacgagcgccttgttgcgcaccgtcaccgccacctcgaccacctcgccctcgcgcggcaccgccggcgtcgccaccatctccttggtcagcatcgtgcggtcgcgcttgaacgtggtccaccaccagggcaggttgaacgccgggtccggcttgctgtaggtgcgctcccaccacgtggacacgcccgggtagtagcccggctcggccgtgtagtccaccttgaggtactcgcggccgtcgggcgcgcgcgccatccacacgaagggctgcacgcggtaggcgtgctccgggttgatgggctccacgtagcactgcaccgacacgtcgcgctcgatcgccgccttctgcacggcggcctcgtcgccggcctctgtttcctccttgctgttcgcgtaggccgcgtggacatgaacaccgatgggcaggctgagctgcggtcctacgcccatgaacgccatcgaagcctggtaggcggccatcgcgaccaacgggggtgcacccaagtaagtgggatcagtttcgctcgatccatcgctctacaaattgggccaaaacaagggagggagggaaagtgaactgttttgtaccgtggtaccgaattgcacgtcgacgccaacaccaaaggagttcgtagtcgcaccagcggtgtggtcgagcgcgatcttcttctcggatttgcccgtgctctgcgacaccgattgctattgcgtacatttttgttgtgtgtgattggtgcatcaagtaaaaatggatgagaaaagcgaaaaaaaaaatcaaaaagtaaaggaggggggagggctgagagaaaagagaaaaaaagaaagaaagaaaatgcgagggttggaggcagtacctggtgctcgttggggccgagggtgaccttctcgcccaccatgatgcgattggccggattgaagtcctcgggcgcgcgcgccgaatacgtgagcacgttgaagggctcgtggtcgggcgtgaaccaccacaggtcgcgcccgtcgcccttctgcacgcagtcctcgccgcagctcgacgacgcccagatgtcgagcgacccgacctgcgcgccgctctggtccacgatggggaacttccacaggtcgcgcgtggtcgacatgtacagcaccacgtcgtcgcccgacgccaccagctcgcgcgacaccgagatctgctccatcgtcgaccggcccagcgcctctgaccgcttctttatagcctgcgactggtgatgggcatttgccacaatgaccgccaatgtcgcgtcgccgatcaactgggagttcacacacgaccaacgaccaacgaccaacgacacgcacacgaaccagttagaacacagtgaaaatttatactactggtggcggaaaaacgcactgcgttggactcggccgagatgtggacgaggtcgcgcgagatctcgaaggacgacgtgacgccctcgacgttggagaggcgcgtgaaggagccgtagccgccgaaggtcatcgggttgaccatcacctccttgccgtcgacgatgtcaaagtgcgtgggtggcgcgttgatgacggcgatgagctccggcacgctgtcgaagcgcaccttgatcgactggcccacgcggtagcccaggccgtacaggttgcccacgctcagcgccatgttgttcaccgtggcggcctccacctcctcgccccgctggtaggccggccccgcgtagcagtgccgccctgcgtgtttaacgagttttgaaaggaagaagcttgcatcagaaatgatttccatttccaaccacttcaaccaccccagtgcgctgaacgaaccgttgatgacgaagggccgatcggggtcgggctgcgctgtgaggctggtcagcatgaccttgtgcgacgccgacgcaatcgtgggcgagtactcgaaggccaccagcagctcgttggcgtagctctcgtccacgttgcctgatccatcagtattggcggtgcccgtggcggcggcccacacgaagtgaacaaaattgtagagtcgaacaaagacgaagtactcagaacgaagaacaaagaacgaagaagagcgaaacacgaagaagaaaagaacgcgtaagtaccgatgacaagcttgatctcggggctcctcgtcgtcttcagggtggtcgctgccgaccctgtcgccgccgccgtcgtcgatgaatccatcacgcccgccagaccggcagcggccgaagccgagaccgtgggtccgctgggcagcacaaaggcaaagctgcccaccagctcgagacacgccagccggaagcacgttgcgctgtccacgcggaacacctcggcttggctgccgctgcccgccgtcgcgctggtgaacgccaccacgatctcgtcgtcgccgtcgttgttcatgtcgcccgacaccatccgcaagctgtgtgccatgtgtgccgtgtaacgtgtgatatcagcgacgaccgtggctgagggctgggggctgggggctgatgggagaaggagcagtggcgggcgtacttgtgttgggctgtgtcccaccagggcgcttcggcgatgggcagcgtcttcttgagcgccatgggcagcgtgtccacagtgagctcgtcgatggcgtacaggtagagcgtgacctggtcgtagtcgacgacgctcagggccagctcggccaagcccgagccctcgtagtcgcccagattgaccgccacggcgtgcggctgccgcagcgagactagtgagtgcggctcggccgacaccatggtcgccgacgactgcgatgtctggcggaagagcgcccacgacaccgtgctccgagcggcgatccacgccaccgccagctgtgtcgtgtgtgtgtggtgtgtgtgggtggtgtgcggtgtgtgcggtgagaaagaagaggagcagacggtcgaggaataaaggaggccgggggggggggtcggtcgtaccatggagggcagagcgttgaccttggctgccgccagcgagtagccgaacccgcccgcgtccagccggctcccgctctccacaccggccgccgtcgccgccgcgtccgtgagcacgatcgggtaggtcgggcgccccgccaccgccacctcgaccgccgtggcgaacagagcccgcagcttctcgctctcctccgcaaagcacccctcgcacggctgcaggtcggccaggttggccttggccacaccgctgccccacacctcggtcgactccatgcgcaggtcccatatgaacaccttgagcgctccgccgccgccgccgccgccgctgctgctggcgtcgaggaaggcgaaggccagctcggggtagccgtcgttgtcaaagtcgcccgtcgccatctcgatgtgcccgccctcgcccagcaccaccgcgttcccgctcccactgccgcctcccacgatgaggtcgcgcaccaccaccgtcgagggctcgccttcggtgcccacccacgtgaaggaggcgtggagcgggccgccctcgtatccgaacagcgtcaccacctcgtccttccagtcgttgtcgaagtcggcgctcgcgctcgccatcaccatcttcttgcccacggcgggcgtgtccgtgtgcttgaacgccgcgttggcatctaaccacccatcacaaccaccaccatcaatgggccacgttcttggttcatgctgctcctacccgccacacacgcaccacacggcacacggcacaaacacaacacacacgcccaaacacaactcaacaacaccaacaaccagcacatgggttcgcgcacctttgcaacgggcctgcaccatgagcgccttcttcacccgcggctccgagctgcactccatgctcaggtctcgcgccaccaccaccacgctcccgttgttgtcgaggcgcgggcggaagaagggctccgtgtggtggcgcaccatggtcgacttcaagtggtggtcctccgtgccgggataggtcaccggcgccatgtgcgcctgcgcctggtgctcgcgcgactcgtaccgcgcctgctgccgcattgaccgctcggtccacagcca

SEQ ID NO: 129 - DNA, 22376 bp, Acanthamoeba sp.
  variation 20723..20763: note = n is any nucleotide
  source 1..22376: mol_type = other DNA
  variation 2670..2891: note = n is any nucleotide
  variation 16380..16468: note = n is any nucleotide
ccttaatcgaggcgaggcgaaagaaccgtcttctcagcgtatcccacaacaacgtctcgcgcgtccggattatgacagccgccccgacacgagaggtggagctcggccgggtgtttgaggttctgaagacaggtaagcttctggttgccccctctcactccttcgccaccgtcacctctcatcacctattaataacgatacaacacacactggaatgtctcattttaaccagttgaaaaggcgtctgggcacgccgtgtcgaagaagtacacgggaccccagctgccgaaagacttcctgaatgtcagcagtcgggccaactgttcagacaactcctccccgtcctacgtggacggtgatgggcgtctctacgacactttctaccgccgctgcgagcaaagcgaggctgggcggctcgtacagaggctagcgcgtttgccctttccctcacccgacgcagagggggcctacatcgacttcaacagctacgaagcagccgtgctcgagtggaagaagcaagtgacgacggcgctcgggcatttgaccctgccccagttgatgggcagggcgtacccacgtccccgagtgtttaaaatggtgtgtcgcgccgccaccgtctccatctctgacacgcaccatcgtacacgcacgcgtttgtgctcacacgaggatggctgtgtggtcgtgataatgcgtaccgcaggaagaggagttcgacgtggatgatgagatgaccgacttggattccttgccctccttcagcttcgacgaaaagatcagctcctccctgtcgaagagcggcaccttcgacaaaaagccaggttagcgtcagcacacacatatttgtgccaccttgttcgcaacacggtcgcggttttcttatttcccattcatctctaccagcaccaggcccgcagcccccagacaagcccggtgccccggtacgctgtcatccggtgcgcagccaagtcatgtgaccacccagttcaactgatcagatattctctttaggatgaagacatcggacagtttggaggctttgagcgacagggaaacatatgggatctgcagctcattcctcacgaaccagtgcctgaactgtatgccaccctgccaggtacacaatgcaagcacaagtgaaagggcgcgcctaccttctgcgcttaacacatttgcggcgtgtgcgcccgcgctcgcgatcacagagttcgaagctgcctacaagcgctgggctcaggtggtagccgacttattggtcgtcattccaccccaccccagtcagctgtctcagttgctttccttggccaccgctgtcaaggtaccctgacaatcaactttgattgtaggaaaaagcgcagttcgatcactgacgagcgaggtaccatcttgatcacagactgccgagatgaagaaggttcgccagttaagctactctgtagccatggcggacgaagacagcgagaagcccacgctaagagtaaatgtcatcaaagtcgagaatgcgaccgaggtacaagcgagaacaccccgtctacgccgcatgcagcgctgcatacgcttgctcacacgtcttgtgaccgcgttggggtgtttatcgatataggacccactgtacagcaccttcatctacaacccgcacccgccaccggaaccaccagaaacaacggagaagaaagcagaaaagacagtgtcgcgcgacaattggattcagctgccggattccacccgtaagcaagtcaccaagcgggtgggccaccttgtacagaccaggttccgttccccgcgcattcagtaccgtgcacatgtgttcatctgatttcttctcaccattcctccacaaaccaggttgtcgaaccaacgcaagtataaggcttataatgcgcccatgttgcccattgtgcacgggactttcgcagcgcccaagaagcagttcgatgactactccttctctgggcccgtcatcccccggatgaagcgagagacagaaaaaggtaatcccacgcacgcaacgcacgctcacacgccgcaccaataggcttgccaccatagggcttgcctttgctgtctgtccgagatctctcgctgatgagtgataaacccaaccctagtttacgagttcagggctttgcgccgcacggacctctcaccagaggaactggcgtcatgcatggattgccccgcaatggtcggcgacaagcctgtcggcttcacccttcccgtggacgaaattggttcatatcccaaccccattttccttcgcttgcagttggttgtggtttgagtattgagtattggttggttactggacacaggcccgatcaactttcagcgactgaacaccgactactcctacaaggagcagtggcttaaacagttgcgcacgtttcaggcccccgtgaggaatcagcacctctactcctggtactggccgaaagttgacgaatcggtacctcactccctctcaaggcgggggcctctcgtgagcacttgtttggccttcattcgggctccaaataatcgagggtcacccttcacctatgatcgaacgccaccaggttcacgccatgcatcggtcggagctcgacctgatcgttgctcatcgggaaaccatgcccccagaggtgtttattcggcgaatgctcacaactcccatctacttcgaccgctttnnnnnnnnnnnnnnnnnnnnnnnnnnnnnnnnnnnnnnnnnnnnnnnnnnnnnnnnnnnnnnnnnnnnnnnnnnnnnnnnnnnnnnnnnnnnnnnnnnnnnnnnnnnnnnnnnnnnnnnnnnnnnnnnnnnnnnnnnnnnnnnnnnnnnnnnnnnnnnnnnnnnnnnnnnnnnnnnnnnnnnnnnnnnnnnnnnnnnnnnnnnnnnnnnnnnnnnnnnnnnnccagctggccttcttcgtggcgcaagtgatgcaatccaacaaggccaaagcagtgctgggtagcatcttctccacaaacggtgcgacgcattgcccaacgaactttgtgaggtactgctcccttgcttttactaacccgaggtgtcgagcagatagagctggagtgtaccatctggcgcacgccatgaccttcttcaacgaagtgtcagtagcactctggccatatcgagctacgaccatggaatctgtgctgggggtacaccctccgtcgccctatctcttgtttcttcttgagattgaaaccacaccctctccacgtctcattagcccaaagaggacgaacgacgacgaacttttgtggagcctctcttcgacgccttctttctccactactacctcaaagccacgtttgcgacagtcagcaaccagaagttcacctaccttgcaatcttcaagaggctaggcaaaaccatcaaggttcccctcacacgtgagcaactggagatgaaggagtttaacggcatttctcgtggacagagagctcgggagactctggagcagctgctggtgcaacgcaactatgagtttctgcacaccgatattgtaaatggtacctttaagcggcttcgttcgacttgacagaggaagaaattcaggcctggctgacaccacaactcttatgcgatctcaggaatccaatcccagtcgtctcgtctcagtgccgtctggctcttcgtatgggtgcagctcatgcgacatgagtccgcaggcgtgcgggtatgaacgctctctatctcttgtcattcgtttcatggcggttcctcaccctcgttgcacctcacgggcgcacaaactggcctgtcgaacagagagcagtggctgctgacgaagcacaactcctcccttccctgagggatctctcaagatccaaggtggctcacattcgggtaagtacctgtcttcctccttaggccgcgccttagttgatcctcaccatgttgttgctgctgctgctgttgatccaccagtacgccgtcatacggatatttgacatattgatgagcgaggattggactcccgtactgtacagttactacacgcgaaatgagacagccctattcgaggtaccgccgttagtcacacttacctcaaggagtgttcctgccacctgacacactcgggcggcggcggcggcggcgggcaggatctcacggagccctctgaatttgcgagagcgcaaatggaacgacggccctggatctccaaggtacttacaagggccacagctcgctagggttgggctaagtgggaaaactaattgagatgttccctcaaatacccacccatccatcaagggcgagtttactccgtcactgatctcgctcttgaccgggcaaatgtgcaagagagcaacccagggagcaagggcagccaaaggaccgacacatacggtacacatcatgagcgctggtactgtgtggctctctggcactcaccatgtgtgttggtcttttgtcagatactgctgaaatacgcgttcgtgttgaaagggtcgctcttcaagcgtttgctcgctttcgcctctgaaatgccggagacgcaggtaggtctccttttttaaccttcccctcattggtatcgcctcctttgctgacgtccttgcgcagacggtggaactggtgacggaactgctagccgaattaagcgtcacactgcttcacctgggcctcatatccggctccactcggagcagagcagagagggtaccaacgtggcccgttcaagcggagcataacttttctggttcccagaatttacgtgttgtttctggttttaggtgtccatcaccggagacccactgtctggccacgggctggtgcttaatcctccaggtacctctccggctcgagcctttctccatggagtggatgaggactcttgactaacatccactcttctttgtgcgcgcgcagaattaacggcggtcatcgcatttatcacctcgcggccgggatcaacatcggctccgctgaagctctcgaaagcaagtaagatctttccctccttcgccctccattctcatccataagagcgcgctcaccatattgggcgccgttagacatgttgcggtgcctgcatgctcttctccaaccggcctcgatgtatactctggtgaaacgtgagaaaacgttctgggccaagtatgcatcccaacgccgcctctcacatcgctccctgcccccctcccgagggggccgcttgtcaatgcttagccctgctcaccgcgttcgctcccttcaggctggtgcagctctgtcgtgacggctcggatatgggcatttgcaaagcggcgtggaaagtcgtttacacgaccattaagcaccatcccggtacagtggaagtgctcattgccaacaaggtacgttgccgcaatccatctgggccgtgcattgaaaacgcgcgacgggcacagtgtttgtggtgctcatcgaagaccatcagtgcctggagcaattactcgattgcatatcaactggggcggataattcgacaatcatcaatggtttgcattatcttgccaaggtaccactgatcggctaagctcgcgcgacaagaagaaggcccggcctctgaccaagtggcgcgtctgcaccacttcagatcttcttgcttgaggtcaatgatagccggcgcaaggccaaaggcctcaaagtcccattacgggaagacccgcgcacgttagacaaggacctcaagctgcttgtggggttctacctggagaggactgctttcatcaaggtgcacatgatctacaagcagttcggcgatgaataccccggagccaagttccatcaactggcctacttctataacaccatcgccacgtgctctgcttgtgcttccatcctcaagttcgcctccaaggtgcgcgagaccccaatccacgccaccgcgccactgcgggcacaagcgctaacacgtttttctttcgtgttggttctccgtctggtccttcaaaagaacgaagactacctccaaggtgtccaaaagatgaagtccttctttgagcacaaagccgtatcacgcaccgagaggccacactgagcaccgagaggtcaacacaggcctgaagaagtcaggctttaaaaaaaaatcttttcatttaaaaaagaacgcaaaacaagttttgcgactctgtcccaatctttaaaatagtactacactcgctcggccccaaggcgagagccactgacaacccaaacggcaatggcatacgtcattgaagcaaagaacgagaagcgtcaccttgagtgtctcccactccgctttgctctcgcagcagatttgaagacaactacgacggacaacctagccggaggggatggcgtgggagtggtcgaaatcgatcgcgcacgtgaagaggaacttgagactctccgcggcttcctcaaccatgtcatttccgaaggcacctgcccctctctttctccttttcctattttcttcttttctcgtcggtttttttgtattgttttcttctgagacctgagcaagtgcaggtatgacatacccgcaactgagcacactggacgaagtgggcttccgggcctacttcctcagccatgacgcttttgtagccaggttatccctccttcgattttacccaggtccagcttggtgcaatctgattgacacacaatgtggaatgcctggctctaaacagagaccctaacacgcaggaggtgttgggtaccttctacatcaagcccaacttcccaggtcagtcgtctgccacaccatcattctgccatcagacacccaagtagtatctgaaaacgatcactccatttacgccagggcggtgcggtcacatctgcaacggcggttttattaccaagccgtcagcacaaggcaaaggagtaggcaaggccatgggcaaggcattcctctcccttgcgccccagttgggctatcgcgcgggtttgccttttctccctgcgtgtgtgtgtgtgtgtatgtgtgtgtcctacctcctgcacagcgtgacggtgacaacatcacgaccacgcctacccaaaaggcttacacttactcttatgttgttggcatcacaccacagccatgtttaaccttgtgttcgagtccaacgtgccctcggtgcgattgtggcgctcgctgggcttcaagcagattgggcgcattccccaggccgggctcctggcgcacggcgagtacgtcgatgcactgatgctccattacgacttcactgccccgccgacgctgagcgagtagtaggggtaggaaggaaaaggtagcaagaaacgaaacaagcacaagctcgattttcgccccctctccctttcgccgaacccagcacacagaagcaacaacaaaacgaaggccaagaagaaagaaacgttcacaacacacgaaacccagcctagaagatgtactctgcgtcactcactcccgaagagatcaatcaactcaagaacggtttccttggcccagcatttcaggttcgttcagcaacctcttcgatccttcgtttgtgcccatcacacgagcattgctattaatattgattgattgatgtggattatgattaaccataatctattttgatgatttaggtttttgcggctggggtgacaaagatctatgtgtcccgcccggaaagggcacagtgggaggagactggcttggtgggcgtgtggaccttctttgcccacgagcccaccaagaccctctaccttcagctgctggacctccaggtaccttcctccctccgttctggtggtggaccacagcaggtttggggtaaccaacacgactagcttcctcttttgaacagaccggcacaaggttcttcacgcaggagctctatgaaggcttcgagtacctgcaggcgacgccctacttccacacctttgagagtgataactccatttgtacgtacttcgattctgtgcctgcctgcctgcctgcctggtgggtgggtggtggtactgacgcgtgcccatacgtttgcgtcgtcagtgggcgtatcatttgccctcgagcaggacgcggcccgcttccacgcggctgtgaaggaagcgatcaacaagaagcagtaccgcatgcggccctcgaccttcaagaaggtctggaggaccggattgggcaccttcacctcatggaggggtgccaagaaggaggtatatactcatcagggtgcgcttattggtggttctttctcactaaacttcaattttgtatttttattttttcaaatacaccatgacagaggaagccggagcaggctatggcgatctcctctccctctggcttcaagcatgagtcgcacatgggcttctccaatggcgagttcggtttctgggtactttcctgaaaatttctttatgcctttccctcctctcgcatctaggcgcttgattgcatcaaccaaccccttgaacacagggctgtactcctctcgcgtggcttgaccagaacccagcttggcggacggtacgcacaccaccttgttacgttgcttaccgaggcaaagcctctttcaagcaggtctgatctctctctctctctttacctccagtatttccaacgcactctcaacatcagtgcggaggaggtcgacaagaacgccgcccaactactctccgttgccgcccaccacgtaggccgtggcagtgccgtcactgtccccctgcctgtccgtaagttgtcccacccgattgacgcgcaatgccatgatgcgcatcattctagaatctcgtggttcggctcgtaggctgactgactttgtggtgatatccgtgctcaccacagcaccgaggcccgatagcaacaagctacgatcgcaattgacgagctctcaggagctgaagaacaaactccggctcagtgctgagttgcagcagcagcagcagcagcacggggctgtgccgcccgcaccgccctccggtggtgtcacaactggagacgtggagccgccgatcgacggaagagatacgcccgcggttgcgccgcccccgcccccgcccgagggtggtcattatcagtacacccccaggccttgcccacccaaggagctgccagggaggccggaagatatgccccaagagcagcaggaagacctggccgacggtttgttcctcctcctcctcgccatccgtaatcatgtattctttctctgaaaagaggctgacgtgctctttgcgccgcgtgcatgtcgtgtgcagtgctgaagagagcgatcgaagccaagtttggagcagggaggcgcaacgaagaagaggaagagcaggaagaggagcaaagcgacgacgacgacctctttggggctgacgaaccgttcgagtcctaaacattactgggcagtcccaacaaaaaccggataaataaataaacgagttttcgtagacagccgtcggaccgaccaaaacctacacgtagcatcaggcgtggctttaaggcctcgtcctagagtttagtcatccgacttgaaatttcatccaatttggaaatttcgtgtgcaccggggtcggattcatgggatgccagaaaactgaatgacaccggggtcggattcatgggatgccagagcagaaggaaattaattttaaaatcatttatgcaagtgtacgttgcactgccgaggatgagaggccacaagtatccagtgttgtgtagttgtggccaagtagtttggagagcgcggactgagcagaaccacttgtggcagggtcatcagattgtccctgttggcaaggcagctcaaggcgaggtagctattttcaaggtggtgggcaatgtggccatgcacacagaggccgaggtgggaaggcacgaggcggccatgggcgaggcggccctgcgcaaggcggccatgggcaaggcagccatgggcgaggcggccatgcagtgtggacggggcgactggggaagagcagtaagcaaggcagctgtgcatcatccatccttggttgtggtgaggccttttctttaccaatttcctcacagaaatttgcggtggtgacaagcacaaacaggccagagggagtaattccgtgcccaaccaaaaaaactgcaggacgagcccttaaatagtcagcacctcgcaaagaaacacaacacttcgcaccaaaccgagtcacagacagacacctatgcaaggccctctgggcgagaccaacgaacgcccgtggctccacaatccgcgcaacaccgcaatcgtcaggcaccggacccgccagctcatcgaggccggtggagacacctacgtgccgtcaagcgaggccaccaaatactttggcgtgacggcagcctgcctgcgcaagttggccgatcggggcaacctgcgcacgcgccgcatcggcgacaagggcaagcggctctaccactgcggcgacctcctctctcaattccccgcagtcacgcgctccgaggatggacgcaccatccagaccacgacgaggccaccccgcaagcgcatcgcctacgccagggtctcgagcgagaagcagcggcccgacctcgagcgccaaatcgccgagctccgacgcctctgccccgaccacgagatcgtctccgaagtggctagtggcctcaacttccggcgcaagggtctctgcgccattctggaccgatgcttcgcgggcctggtcgacgaggtcgccgtgctgcaccgagaccgactcgctcgctttgccacggagctgctggagcacgtgtttaagcgccacgacgtccggctcgtggtggtcggccagggcgatccagctgcggccgccactctcgacgccctcgatccacagcgcgagctggccgacgacctcatcgccgtcaccaccttctttgtggcgcgacaaaatggcctccgctctgcggcgcatcgaagagcacgccgcgatcgagcagccctggaggaaggccgaggaagcacgacaagcgagccttctgaggaagaaagcgaggaacgaggcggcagcgaggaaagcgaacgagatgagacagacggcagcagcagcagcagcagcagcgacgacggtggcgggaggcgaaaaaggcaaaggacgagtaggaggcggcggcggcggagggaagcggaagcggaagggaccgccggcgctgaggggggtggtgatggggagggtgggatggtggctttcgacggtaagacgcggaagatatgcgtctttccaacggcccaacagaagacgctcctcaagcgctggatcggcaccgtgcgctggacctacaaccagtgcgtcgccgccgtgcgcggacggcagtgcgcgccgaccaagaaggcactgcgcgctcgcttcgtgaccgagtttggcctgcgagaggcggaacggatcaaacgcgccaagagcggggtcggcggcggcggcgacgacgacgacgttggtatctcgtgggtgttcgagacgccccacgacctccgcgaccaggccgtgggccagttcgttacggcctacaagaacgcggtccaggcacacgggcggggcaagttcgacatcgcctttcggtcggccaagcgcctgcagcaggagacggtggtcattcgctcgagggactggaaccggacccgaggcgagtacgcgccgatctttggcaacaccgtgcttcgctcgagcgagtcgctcccggccaagatggaccacgagttccgggtcatgcgcaccaagctcgggcggtactacatctccataccggtgccactggatgtgaagcatccgatacagcaacagcagcccgacgcggtgggagggggtgataaccaagcccccgccgtcgcgccacacgctgctgccgccatcgatccgggcgtgcggacgcccttcacggtctatagccccgacgaggcgcgcgtctacgagctgggtgccaacgactttgggcgcatcaggcgactgtgccaccacctcgacgatctcgtcagccgcacgaccgaccgcgacgttagaaagaagcggcgccgccggatgcgtcgggccgctgcgcgtatgcgccggcgcatacgcgacctggtcgacgacctccatcggcgggcggccaagtggctgtgcgagacttttgagaccatcatctacccgcactacgagaccagcaacatggtcgtcgggaagagcaagcggcgcgggctgcactccaagaccgtgcgtgcaatgctcacctggtcgcactttcggttcaagcagcacctgctccacaagatccgcgagtacccgtcgggatgccgcgtggtgctggtcgacgagtcctacacgtccaagacatgtggcgggtgtgggcggatcaaccacggcctgggcaagagcaagctcttctggtgcgagcagtgcggtttccgcacggaccgggactggaacggcgcgcgcaacatctggctcaagttcctcacggaatggtgcaacggcagcagccgcggcaacgacgatgacgacaaggagcagcagcagcagcagcagcaataagcgtccgaggcaaaggcggtggacggccgatcctctggactttggggcttacacccctccgccgagcgaaccaaaaaccgctcggtggtgcatggatctggtgcaggacgaccgcgggcatgcccgcgtgaagctttgtattaggtttaaatttaagcgtgcagtaaaaagatgatgatggagcaggcatcaaatgctgccccggaggtgggcataaggagagacagcgtatcccgcgaggagcgcaatcttgtacgtaatcattcactctacgtttttttttattttatcgaattactaagagttatgatggccattcaaatggcttgatttcattttatcatgcgaaggaatatggtctgttgaattcttattgctgcctcgttgatctgtggcaggcctcgaatggcgacggggcgggcagccgcaaacgaccgcgtctcgacccagacgacggtgcccaccctcgcaaccaccacggcacaaggagcatcacagctgctgctgctgctgcgacaagcgagaccacagcagcagatatgctggaggacgagtggaagcgattcgcgcgccagtgcaccgagaacatggaagagcaggtcatgcaccgtatcaaggaggaagtgcgacgcgagaagcggaagatggaggccacccccgagtgggatcgcgccattgccgaagtgcagcagctcgagcaccggttccacaagctgtggcttcagtgggcgcgcgacgaagaggcgcggcgcatagatgaggcctaccgggcgcgtcgtaatttcttcgctggtcaccgcacaccgccgccggccacgataccgcacggtgagaagaggggagaagaggaccgccggcgatccgaccgtgagctgcgcccgatgcaccgaagcgaactgctgccggatgaaggcgagcgccggcgttcacgggaccgagggacgagccgcacaagagcgagagagcagtctgagcccagtgccaagcggccccgcagccgaagccgaagccgaagtcgagggaggagaatcaaggaggaatcgcccgacgaagagatgcatctcgagaggagagagcaacggagcctgcagcagcggcaggaccaacagcgacagcgacggacggaagaggaggaggaggaggaggaggagcgcgagcgtagagtagctcgggagctgcacgagcagaagcagagggagcaggaagaggaggccgagatggacgaggtggaacaggcatttccggactccgggtcgttgccgcctccgcagcgtgctgccagatttcgccaccactgcgagatgtgccaagtgacgctcaactcgcagaagcagatgttcgagcacttccgcggcaagaagcacgtgcaaggggaggagcgcctgcggaaaatgtccggtcagggtccatccccagcgacgtacccgcccagcggacaagctctgaactggcagaaccagcgagactggcgcgccgacgacgagatgaactgggagcgcgagaaggctcgcggctggagcaaactgccgacaccgctgccggcgatcgtgaagcccgaaccacgcgacgaagctggcgacgggcgcgcacacgaagtctcgacgggcactgagctggtgcagcagccgacgtgttcggtcgccgttaagcaaggtgcgtgctcgcatctctccagcgagagcgtgacctggtgcccaatagctcaaccggaggtctaacctcgtgcccgcatctaacaaatctcacaacactaattagtcctgcgcgacggcggccaagcggcgaaggaggctgagcgggagcggcctgcttggctcgagctggacctcaatgtcgtaagcgacgacgaggaagctgaaatccagcaggaggaagccgcaccgcggccgacgccagagaaactgggttcgcccaaggtggtcaacctgttcggcatggtattcaccgacgacgacgacgacgacgagagcagcggcgaagatcgcgaggacgacagcgaaagcagcggcagcggcgacgagggggacttcgacgaagatagcgatgaggatcatggcgaagagcccgaagcggaggggaaggaggaggtcgatgatgaaggcgaagaaaccgagcgctactggtacaccgacgatgaggaggacgagcagcaggaggaagagcggcgagcagagggcgcaagagtggagccggagagcgcaaaggaagagaggcggaggcgtgcaggtggggcgcccgatgtagcggaggcgacaaaggcttcgaccacgtcttcgcagccgcggaagcctgctttcctcctcagccccgcgcagcggcgggagaactgggaagccaagtacgcgctcgtcaaggcgtggttcgacgaacacggcagactgccgagcaaggcgaagagcaagacccttcacaactggcttcactacaacaagaaaagctggtccccactcgatcccagccaacgcaacaggctgcgcgccctcggcgtgaagccgttccgtcggcggcgatgcaaggagacgccgtcaccatcgtcgcgggccaaggaggaagtggagccggagcctcttagggatggtctgcccaagcggagagtcaggacgggcggcgacacggcgatctgggaggggcagctgcggaagctcgaacgcttccgcgccgcgaccgacggccagaacccgccctacttcctctcaaccggcaagtggctctacgagcagatcgcgctccagaatcggggcctactgagcagctcgcggaagtcgaggctcgagagcctgggcatcaagtgggactggaaagacgagttcgcgaacaagtccggctgcgagaaggccaagaagtggaagcagcgagcagagcggacccaagacagcagcgataccgaagaaaagaaagggtcggcaaagacgaaagaacgcgagaacgagaggagagaggggaaggagaagaaacgtgaaacgaagaagaaggcgaagaaggaaaaaacgacaatcaagaagaggagggcggaggaggagaaggcaaagaagaacaacccgaaaaagaggctgaagagagaagtaaaggagaaagagggccatacgaaggtgccgtgggaggtgcgatacgaggagttgtgccagtacctcgctgcgcacgaccagcacctgccggggaagcaaaccacgctcggcaagtgggtctacacccagcagtaccggatcaacaaagggctccaggctcaggaggacaaaatcgccaagcttgtcgccctcggcatcaccctctcgccgcccaagaccccgaccaccccgacgacgacgacgacgacgacaacgacgacgaccccgaccacgatctcggctgcggcgcttccagagccagagcaaaagcacctccaggaccatggaggcgccacggaagaagacgaacgtaaggtgtctgccacgatggaggagctgctgcagcgcattaaagaggagaagttgtgatgtaaagagctcaagagactcttctccccgctcgcggggagggggagacagcaaagccacgaccgtgttgtgggtgtgtgtgggtgtgtgtgggtgtgtgttgttcacgaggagttcattcaaattccttattgtgcacaagcctgttttttttcgctgtcgaacggaacactcttcttggcccaagcagttgtttgcccgacaacggaattctccacctttcgcgcgcacagccctagcattcttggcattctgtctggaccaatttttgccgactaaactgaatataatatacgggtatatcaactgttggaagcttccggctttcttgaaagtagtaccgcggcgaagatggcgacccacatctccttcttcgtgctggtccttttcaccctctgcgccacggcctcatgtcgtacgaaggactgcagcaaagtggacagcgtagaagagcgtgccactcacgtgttgttttcccctttctgtcatagaactcgccccgctccaagtcgctcaaaacgctgcgcnnnnnnnnnnnnnnnnnnnnnnnnnnnnnnnnnnnnnnnnnnnnnnnnnnnnnnnnnnnnnnnnnnnnnnnnnnnnnnnnnnnnnnnnngcattcactgccgcgactgatggcagcgaggtgaagaacgtgcacgtcatcgcgacagcttccgcgccatctccgccaagctctcgcccgcgtacgtaccacgtctcctgtctgtattagacacattgcccttttgacttcttaacgttcgtgccacttgtggtgagtgcagtatggtgcagaagctgcgaactcaccctgctgtttccgttattgaagagcatcaaatcatgcacgtcaatgaggaagagaagtgccatttgcagaaggatgttatctgggtaaggccaccccaccacctgtgatggcaaccgttgaaccttgaagcagcatcgatggtaccaacgttgcactgtgtatcaccccccactatccagaacttggatcgtattgatacgcacagcatcgacatgattgacgataactacaactacaactctgccggtcagggcgttgacgtctacatcatcgacacgtacgcacacctttccgctccagccagcgttgtaacctactacactaccactaccaccttaccatccaacgttgttcatgtatgtgacagggggattctgacgacccacgtcgagtttggaaagagagcagagtgggctgtgaacttggcggaggacgggatcgacactgattgcaatgggcacggtactcatgttgccggcactgttgcaggtgcgctctacggtgtcgccaagaatgccaccgtgatagcagtacgatcatatcgataggcgtagacgttttggcgtggcttttgttgacgttgactgaccatgctctcacaacgtgctctaggtgaaagtgcttggttgcaatggattgggcaagaacggagctgtcctgaaagggatcgagtggactgttaacgaggcgcgaaggcgtcgacgcccttctgtggccaacgtgtctgtcggtagtgggaagtcaagcgctacgaatgccgcagtggccggtaccgaccaacactcactctgatttctgtgcatgccttcatgttcaccaaaatgcgacccgccagctgctgtccagagtggagtgaccgtcgtcgttgctgctggcaatacgaacacggacgcctgtgacttcagtccctccagcgaacccctggcgatcactgtactggccactacaatcggaaccaatgaagagaccggagctgcccaggactgccgcgtggcgtcctccaactacggctcctgcgtcgacattggggcgcccggtcagctcatcaagtccgcttggattgatcagagaggctcgccacccaacgccacctacaacattctcactggcacctcgatggcatcccctcacgttgctggcgttgccgcccttgtgctcagccagtcccccaagtatagccctgctgaaggtaccatcaatccatccataagcacccacccaagattacgatcatcagtgcgcactaacttcggctcaaatgtccatctcagtcaaggcagccttgcatgccgactccaccaatggggtgattgacctggcgtgccccttcatccaactgccaccgtcctgcgagatcacacccaacaagctgctttacacgaactgctgaaccacctctctggtgggcttgtggtgctctctaggtacccaaaataaaaactgacaggttaggcgtcgtcagcgtcgtgccgtccaagaccacctggcttctcttctgcaacaaacagcacagacacatggactggatcaccacccacagcatcaacagaagcaagagacccactacagcaaatacattgtggtttatactcttatgctggtgttgtggggtgtggaatgaaattgccttgaggccaaagtgatgtacttgaggcagatggaggagcctcttgtgtagcatttgatccaccccagcctgagcaggtcactgaatctgcctttgctttatgcaggatcttggacaagatgtagtgccctgttgactgtgaaatgggttctcagatcctcaatgtgatcctctctaaggatgacccttggatggccttggtgatccctttatatgacctgacaccaacattgagtgatgtgagcattggtgtgatgcaatggctggtccagtggttgctgtctatgtgattgatctgcaggtgtgtgaaaatttggggagcctcaccagccaattcagattcagcaaatgatctatccaaatgattgtgcatcagtggtagttgacaacttggtcatggaggtagtgtgaacacagagtgagtgacaagagaagatcctttgaacacagcagggtttagggtttaggggtctagtttaggtactctttgaccttttcaatggtgctcataacatcttctatatatcatcttgatcgataattgcccatcattctagatatgcctttgttttttggcaataaaatcgttcaagcgagttttccgtttttctttgattttccatgaattattttttgtgtatttatttgttaaatcaggccgacctcatgcaggcgacacgatatggttgtattcgtgtagagcaaaaatcaggctacaaaacaagtagctatacacgtgcaacgagtatggcgttccgacacaaggccgcgtggcagaaaggctttttttaatgtttggaaaatcacatggaggccaagaaaaatcataaaattctggaaaaaatggctagcccagtttttgaaggccttctttatggctatgaagatttgaggtggctaagcgcggagtctctctctctcactctctatcttttctaccttggacagagagagatggatagagagagatattggtcattcaagggttagcatggatggaaggatagagattgaaccaccatttgggtgtggcttgtgaaggaggttatgccttttgagaaagaaaaagtccacacctcagggtggtgtggtaacttgtattctcactcaaataaaaatgtgtgtggtgtgtggtgtgtgtgcgtgtgtgtgtgtgtgcatacatgaaattatgtgtctatgtgtgctgtgcaccatcagatgtattaatgtcatgaatggctgcaaaaaatatttgacattccatagttgccattttggcatgaaatgtgactgttacatgcctcttcatgagcaacagcacgaaatgtcacttttgtcttttcagctctgtaacacacacatcaaacaagagagagagagagagagagaagagagagagagagtgagtgagtacatgcatgtgcaaagccaccacacccacatcaaccagctctactgcttccccacccccaacactcttcaagcttgccagcagtaatggcagcagcacttcaacattgtctgcagtaccaaccccaaccctttggtttccccatgctgctctccttgcccctgcatccacagctgccatttgccaccttgtctggcccatgggttatccccaagttggcccacccaccaccacctcacccaaccaccatcaccaccatcaccaccaccgccactgcagcagctgcagcaattgcatcacctgccagagtggcatcagtggtgcccaccaccaggacaggagtggctgcagtggcagcaccaatccaggtcattgcagccaccaccactccttttggcctgccaatctccaccattgccatgacctccaatgccaccactgttgcacaaccatcacttccactaccatggtaacaaaaaaaacaaccaatagagtggtggaccactagagcccaaggccttctccaaccagctatgcatttcaagagttcaatccagaccttcacctgactgtggctgactttcaacataacacagtaactgacctgtttgccagtatgtaaaaccacgccctgagctgtggtccttttagtttgctttttgttttcatcctcaagtggcttgatattgcctgtatgtaaaaccatgccctggggtgtggtacttttaggaaggagaaaaagcaaactaaaagtaccacacacacacacacacacacacaaacacaggcaatatcaagccatgtaaggatgagtcacttgaagaattctacagacattttgaaagggcactcaatgtctcatatgcagtcatggacacaaactacaacaggtaactcacaaggaggatgacaatgccttcagactcaatgccctccctattcccagcatccaagacagcaaatgacactgctgctgcccacttcccaagtggatggtgaggctgacaatcaacaatgataagtgggacaaacaactnnnnnnnnnnnnnnnnnnnnnnnnnnnnnnnnnnnnnnnnngtccctccaatccatccatgtggccacacccaccaaaagttgtccatgccaccataagggtggccaagggatagaagtaccttgttgacattgtcattgttgacatccaaagacttgagttgagagaccaacacaagcacccacactgcactgtgatgtggcccagccccacccccaaaagttctcaccattgttgtaatcatcagccagatggtctctgtggtggtggtggcaatagtggccaacaagacattggcaagagacagacagccagaaggacatgtggtccaaagtcccaagaccaaccatccatccatctgcactgtggggctcatcaatccaagacccattgacccatccataccatccaggccactaaatgctgctcctgttgttgttgtggcttttggagacttggacaaatctggcacagatggaagactccactccacaaacaggaacatctgaagagaacccagtcctgacctcccagcccaatccatccatccacatcacaatgccatgtgaacagcatgatgctgatgccaacattggtggtggtgatagtggccaaaggatgatgacacaagcccacaccatactgtaccatgacatggcccaaaaacccaccaaaagttaacattgctgacattgtcaactggccttgatgatgatggtgatgacaatggcccaacaagacaacaatgggtggtggaagagggagagatagacaggatactgggtttagggttagggggtctagttcaggtactctttgaccttttcaatggtgctcataacatcttctatatatcatcttgatcgataattgcccatcattctagatatgcctttgttttttggcaaaaaaatcgttcaagcgagttttccgattttctttgattttccggaattattttttgtgtatttattttttaaatcaggccgacctcatgcaggcgacacgacatggttgtattcgtgtagagcaaaaatcaggctacaaaacaagtagctatacacttgaaaacagtatgccattatgatacaaggtcgtgtggcagaaagggttttttgtaatgtttggaaaatcacatggaggccaagaaaaatcataaaattctggaaaaaatggctagcccagtttttgaaggccttctttatggctatgaagatttgaggtggctaggcattgatacaagaaagctgtttctttagggtatggtgtgggcagatggttgcttggccttgggaccttggaccacccagtgcccttctgtatgtctcttgctaatgctttgttggtccactgtccctgccatgagactgtctggctgacaatgacaacaacaatgacaagttggctggggccatgctgcagtatgggtggacagatggagaggttgttggccattgccagtaatgatgatgatgatgacaaagagaatggttcctgctaaagttgtccatccatcagtctgtgctgtctgctcattccattctgagatccaaggttcgtccatcagtccgtccgtcccatgtctgcaacatttggtggcggctgaagcacggacggaccaatggatggatctggaacgggtttgggtttgggg

SEQ ID NO: 130 - DNA, 21152 bp, unidentified
  source 1..21152: mol_type = other DNA
  misc_feature 1..21152: note = Fanzor polypeptide
gccggcgcgtcatcctcgcctccgacatctaccgcgggatactccttcagccggtctttcaggacaaccccatccctgatggcctcacccacgccaacgtcatggaccggtggagcgaggccggcggcatgttcgccgtctcactcttcaccgacattgccgtctttcgcctccttggaccttccctaatgttgtagactagtagaccttatttgttgtttgttgttagtcttattctcccccagacagactcgtcagctcgtgttacagagacgagtcagcagaagaggagagcaggcattggggacctttacacaccgcgtgtaaaaaaaatcccgcgaagtctgcaaacgggcttttctgtacggtcgcggggcccatctctgccctatactacgtatacacttatcgctacaacatacgcgactgctgcaactgtgtgccgtacccctcaacttcaccggacttgccattcggctgtgaaaattcctgagatgcagagggcactcgtctcaagcggatgcgagacgaggctactctgctgacagggagatgaccgtagagagacactcaacaataacactgaatcgagcgtagattgcgagatgtgagcggtgaagaagaaaagagaggggagcccgagggcgagctacgacaaagtgcgcccgagatcctcctccaacctccacttgccgcctcatccgaataacgtgtcgtcgtcttgatcttgagcccgagagtatggtagtagtctagggggagagatcaagtcagcgagggttcgaatgaaaaagcgagcgagtgaaaaggacttagatctggaaaaggccttgaaggagcgagagcgagacgagtctgcagaacgagtcctagcatgagacttaatggacgtagcgagagcgccacgcgttatatgactccgcctttagcaatcgccccactcccgacgttcagaccattctaaagacaggcaccctctgtgtcgcttgtacttacgaggcgctgtacggccgccgccaccttcttgtcaataactgcagtcggccttgcgcctgagaaggtcccgttctaacctctgcacacggccctacacactgtattcgggtaagataagagctggaccagaatcaagcgggttcaatccgctatatctgtccaatttttccgcagatttgcgttccgaaagacacagaacctccgtctcctttgaatcggcgagcggaatcgccttgttccgtcggaagcatgtcccatatggccgctttctgcttcattctgctctcaaaaggtaatgccaagtgactgaatgccgtagtcagtggcacgaatccctcacgagtcctccggcaagtattctgtctcgaagacgattttcggtgggtggcggagtggcggcacccaccaaaagcgctcgattgcttttagcgtgtcaatacggagcccataggagtcggcgttgtagtggtatgccgctacagctggtagctccagatatcacccgttatgcagctccatgtcccactctatcgtatatgcgttgaccgccttgattgcacgcatttgtgtctcatttgcgtatatagctcaatttgcacagaacacttgcaatacgtgagtaacgtagcggttaaagtgttagcgttcggttcggtatacactttttgtcagccgagcgttcgcttcccggtgagagcatagagacaacggttctgcgttcagacggccatacttatcgcacctcctctcagacgctacaggctgctcagacaccgtccagatgacccaagtaagccaggccgttcagacgctgtccagactgatgaatccctttggcacggttgctgatcgggccgctggcgccttggaaggccgctcatccaaggagatcttcatcgagcactaccactcaatgctaggacatcagtccgatcgaatcctgcgacactacatgcgtcagcattactggtggccagaaatggtgaaggaaatcgaggcttactgccgaacttgcgcatcctgccaagctagcaaacccgaacgagccgcaccgagaggaaagctacaccctatccagctcccgttcacagcatacgaagagatttcgattgatttcaccggaccgcaccctgtcagcattgatgcggacggaatcgcgagattacattttcaccgtgattgacgccgcctccggagaagtcaagctcattccgtgcatgaaggccggtttgacgagcgcaaaatgcgcccaaatcttcctcgagaaagtgtacccgcaatggggtactccgaagacgatcctgtcggaccaagacgtccgctgggtttccgcgttctggaaagcgttccacaacgctctcggaacgacgctgcacgtgtcaaccggagcggccccttgtcgagttggccgccgctccgattggccaactcggccgctccggccatctcgacaggggatccggagcttgtcccggcggccgctgcgatggctcgattccatgcagctgatttgttctaccgagcgcatgcgagagatttacagtcgaccaccctatactaccgtgatcttgtggcgcgcaaggggcgcggtgctgcgcgccgaaatctgtatggtattctcaaactcaaatgatccggatcggctggcgcggctgcaagaggcctccacttgattggttgcctcgagaacttgaagtagtcgctagatacggttgacttagccgtttaaatacaagctatagtctcgcaaatagcgatagggaggagaatagctaaggacagctagtgtcggtagaattcgcccgagggagaagaaggaagacaaaagtcacgacgagaactacgctcagagtgcggagaccgcgggtacatgtggggggaccgggacaggtacatagtcacgatggagatcacagaaaggccgtgcttgtcgatccagattcgagaggcgagagagggcaggaagtcggaggagcgaaggatgatcgcttcgctcagaggtgtgacttggcgaggtgactcagagagcgaccctttttagcggtcgcggcggcggtgcctttgcaggtacgcttgcggcgaaccgagatcttcgcggaggtcgtttcggccgtatagcgcgggagcgaggcgttcgcgagacgaggggatcgacggagcttttggggcgacgacgccacggcgaccactcccggcatgatcggctgttcggcgcgtggggtgtcatgacgaggggtaacgggagcttgatcgacctccggcgtcggtccggcgaagtgagcggcaggggcgaagagttcgggagattgagcgcgttcgtccgcgtcgctcgagctcgtcatcgacggcgtggggccatcgaagagacccaatcccgcagcgttgatcaccaccttgaggtacgcgtcatcgagactccgaatggcgggttgtccgggttgagcgggagcgtgaagggccaagtcgagatccggcacgaaaggttgaggatggtgttccccgctcgagctcgcgagcgcgttccttccgtagaggtccgcggtgccaaagccagggctatcgaggctgccttcgcgaggagagaattccgggctagtgacgggcgagtgcgtaggccgaaaaccaggcgaaggaggggacttgcgtccctcgtcggcccagcggacgaagtggcgggctgacgtggcaggaggaggcggcgcagccgactcttgcgagggcgcggctctcgcagcagcgctcgatctcgctcgcggcagcggcccttcgcctcgtgctacacatcgacaccgacgactgtgcaccccagggcacccgcccgatctctcgagtacgcccgactccgcttttgaggactcgacggcaggacctttgtcgacaacaatgcaagttggaggccctctccgctcggtcgcatgggcagcgacaccctctcactcgagagtccgcgcgcagcatgcacgcagggcaacgacggcgttcttcgacggcataggcatcatcaacctttgcccgagacggccgcaggcgctgcgatccgtcgacgatggcattggagggaggaggcgccggcacgctctcggctcgctcgggaggcgtcgtatcccaggtgggcagattccttttgagagacgcgtgtgaagagtaacatgtgctgatgcaaagactacgatgtcggcaaaaggcgaccgaccaactcggaccttgagactcgaactgtgggcccgctgcactcagaccttgggtgggtccgacccaaggtctgagtgactgaggggcggcttttggcggcatgcctcggttgagatcgagatcgcaacaagggttgctcagcacaggcttgttcgcggagatgaactgactccgagttgcaccacagtgtagtcgccgatcgcgtgacgaaatgacgaccccgacaccgctggtgagaacgttgtgccaaaaagtatccgcgggctttcggtcgctgtttcgccgaagcagtacgccaatctgacgcgcgtgataccgcactcggttgttccaagttgacgggacaagaggctcagaatacaaggcggtatgggtggcaagagtcgcgggaacgggtgggcgtgcgagcctcgaaggcaaactgctgcaccaagtctgcactgactacgtcggtacgaagagacgtgtcacgtacggtcaagaggatgagatcgaattcaggggcggcggggtattgatcgatcacacgagatcgaaagggaaccgtctcgcgctgacccggttatcgtcgtttcgaggctggcccagagccgcgaggctatcctgctggcgatgaatggctcatgcgcagtctcaagactgaacaaggagcccgcagtgctgatcgacgctcgactccggcgagcacagaagggaagccgctcggacgcggatgccgctctcgcgtgcaacatcgccacgacgcgcatcgtgatcgaactgcgaccttggtcgaagggcgactccagtcctgacgtgcgacggacaggcgaacttgctcgagctctccctcgtcgcaatggcctcctgacttaaaacggcgtgctgtcctcgtgaccgaccgtcgataagaggagcagatggcattgacggagctaacctcaagcgctcatcgctgactgcgcgagtgcgccattctttgctacgcttgctctggagcacgcgataagctcacaagctggcagcgggccgaaatcagagcttgagcgccaaagaacccgcatgcgacgctgcgaacggaacacgcgggtaatgaactgcgacttgcttcatgcgtgacagtcaccatagcgacgcttggagtgcccgcttggaggggaaaaagtcgccgcggacaccccgcgagtgggcggacgggcgaaaggacttctccctttctcgctctaacatttgcctttactgcaaacgcttgaaggagacctcgcctcgcaccaaagcttgctctaagcgctcatatcacccatttccaaccccgccggctgcctccgctctcaacctccgactctcgaggcgcacgaaccccttctcccgttgtcccctcgacgacaaccgccgaatgctgctgccgcgcacgcagctcttgcttgcgctcgcggcttccatcgtactcgcctcgttaaccgcccgcctcgccaactggacgggaacaggaaaacagcagtccttcggagtccgcggagccggcctcgtgcacggacccttgtgagtacattgagccaagttttaccgcgcggcaaaggaaactgatgcctacaatccacaacacagcgacatgggccagaagaccctcatggcgcacttgcggggcatcgcgcgcgagcagctccagacggcgcacgcgacgaccatgatggagaccgggaccggcatcaaggccacactcgggctggtcccgaggagctttggcggaagtgagttggacagctgcttactcatagccagcctcgactgaccagtggaccatcggaacagacgagtatgtcgttgtccgcgacctgaaccccgtacgattccagcttcgccaagggacgctccagtcggcgacgtgggtgagggacaagtccgccacgaacgtcgccaacaacctcgcagctgccgagcgagccaagatcgaagagatggaccgcgagatccgcgaggtcctgggcgccgagaccgtcatcatcaacattgtcgacggcgacaagaggccggaggcaaaggcagctaccctctccgaccgtcaccgtcgcttctcgcggaggcaccaccaggaatcgaagctgccctgcgggaagaagcgcgtcgagctcgaacagaccccgcccaacgactcggactggatccaccgcgctgtgagtcctttgtctggtccagtcacacacataacggagcgggagctcacgcaaactttcaaaacagggcgacgagaagacgatctactttgttgcgcccgacgaagcagatcgcctagtacagcatcttgtgacgcagtcgttcgacacaccaaagtacgacctccccgccaactctcccttcgccaacagcaacatcgatcggctcatcgacatcgtcaagcgatacccgccgtggcgtcgaattatccatacgcgcgacctcgatgcagtcatgcacacgacggcgtgcgaggcatggttcgtcctcctcacctcgtggtcaaaagtcgaggagggggcggtccttacctcggacgccacggtactcgaagacatgctcgagccgtacgttgccgagggagcgcagcggctgcattccgtccagcgcgatgtttctgctgccgctccctctgcaccaaggactggccgtggcggcgccctaggcaagaaggcgccgctgccagctcgtccaaacctccccgtgctcttgactcagctcggcgcacagtcggcattccgcccaacatccctcgacagattgccaaccgaacgacgccggggcgatacaatcgtcgtctttctccccggcgtcgacgctctcccaggcttcggcagagatcaatgtcgccgtgcgcgcgtgtcgagccttctgggaaacgactacaccggcagcggcatcaaaggcatctcttgggcgctcgtctcgagcggtctcggcgagtctttgctttcgatgagggaagaggactggtccgaccctcaaaagctcgagtcgcaggtctcttccctcgtctccctcctcgcctccaccgccgccagagccaagacgtggcgggctggaggcgactttggcgaggtcgccaagatctcgagcaagagcacgtcgatcgggcgcgagcagatcctggacctgatcgagtcggtgcgcgttattcgaggtgagaacgtcaactacgtcgcctcgacgttctaccacaacggcgatccgcgcggacccctgcagttcaagcaagctccgccgtcgactcgcccaaatcgctacgacgtcgactcccgccagccaagccatccctacctctctcgcccaggtccgcaacacgtcgtgccacaaggtctgaaccagtcgccgacgctgccgacgagcatcgtcaacccacgcctctcgaacccgctacaaccgtctcggacggtgcccgctccgggcgagaccgatccctcccgtccaaagatgtcgaagattcgtgttcggccgctgcagatgggaggaagcgggcagagcgtgttcatggctgcgcgaacgcatggtcccgagctcactcctctcgacgacaagaccatcgcgcgaatcatacaagcagacgccagccttcctgtcgaggtcaacgacgacgacgacgcggtcgactcggaactggagattgttcccgaagatgacgacgacgacgacgacgaagacgacttcacagcagtgccaaagcaaaaaggaaagctcaatcgtgtggagtcgtactttgcaacgatcacctcgccgggcaagaaccatgccgccgcgagtcgcaagatcagcgacatcacagagtcgccccgaccagtctcgaccgcttcggcttctgccaacaatgccggccgcagcggcgcacaacagaccgccacgcgtatcacgcgtctcacatcggcaagagctcctccgccagaaccgtcgaggcgcaaagatcgcgaaccagtgcccgcgccccggcagacccgactcgcggggaatcccgcgatcaccgaacaagaggcagctctcgcatcgccagacccgatgctcctcatcatgtcgctcgccgtcaagctcgggaatcgctttgtccacagtgcgtttgcgttcttgctggaactgctgctggaacagggggaggcagggatgatggcgacgagggatctgctactccagcggaaccgagcggcgcagtgcctcggtcgtcttgctgctggcggagcataccgtgcggcgggggagcagtggttcccgcggcaaacccttgttatctctgagctggagaaggtacgtccggtcatacggtcagaatcgagatggacaagagaactgactacagtctctgagcaggaggccgtcaactcggccctcgcctccggtctcgtgcctcctcctcgactctcggtcaaggcgttcacaatagcctacgctcccttccaaaccaacctgaccgaatggccgcgaacgcacacgcgagacgaactcgtcaacttgggccagttcgtcgcgcgcgacctgtccaagaacgcagcagaagcgctgagcaaagtcctgcggaaggcgcacaaggcgttctcgctcgatccggcatcggaggctgccctgcagtcggcaaacatcgaggcttccgctcgattccgcgcgggcctcgggaactggttgggcggggtgctcgcgactgctccgttcagccaggcgtcggctcacgcaggcgccgcgaacgaagaggacaagggactgccgagtcgagaaaagaccacgtcgtacaacttgcgaaagggcacgaccggcaagagcggcgacacgcttcagcaacagcacggcctcggcccgaagatcgacccgactgacccgcgcgaaccccccgctctcgacctcgggaaagagaccgaaaagtcgctcgagcagatgatcaaaaagctcgtcgactcggtcccgcctggcagcatgttcaatcgatcagatatgcatgacgcgctactgcaagacatcaccacgatcgcgcagcgccttctagcatgccgggaccggcatctcgagatggcgctggtgctgctcagatacaagaagatcgagaacgcgacgaccatggccttcgacgacgtccttgcagggaaaatgccagagatgggggccggaacgcttgccaaggggttgctagctctggtgatgagactgcgacagatgagaacgctatcggggatcgagctcataccggtgagctgactggcacggcggcgtcgagcatagtcaaagggagactgactggcttgtccttttgacagtatttcgacccgcaatgggtcgatgtagacctgtacaccctcctccagtccggccaccggcaccgcttcaaggtgctctgcacagatctcgaaagaacctgtaccaagatcgcatgcggcctcctcccgttcgtcgatgaagacgaagggagaagagtcgagctctttgacctcttcaggcgggtgttcgaagtgtggcggattgacgaggacgaccccgacaacagagacaaggactcgccttggtcctggatcgaggccgagaggacacggtcgacgagcatccgcctggtcgtcaagaaggagagcgtgtccctcgtcgccaacctcgatcgggtcctgcgcattgtgtttggcgtggaggagaccttctacacctacatgaggcggaccggagctcaagtcgaggtgatgaaccagctcttcgatcatcgaatgttgccgaacaagttcgttcccaccgggcacatgcgcatgtcctcaacaaaggtccagttcaccggagtcgacattacgaagatgaccaaacttggacgagaggcgctgccggagaagagtatggctgtctgatgccgaaaagaattgagctgcgctgactcgccctacccagatctcgacgcaggaaccgcatgggcgcacgtctcacaactaccgctcactcaactgaaggtcaaggagtactttgccaagatgatgccgtcctttcagcgtcgcgtcgtcaacggcgagatcgtgtttgtaccgatcgtcgccatcgcaaaacccgacgcagacgtgatgctctcggaacggcgcgatccattgccgcccagatccgctcctcaggaagggctctcgcgcaaagagcgacggcgcgagcggcagcggcaagacgccctggaccgagatcgctccccggtcgacctccgaacgccggtacgcgagaaggcgccaccaagtcgaacgcgaaaggggataccggtgtcttggccaaacctgcgattcgaggggggaaggaagttggtcaatgactttcttggagacaccccgctcgaccacatccactccgccagcatcgacaccggcgtcgtctgtccagtcgcgaccttcatctcgaatccggttcgggacggcttaccaacgcagcgtgccgaggcggtggcgacctattcgcgtgagactctgctcacccagcagcgtcagaccagccgccaagcttcacacctcaactcgtatctgtcgaaccagttcgactttacccgatgggcggatccagcttccacagatgttcgagcgtcgggtacgtcgccaatgccagaaccggatccgatgcaagaccctctgctggtgaccggtctgcacttgctcaagagcatgcactcggtcttcgacgggcggtcgatccagagcaaggtcgagcgcaaggccgaggtcagttcggtggcatctcagcacgtcgatctgatattgggtggcaaggatcgctggaccgaagaggaccgcaagacgcgcaaggtcgttgtcatggtcggctcagcggacgatctcgcgaaatcttccggaatgaagggtgctgtcaccgccaacgtccttgtgcgggaaatctctgccgagctcgcgcgccgcagggtcaacttcatgatctgcgttgttcccgagaactacacatcccaacggtgcccgaacccggactgcgtcgatgcgcagggtcgccgatctcggtacgtttgctctcgtgtactctgagggtgatgcagctgaccgactggtgatctttggggacagagcggagaacccgcgtcaccagggtggaggaccaaactaccgtctcctccaatgccagcgatgtagggcggtcttccaccgggacagagtcggggctgccaacattgggagtatggggtggtgcctgctgcggagtgggttgcagctgtggggggagaactggatgggaccaggaggaaaaaaacttgcggaagcgaaaaatccctaaaaaaggggggatcaatgggatctacttgtagaaccctcgctttctccgtgatcaatctgacttctatctcctgtgtgcggtaaccacaaacaggcgcttgcgcttgcgcttccacgtccgcaaagaggcgcttggcgcttctgctcccctatggccccggcctgcttgagactccgtgtgtggactcgcatggtacagatcgacgggtctgaccgttgagaatgccggacaacgcgccggcgcgtgcgacagagcgcccgaagctttggagccggatcgggattgccggatttctcccctctcaacggtggaaagggcgtctacagatgcacatgtaccccctagtctgatcaagcttgcaccccgcggttctgccgtatccaacggtctgcgacgacgctggcacaagggcctttttcggcgaaagaggcgcttctcgcaactcgccgacggttcccgcagggatgctgggtaactctgggacggttgtaaccttcaaatggactgtatctaccgttttcaacaccagaatacgttcgtgggagaggcggcgaggccgacgactgccctggccgagtcttggagcacccgccccggcctctgcacggtcgaaaatcccaaaactctccctcatacgaccaaaaatcgtcaccgagatgctatgcttgatgtacggccccgcgccgagctctccggaacagtccgggacccaattcctgactttctcgccactcagtctcagtgttccaacttctaagcgcattgtgggtctggttacttctttcatcttgttgacagcatcagaactgacatgtaccatgttgacggattccgtcgtatcttcagaccgagctggcaaacatgattctgagccaggaaaagccggtgagttcagtgtgatgaagccatggcttgtcctgaacagttctctttgtgaatgcattcttctgaaatttgctgcttacagagaaatgactcggccgagggccggcaagcggtgagctcgagacttccaagccgaagaagcgcctgagccctctgctcaacactctgcagagccgagcaagggcagcggaccgcatgcgataccgagagcagcattgggagttctgaatgcgagaggtttgagagcccctcaaaggttgtctgaggaggagggaagaggaagagggagaggtggcaaagccggcttgctcctttttgatacgcgagcgaggtgcagcgaccgcggtgtctcttactcttgcgacactgcccacgggccgcttttcgagaaaggtgttccggcggcggccggccttaacaaaaccaaatccaggacgcgcgagaacgctcaagtcgagacaaggagacgctctcatgcgcgagggcactgaccttgacgggatcccagccctttgaatgcgctacaaagagtgtgtttcccagtgtccagccaagcaaacccgcggctgcagctgcgaggtgcgcaagttcaggagaaggtgcgcaagttcaggagattccaagacgtgacctcccgttgttcactcgttcgcacgcgtccaccaggttattgtatctgcaattttagctcgacggagcgaagccctgctcatgtatttgactatggagcatttgactgtgctgcattgcccacattcttgcagacacgggcaagtcagagaagaagaaaccgagcgcgagttgcgccacccgcaaataccctccggactgaaccgctgaagggccgacgacctgtccctgaccagtagaagtgtcgggatcccttgacttacgaccagcaggtcttgcatgtcgcccagaatcgtcaaaactgattcctcctggttgcgctcaaaagccggatggtcaggccgtgtagacccaaatcgcctgaaacttcgcaccctgggcccctataggtcaaagtccagccggccacaagctcagcccatttcaacggcggtagaggtctgccgagcgaggcgcttgtgggaaattggactagagctgtaagccttgtcgtgcagcatatcgacaatctgaacggtcaaaataatcgtgaaggtgtttgaagctgttcaggcgaaaaagatatccatagagcgcatgcttgctgagatcaggcaagcgcctcttagttgtaattaccgtcgtgcgtgccagttccgacccagcctggctcaccagctcgagatacatgctggatcgctgacccttgtgctccgcccccctccagaatcttcttcttcggtatgtctgcagcggagtctgaagtcctcgacgcgaagttgccaagtcccccaagatgaaaattaacgttcttttgttcgtgcaggatatgatcaaggaatgatgggcggcgtcaacggcgctcttgactacgtgaccacgatgggactgggatacgtcacgccgggcgtagatggggccaagccgaccgccaccgtcacgcagtcgacgaagcaggtgagtcgtcggcaacgcatctatcttgtttttgtcccgccggccacgatacctttactgaactgctgtttgcatacagggaggaatcgtctcggcctactgtacgtcccgatcgtgtctccttcccgttttcaacctgacaccggtttctctccagacctcggaactcttttgggatgcttgctcggcgggtggctcggcgataggctcggtcgcaagaagaccatctggattgggtgcatttggatcactatcggagctcccttgcaggtgagtcggagttcactcttgccaccgttccgaaagccgcgatttcactttcgccaccgttccgaaatgaactcccgccaccgctccggaagctggcgctgacctccctctctctccgacaggcagctgcacagaacgtcccctggatggtcatggcgcggatcatcaccggagtcggcacgggccacctcaacgcgatcgtcccagtctggtccgccgaaacttccggtcatctctctcgcgggttcttcattgcgcttgaattcacgctcaacatattcggcgtggtcggtctatggttattcattcgtcttctgacccgcgtcctcgtggctgacgaagttgattcaccgccgccccaggttgtcgcatactggctcggttcgtttctcccgcgtctattgccgaaggagacggcgctgagtgaacgcgtcatacagagtatggactgtccttcatcggcgacgggaacacccagatccgctggcggttcccaatcgcgttccagctcgtgtaagtttcgcttacccgaccgtcgcagcagatcagacatactgatgtacgccggctctatagacctcttctcggcctcgcaatctgcaccttcttcatgcccggtacgcatttcgcctttttccggagcggacttcctcgctgactctcccgacaattgcagaatcgcctcgatggctcctcaaggcagggtatcgcgacgaggcgctgcatgtcctcactcgcttgcgctccgaagacggtcagatcaacgcggaagcccaggccgaatttgacgagatcgaccgagcgattcaaatcgacggtgcggcagaacccggctacatcgacatgacattccgctcgcacggcaagctgcatctgtcacgaagggtacgtcagattggcaaacagcgatgaaagctccgactgaccgaatcgctgttaccaacagactcagctcgcgatgtgagatcaatttgtctcctgctttccgttcctcgcgctgaccttttctctcgttctcagctggatccagatccttcaagagtggggcggtatcgccgctatcacgggtgagttccttatcgggctggtcggacgagaaaagcgcctgacgattcttttcccttcagtctaccaaccggtcatcttcggtctcgccggcttcgacgcttcgaaggcaggctgggtatcgggagtcaacacgatcacctacatgttttctacgtgagtattcaccttctccttgccacttggcgagacgtggtcgctgcaactgagtcgattttcttttgcagtcttatctgcgtcttcactctcgaccgtatcggtcgccgtgtcacgctcttctggggtacgttccacttggtcttttctttcttcggcttgctcttgaagcgatcactgacgaaacatgaccatgcgcaggcggcgcggttcaggctttcgcgctcatcatggcgggcgtcttcgtccaccttctcaccgttcaccccgaaaagacggctcagtacggaggtgctgctaccgctatggtgttccttgtgcgtcaagaaatgttgtctcactgtcacagactcggaatttgctgaccgggtctttcttctccagtacaccgcaactttcggcgcaacttgtgagaagtctcgccgcttcttctttgagcgaaatgaacctgacctttgtttcactacttcttaccgaaagggctcaccgtaccctggatctaccccgtgagtggcgatgccttccgccaagcgtagtcttcacattgctgacgccactcgtcttcaggccgaaatctggcccgtcaacgcacgagcgaaaggaaacgctatgggagtcgtcggatggtcgatcggtaacggatggtgcaccctcctggtccccgtcatgttcgacaagattaaggaggtcagtcccggtttttttgccgtccgtcgtcttcgctctgcctcaggtatgctgactgcctgcggtctacagaatgccctctacatcttcggcattgctaatattctcgctatcgctgtcgtgtgggcattctaccccgagaccgcgaaccgcactctcgaaggtgcgctcgtccgttcctcttccaaacgctcgcaaccccttctgactttcgagccttgccgtcttcacacagagatcgacttccttttcttcagcgacagctggttcgtgtggcacgccgaggcagagtactcgcgcctcaagaaggaactcgaggtcaccggcgaggtcccggacgatctcaagacgtcgacccacctcaaggagaagatcagcctcgacagcgccgcggcttgaacacaagagcactttccgtcggttctctagactcgtgtatatataaattctttgcctcgatcttcgcaatgtaccttcttgatgggagttcggtcctttcggtccttgatcctcttccaccttagacacattgttaccatgaggcgtctctccacgtcggaagtacggcacgctgccaacagtgcgggcgatgcgagataattgaatgggtcgcagagcaacttatgaagtctacgagatgtcaacattgacgcgattgacattcgggcgactccccgcttggcctcttcgctctcacccggcacgccaccgccacagtcctggggcctgcaagggggtcaacgtccttgcgttgcttgattgagaccggctggacgtgaaacggacgcgctctcaagcggcgccaccggcgacaagagatccgtgctggacgaggaccgtgtcgtcaaacctcgagcggtcgtgacaagatgcctgtggtcaccaacccgatcacacccacgctgagcgtctctgaactacgggcgctcgcgaaccggcacgcgctgccgcccatcgtggattctcaactcgccaagacggtgacgctgcgcacgacccgcccgcttcgcgcaggcaagacgcgccagtacagtctacccgaaatcgactttcaactcttggaggccttgggagacggcttactcgaggcgagcatatgccgagtcttgtacacgaacgtcacgagtcgggctgaccgttccgcagtgctgttctccgtgagttgggtttgcgtggtctttactgccgttcagggggtcgcgtggcttgttagggtatgctccccatgcaggcttatcggagtgtactccgcaacaatgggctactcgcccagctctcgcacggctaccgccttcatctgacgatgtcgccgcctctcgaccccgcgggcacggcagcaggcgcgccgttctcggtcagcgtgaccaagattctcgccgactcgttcgaagcatacatcggagggttgacgcaggcatcgggcgagcaagtcgcgaggtcgtggctcgaaccactcttgatcgacctgatgggtctgatctatccggccgtggaaggaccggatgcggtttcccgcggtgagtgtcaaagatgcgctggcgttcccgcgctgcagagctgaagaccctttcctttttacaggccagcgtacgccccgtaccgaaccgaacgccacgcctcgcaccgaacccgtcgccgccgaacccgtcgcccagcgacctccgaagcgtccgcgcgacgacgcatagcaaacatggcagtgtcgctcttctcttttgcttgcttgactagcttgacttcgagcctgtgtgaattcgattcgaacagcaattctgcggcgagcttgcaccaagtcaccagagatccagaacgaaagagagactggctacgagagctgtcttcgttcagtggcttttggggtgccaagagtatagtagggcgtagaagaagctgaaaagagggaccgagaaagaacacgatgacaactctgtccatttcgctacacacgtctgcaaacccgttctacatgctcgtgtccacccggcaaagctcagtcgcgaccagcgcacacctcgccacgggaaaagatcccgagattgtctatatgatatccttgaaaaccggctcgaaacacttgtgtccttcagtggaagggcacgttgcgaatgcgaccgcccgagccaaattgccggtgcggcagcgcgacttcaaggtcgcgacgaacgcggcgagtcaggcgcttcgagtcggccttggcgagcgagcaacccttgaccggtccggggcagacggcgtcgatcgagcccgacttggtgacggcgttggtgacgcactgctggacctgcgagatgcacgagacgtacgcagcgccgtacgaagtctggttgttgaagaacgactcgagcgacgagttgagttcggcttgcgtgaggttgtgcgcgttcgcggtcgagttgagcagagtggacgagtagtcgacgaggtcggcgaagaaggacgaggggaggtagccgtcgtactgctgtgcgatcgagaggatcgtcgtctgcgtgacgacgggagcggcggactgggtgatacattcctgagcggcggtggcgttgccggctgtcgagaaggtcgacttgggtcagctcattggatctcgaaagaagggcagaaggtcatcgagacgcactggatatgagttccgcagcgcacgactgcaagatctcggcggcggtgaccgtgttgcccgagagcgacgacgcgaccgagttgatcgcgttcgagatctgggcgccgacctgcgcgccgagctgagcgctcggggtcgtcgcgttctggatgttgtacgagaggatgttttcgacgctggtggtcaaggaagcgggcaagacgccgacaaactgctcgaggacgccgttcatggccgtctggagcgtcgtgtaggctccgccgggcttggtgaagcacgcgagcgaggaggtgttgccggcctgctggatcgcgtccgtgtagcactgcgagacctgctcgagagccgtgaccgagttgccggacagcgaagcgatgaccgactggatcgaagactggatctgagtgacgagggcctgctccgacgctggcaagagagtgccgagcaagggcgtaacggcgtcaaagacggacgagaggatcgtgttcggaaggatgccgacgaactgtgtgcgttcaagtcagtacgagcgcggaaaggcggacgcgcacgcgatgaaagctcacctgctcgaggatcgtgttgagcgtcgcctggagaccagccgagtcgctgccggtcggagtcaagcacgagtatccggagggcatgccgcccgccgcgagaacctccgagagacacttttcgagcgcggccgtcgtggtggcgttcaggtcgctctggctcagattcgcggcggcaaaagcctcgtcgagagcctgcttgatgttgagcgaggcagtgacggcgtccgaagttgtgatcagagtcgaagtcgagacttggagctcggtgatgttgcgagtgacggtgatgtaaaccggagccggagtcggagcgaggagagccgagatggtgccgttggcggcgaccgctgtaccgttcacggatgcggtgctgttggcgacggcactggcggtggcggtagcagtgatgttgttggccaagatggtcgttacggcaggcttggtgtgggtgactggagggagcgattcgggatcagcaatcgcgcgagaaagaagacgcgaagaaaatcgggaccaactcaccggtgatggtagtcgcgctaggcttgccgacttgcttctggatgacgctcgagatggctgtatcccccgaaacgcgagtcagtaaaggtggaagacagcaaggatttccgcgaaactcaccgccggaaagggcgcccgcgactgccggcgggatgtacgagctgttggcgaacgatccgacggcttcggcggcacccttggcgacagtctgcggcgaagcgccccggaccttgggcgccggcttcgacttgatcttggacgcgttcttggtccacgacttggacgagccggacgagggagacttgggcttggaggcggtctgatccgacttgttgacgacgggtgcggcgttattagagttgtcttgcgaggaggaggaggacgacgagcccgacgacttggacgacgacgacgacgacgacgacttgtgggaagcctgcttcttcttgctcgacgatgacgactttttcggcgacgggttgacgagcttctgaacctcgggtacggtgtactcgcccggcttgtggatcacgcccgggtgatcggagcaaggttcgggcgaggcggcgaccaagagcgcgagtgacgagagggcgagcgaggtgaggctgaaggaacgcatgacggagtcgagttggtcttggccggtgtgtgtgagggggtggtagtacgagggagtgtgcgacgcgtcgggtgaaaggggacagggaaagaaagtgtgaaggtccgcgggacgaagcgagcgtaaatttaaaggaacgagtggaaggtccgcgggcgaagtgcgcggtgggggtccgagagccgctttgtgacgagagtgcaggaaaggaggagatggagaaggagagaaagcgagaaagagagaagggcgcaagacgcgaagaaagtcgcgtcgcgtcgtaaaagcgcgccgccgaaagattcacgtgcgcgtcgagatgatcggatcggcggccgacccgcatgcattatggccatcgcaactgtatgtattgcgaggctgcaaagcacacagagttgtacagaggccgagcgagcatcccgtccaacaaactcgggtcggttccagcaaatcgctcggagcgactcggaaggcgaggtaccagcgtagcctcagccacaggggacagcggactccgacgaagcctatcaggtcgtacgatgaagcatagtcggccggtcgctgagagttagagcggcggtctatgtgctgttccagggatggccttggatgacgtcggcggttgagctgcctggtctggcgaggacggcgggccgcgtgctatggcgaggagaggcatggtacgaataactggccgatgtgtccccgcagcaggcagtctagccggttgagtgatccggagcaaagtccaacaaagtcgaggagagaaaaagagaagcgtcgctgctcccga

SEQ ID NO: 131 - DNA, 21152 bp, unidentified; identical to SEQ ID NO: 130
  misc_feature 1..21152: note = Fanzor polypeptide
  source 1..21152: mol_type = other DNA

SEQ ID NO: 132 - DNA, 21152 bp, unidentified; identical to SEQ ID NO: 130
  misc_feature 1..21152: note = Fanzor polypeptide
  source 1..21152: mol_type = other DNA

SEQ ID NO: 133 - DNA, 21152 bp, unidentified
  source 1..21152: mol_type = other DNA
  misc_feature 1..21152: note = Fanzor polypeptide
acgtccgcgccggcgcgtcatcctcgcctccgacatctaccgcgggatactccttcagccggtctttcaggacaaccccatccctgatggcctcacccacgccaacgtcatggaccggtggagcgaggccggcggcatgttcgccgtctcactcttcaccgacattgccgtctttcgcctccttggaccttccctaatgttgtagactagtagaccttatttgttgtttgttgttagtcttattctcccccagacagactcgtcagctcgtgttacagagacgagtcagcagaagaggagagcaggcattggggacctttacacaccgcgtgtaaaaaaaatcccgcgaagtctgcaaacgggcttttctgtacggtcgcggggcccatctctgccctatactacgtatacacttatcgctacaacatacgcgactgctgcaactgtgtgccgtacccctcaacttcaccggacttgccattcggctgtgaaaattcctgagatgcagagggcactcgtctcaagcggatgcgagacgaggctactctgctgacagggagatgaccgtagagagacactcaacaataacactgaatcgagcgtagattgcgagatgtgagcggtgaagaagaaaagagaggggagcccgagggcgagctacgacaaagtgcgcccgagatcctcctccaacctccacttgccgcctcatccgaataacgtgtcgtcgtcttgatcttgagcccgagagtatggtagtagtctagggggagagatcaagtcagcgagggttcgaatgaaaaagcgagcgagtgaaaaggacttagatctggaaaaggccttgaaggagcgagagcgagacgagtctgcagaacgagtcctagcatgagacttaatggacgtagcgagagcgccacgcgttatatgactccgcctttagcaatcgccccactcccgacgttcagaccattctaaagacaggcaccctctgtgtcgcttgtacttacgaggcgctgtacggccgccgccaccttcttgtcaataactgcagtcggccttgcgcctgagaaggtcccgttctaacctctgcacacggccctacacactgtattcgggtaagataagagctggaccagaatcaagcgggttcaatccgctatatctgtccaatttttccgcagatttgcgttccgaaagacacagaacctccgtctcctttgaatcggcgagcggaatcgccttgttccgtcggaagcatgtcccatatggccgctttctgcttcattctgctctcaaaaggtaatgccaagtgactgaatgccgtagtcagtggcacgaatccctcacgagtcctccggcaagtattctgtctcgaagacgattttcggtgggtggcggagtggcggcacccaccaaaagcgctcgattgcttttagcgtgtcaatacggagcccataggagtcggcgttgtagtggtatgccgctacagctggtagctccagatatcacccgttatgcagctccatgtcccactctatcgtatatgcgttgaccgccttgattgcacgcatttgtgtctcatttgcgtatatagctcaatttgcacagaacacttgcaatacgtgagtaacgtagcggttaaagtgttagcgttcggttcggtatacactttttgtcagccgagcgttcgcttcccggtgagagcatagagacaacggttctgcgttcagacggccatacttatcgcacctcctctcagacgctacaggctgctcagacaccgtccagatgacccaagtaagccaggccgttcagacgctgtccagactgatgaatccctttggcacggttgctgatcgggccgctggcgccttggaaggccgctcatccaaggagatcttcatcgagcactaccactcaatgctaggacatcagtccgatcgaatcctgcgacactacatgcgtcagcattactggtggccagaaatggtgaaggaaatcgaggcttactgccgaacttgcgcatcctgccaagctagcaaacccgaacgagccgcaccgagaggaaagctacaccctatccagctcccgttcacagcatacgaagagatttcgattgatttcaccggaccgcaccctgtcagcattgatgcggacggaatcgcgagattacattttcaccgtgattgacgccgcctccggagaagtcaagctcattccgtgcatgaaggccggtttgacgagcgcaaaatgcgcccaaatcttcctcgagaaagtgtacccgcaatggggtactccgaagacgatcctgtcggaccaagacgtccgctgggtttccgcgttctggaaagcgttccacaacgctctcggaacgacgctgcacgtgtcaaccggagcggccccttgtcgagttggccgccgctccgattggccaactcggccgctccggccatctcgacaggggatccggagcttgtcccggcggccgctgcgatggctcgattccatgcagctgatttgttctaccgagcgcatgcgagagatttacagtcgaccaccctatactaccgtgatcttgtggcgcgcaaggggcgcggtgctgcgcgccgaaatctgtatggtattctcaaactcaaatgatccggatcggctggcgcggctgcaagaggcctccacttgattggttgcctcgagaacttgaagtagtcgctagatacggttgacttagccgtttaaatacaagctatagtctcgcaaatagcgatagggaggagaatagctaaggacagctagtgtcggtagaattcgcccgagggagaagaaggaagacaaaagtcacgacgagaactacgctcagagtgcggagaccgcgggtacatgtggggggaccgggacaggtacatagtcacgatggagatcacagaaaggccgtgcttgtcgatccagattcgagaggcgagagagggcaggaagtcggaggagcgaaggatgatcgcttcgctcagaggtgtgacttggcgaggtgactcagagagcgaccctttttagcggtcgcggcggcggtgcctttgcaggtacgcttgcggcgaaccgagatcttcgcggaggtcgtttcggccgtatagcgcgggagcgaggcgttcgcgagacgaggggatcgacggagcttttggggcgacgacgccacggcgaccactcccggcatgatcggctgttcggcgcgtggggtgtcatgacgaggggtaacgggagcttgatcgacctccggcgtcggtccggcgaagtgagcggcaggggcgaagagttcgggagattgagcgcgttcgtccgcgtcgctcgagctcgtcatcgacggcgtggggccatcgaagagacccaatcccgcagcgttgatcaccaccttgaggtacgcgtcatcgagactccgaatggcgggttgtccgggttgagcgggagcgtgaagggccaagtcgagatccggcacgaaaggttgaggatggtgttccccgctcgagctcgcgagcgcgttccttccgtagaggtccgcggtgccaaagccagggctatcgaggctgccttcgcgaggagagaattccgggctagtgacgggcgagtgcgtaggccgaaaaccaggcgaaggaggggacttgcgtccctcgtcggcccagcggacgaagtggcgggctgacgtggcaggaggaggcggcgcagccgactcttgcgagggcgcggctctcgcagcagcgctcgatctcgctcgcggcagcggcccttcgcctcgtgctacacatcgacaccgacgactgtgcaccccagggcacccgcccgatctctcgagtacgcccgactccgcttttgaggactcgacggcaggacctttgtcgacaacaatgcaagttggaggccctctccgctcggtcgcatgggcagcgacaccctctcactcgagagtccgcgcgcagcatgcacgcagggcaacgacggcgttcttcgacggcataggcatcatcaacctttgcccgagacggccgcaggcgctgcgatccgtcgacgatggcattggagggaggaggcgccggcacgctctcggctcgctcgggaggcgtcgtatcccaggtgggcagattccttttgagagacgcgtgtgaagagtaacatgtgctgatgcaaagactacgatgtcggcaaaaggcgaccgaccaactcggaccttgagactcgaactgtgggcccgctgcactcagaccttgggtccgacccaaggtctgagtgactgaggggcggcttttggcggcatgcctcggttgagatcgagatcgcaacaagggttgctcagcacaggcttgttcgcggagatgaactgactccgagttgcaccacagtgtagtcgccgatcgcgtgacgaaatgacgaccccgacaccgctggtgagaacgttgtgccaaaaagtatccgcgggctttcggtcgctgtttcgccgaagcagtacgccaatctgacgcgcgtgataccgcactcggttgttccaagttgacgggacaagaggctcagaatacaaggcggtatgggtggcaagagtcgcgggaacgggtgggcgtgcgagcctcgaaggcaaactgctgcaccaagtctgcactgactacgtcggtacgaagagatgtgtcacgtacggtcaagaggatgagatcgaattcaggggcggcggggtattgatcgatcacacgagatcgaaagggaaccgtctcgcgctgacccggttatcgtcgtttcgaggctggcccagagccgcgaggctatcctgctggcgatgaatggctcatgcgcagtctcaagactgaacaaggagcccgcagtgctgatcgacgctcgactccggcgagcacagaagggaagccgctcggacgcggatgccgctctcgcgtgcaacatcgccacgacgcgcatcgtgatcgaactgcgaccttggtcgaagggcgactccagtcctgacgtgcgacggacaggcgaacttgctcgagctctccctcgtcgcaatggcctcctgacttaaaacggcgtgctgtcctcgtgaccgaccgtcgataagaggagcagatggcattgacggagctaacctcaagcgctcatcgctgactgcgcgagtgcgccattctttgctacgcttgctctggagcacgcgataagctcacaagctggcagcgggccgaaatcagagcttgagcgccaaagaacccgcatgcgacgctgcgaacggaacacgcgggtaatgaactgcgacttgcttcatgcgtgacagtcaccatagcgacgcttggagtgcccgcttggaggggaaaaagtcgccgcggacaccccgcgagtgggcggacgggcgaaaggacttctccctttctcgctctaacatttgcctttactgcaaacgcttgaaggagacctcgcctcgcaccaaagcttgctctaagcgctcatatcacccatttccaaccccgccggctgcctccgctctcaacctccgactctcgaggcgcacgaaccccttctcccgttgtcccctcgacgacaaccgccgaatgctgctgccgcgcacgcagctcttgcttgcgctcgcggcttccatcgtactcgcctcgttaaccgcccgcctcgccaactggacgggaacaggaaaacagcagtccttcggagtccgcggagccggcctcgtgcacggacccttgtgagtacattgagccagttttaccgcgcggcaaaggaaactgatgcctacaatccacaacacagcgacatgggccagaagaccctcatggcgcacttgcggggcatcgcgcgcgagcagctccagacggcgcacgcgacgaccatgatggagaccgggaccggcatcaaggccacactcgggctggtcccgaggagctttggcggaagtgagttggacagctgcttactcatagccagcctcgactgaccagtggaccatcggaacagacgagtatgtcgttgtccgcgacctgaaccccgtacgattccagcttcgccaagggacgctccagtcggcgacgtgggtgagggacaagtccgccacgaacgtcgccaacaacctcgcagctgccgagcgagccaagatcgaagagatggaccgcgagatccgcgaggtcctgggcgccgagaccgtcatcatcaacattgtcgacggcgacaagaggccggaggcaaaggcagctaccctctccgaccgtcaccgtcgcttctcgcggaggcaccaccaggaatcgaagctgccctgcgggaagaagcgcgtcgagctcgaacagaccccgcccaacgactcggactggatccaccgcgctgtgagtcctttgtctggtccagtcacacacataacggagcgggagctcacgcaaactttcaaaacagggcgacgagaagacgatctactttgttgcgcccgacgaagcagatcgcctagtacagcatcttgtgacgcagtcgttcgacacaccaaagtacgacctccccgccaactctcccttcgccaacagcaacatcgatcggctcatcgacatcgtcaagcgatacccgccgtggcgtcgaattatccatacgcgcgacctcgatgcagtcatgcacacgacggcgtgcgaggcatggttcgtcctcctcacctcgtggtcaaaagtcgaggagggggcggtccttacctcggacgccacggtactcgaagacatgctcgagccgtacgttgccgagggagcgcagcggctgcattccgtccagcgcgatgtttctgctgccgctccctctgcaccaaggactggccgtggcggcgccctaggcaagaaggcgccgctgccagctcgtccaaacctccccgtgctcttgactcagctcggcgcacagtcggcattccgcccaacatccctcgacagattgccaaccgaacgacgccggggcgatacaatcgtcgtctttctccccggcgtcgacgctctcccaggcttcggcagagatcaatgtcgccgtgcgcgcgtgtcgagccttctgggaaacgactacaccggcagcggcatcaaaggcatctcttgggcgctcgtctcgagcggtctcggcgagtctttgctttcgatgagggaagaggactggtccgaccctcaaaagctcgagtcgcaggtctcttccctcgtctccctcctcgcctccaccgccgccagagccaagacgtggcgggctggaggcgactttggcgaggtcgccaagatctcgagcaagagcacgtcgatcgggcgcgagcagatcctggacctgatcgagtcggtgcgcgttattcgaggtgagaacgtcaactacgtcgcctcgacgttctaccacaacggcgatccgcgcggacccctgcagttcaagcaagctccgccgtcgactcgcccaaatcgctacgacgtcgactcccgccagccaagccatccctacctctctcgcccaggtccgcaacacgtcgtgccacaaggtctgaaccagtcgccgacgctgccgacgagcatcgtcaacccacgcctctcgaacccgctacaaccgtctcggacggtgcccgctccgggcgagaccgatccctcccgtccaaagatgtcgaagattcgtgttcggccgctgcagatgggaggaagcgggcagagcgtgttcatggctgcgcgaacgcatggtcccgagctcactcctctcgacgacaagaccatcgcgcgaatcatacaagcagacgccagccttcctgtcgaggtcaacgacgacgacgacgcggtcgactcggaactggagattgttcccgaagatgacgacgacgacgacgacgaagacgacttcacagcagtgccaaagcaaaaaggaaagctcaatcgtgtggagtcgtactttgcaacgatcacctcgccgggcaagaaccatgccgccgcgagtcgcaagatcagcgacatcacagagtcgccccgaccagtctcgaccgcttcggcttctgccaacaatgccggccgcagcggcgcacaacagaccgccacgcgtatcacgcgtctcacatcggcaagagctcctccgccagagccgtcgaggcgcaaagatcgcgaaccagtgcccgcgccccggcagacccgactcgcggggaatcccgcgatcaccgaacaagaggcagctctcgcatcgccagacccgatgctcctcatcatgtcgctcgccgtcaagctcgggaatcgctttgtccacagtgcgtttgcgttcttgctggaactgctgctggaacagggggaggcagggatgatggcgacgagggatctgctactccagcggaaccgagcggcgcagtgcctcggtcgtcttgctgctggcggagcataccgtgcggcgggggagcagtggttcccgcggcaaacccttgttatctctgagctggagaaggtacgtccggtcatacggtcagaatcgagatggacaagagaactgactacagtctctgagcaggaggccgtcaactcggccctcgcctccggtctcgtgcctcctcctcgactctcggtcaaggcgttcacaatagcctacgctcccttccaaaccaacctgaccgaatggccgcgaacgcacacgcgagacgaactcgtcaacttgggccagttcgtcgcgcgcgacctgtccaagaacgcagcagaagcgctgagcaaagtcctgcggaaggcgcacaaggcgttctcgctcgatccggcatcggaggctgccctgcagtcggcaaacatcgaggcttccgctcgattccgcgcgggcctcgggaactggttgggcggggtgctcgcgactgctccgttcagccaggcgtcggctcacgcaggcgccgcgaacgaagaggacaagggactgccgagtcgagaaaagaccacgtcgtacaacttgcgaaagggcacgaccggcaagagcggcgacacgcttcagcaacagcacggcctcggcccgaagatcgacccgactgacccgcgcgaaccccccgctctcgacctcgggaaagagaccgaaaagtcgctcgagcagatgatcaaaaagctcgtcgactcggtcccgcctggcagcatgttcaatcgatcagatatgcatgacgcgctactgcaagacatcaccacgatcgcgcagcgccttctagcatgccgggaccggcatctcgagatggcgctggtgctgctcagatacaagaagatcgagaacgcgacgaccatggccttcgacgacgtccttgcagggaaaatgccagagatgggggccggaacgcttgccaaggggttgctagctctggtgatgagactgcgacagatgagaacgctatcggggatcgagctcataccggtgagctgactggcacggcggcgtcgagcatagtcaaagggagactgactggcttgtccttttgacagtatttcgacccgcaatgggtcgatgtagacctgtacaccctcctccagtccggccaccggcaccgcttcaaggtgctctgcacagatctcgaaagaacctgtaccaagatcgcatgcggcctcctcccgttcgtcgatgaagacgaagggagaagagtcgagctctttgacctcttcaggcgggtgttcgaagtgtggcggattgacgaggacgaccccgacaacagagacaaggactcgccttggtcctggatcgaggccgagaggacacggtcgacgagcatccgcctggtcgtcaagaaggagagcgtgtccctcgtcgccaacctcgatcgggtcctgcgcattgtgtttggcgtggaggagaccttctacacctacatgaggcggaccggagctcaagtcgaggtgatgaaccagctcttcgatcatcgaatgttgccgaacaagttcgttcccaccgggcacatgcgcatgtcctcaacaaaggtccagttcaccggagtcgacattacgaagatgaccaaacttggacgagaggcgctgccggagaagagtatggctgtctgatgccgaaaagaattgagctgcgctgactcgccctacccagatctcgacgcaggaaccgcatgggcgcacgtctcacaactaccgctcactcaactgaaggtcaaggagtactttgccaagatgatgccgtcctttcagcgtcgcgtcgtcaacggcgagatcgtgtttgtaccgatcgtcgccatcgcaaaacccgacgcagacgtgatgctctcggaacggcgcgatccattgccgcccagatccgctcctcaggaagggctctcgcgcaaagagcgacggcgcgagcggcagcggcaagacgccctggaccgagatcgctccccggtcgacctccgaacgccggtacgcgagaaggcgccaccaagtcgaacgcgaaaggggataccggtgtcttggccaaacctgcgattcgaggggggaaggaagttggtcaatgactttcttggagacaccccgctcgaccacatccactccgccagcatcgacaccggcgtcgtctgtccagtcgcgaccttcatctcgaatccggttcgggacggcttaccaacgcagcgtgccgaggcggtggcgacctattcgcgtgagactctgctcacccagcagcgtcagaccagccgccaagcttcacacctcaactcgtatctgtcgaaccagttcgactttacccgatgggcggatccagcttccacagatgttcgagcgtcgggtacgtcgccaatgccagaaccggatccgatgcaagaccctctgctggtgaccggtctgcacttgctcaagagcatgcactcggtcttcgacgggcggtcgatccagagcaaggtcgagcgcaaggccgaggtcagttcggtggcatctcagcacgtcgatctgatattgggtggcaaggatcgctggaccgaagaggaccgcaagacgcgcaaggtcgttgtcatggtcggctcagcggacgatctcgcgaaatcttccggaatgaagggtgctgtcaccgccaacgtccttgtgcgggaaatctctgccgagctcgcgcgccgcagggtcaacttcatgatctgcgttgttcccgagaactacacatcccaacggtgcccgaacccggactgcgtcgatgcgcagggtcgccgatctcggtacgtttgctctcgtgtactctgagggtgatgcagctgaccgactggtgatctttggggacagagcggagaacccgcgtcaccagggtggaggaccaaactaccgtctcctccaatgccagcgatgtagggcggtcttccaccgggacggagtcggggctgccaacattgggagtatggggtggtgcctgctgcggagtgggttgcagctgtggggggagaactggatgggaccaggaggaaaaaaacttgcggaagcgaaaaatccctaaaaaaggggggatcaatgggatctacttgtagaaccctcgctttctccgtgatcaatctgacttctatctcctgtgtgcggtaaccacaaacaggcgcttgcgcttgcgcttccacgtccgcaaagaggcgcttggcgcttctgctcccctatggccccggcctgcttgagactccgtgtgtggactcgcatggtacagatcgacgggtctgaccgttgagaatgccggacaacgcgccggcgcgtgcgacagagcgcccgaagctttggagccggatcgggattgccggatttctcccctctcaacggtggaaagggcgtctacagatgcacatgtaccccctagtctgatcaagcttgcaccccgcggttctgccgtatccaacggtctgcgacgacgctggcacaagggcctttttcggcgaaagaggcgcttctcgcaactcgccgacggttcccgcagggatgctgggtaactctgggacggttgtaaccttcaaatggactgtatctaccgttttcaacaccagaatacgttcgtgggagaggcggcgaggccgacgactgccctggccgagtcttggagcacccgccccggcctctgcacggtcgaaaatcccaaaactctccctcatacgaccaaaaatcgtcaccgagatgctatgcttgatgtacggccccgcgccgagctctccggaacagtccgggacccaattcctgactttctcgccactcagtctcagtgttccaacttctaagcgcattgtgggtctggttacttctttcatcttgttgacagcatcagaactgacatgtaccatgttgacggattccgtcgtatcttcagaccgagctggcaaacatgattctgagccaggaaaagccggtgagttcagtgtgatgaagccatggcttgtcctgaacagttctctttgtgaatgcattcttctgaaatttgctgcttacagagaaatgactcggccgagggccggcaagcggtgagctcgagacttccaagccgaagaagcgcctgagccctctgctcaacactctgcagagccgagcaagggcagcggaccgcatgcgataccgagagcagcattgggagttctgaatgcgagaggtttgagagcccctcaaaggttgtctgaggaggagggaagaggaagagggagaggtggcaaagccggcttgctcctttttgatacgcgagcgaggtgcagcgaccgcggtgtctcttactcttgcgacactgcccacgggccgcttttcgagaaaggtgttccggcggcggccggccttaacaaaaccaaatccaggacgcgcgagaacgctcaagtcgagacaaggagacgctctcatgcgcgagggcactgaccttgacgggatcccagccctttgaatgcgctacaaagagtgtgtttcccagtgtccagccaagcaaacccgcggctgcagctgcgaggtgcgcaagttcaggagaaggtgcgcaagttcaggagattccaagacgtgacctcccgttgttcactcgttcgcacgcgtccaccaggttattgtatctgcaattttagctcgacggagcgaagccctgctcatgtatttgactatggagcatttgactgtgctgcattgcccacattcttgcagacacgggcaagtcagagaagaagaaaccgagcgcgagttgcgccacccgcaaataccctccggactgaaccgctgaagggccgacgacctgtccctgaccagtagaagtgtcgggatcccttgacttacgaccagcaggtcttgcatgtcgcccagaatcgtcaaaactgattcctcctggttgcgctcaaaagccggatggtcaggccgtgtagacccaaatcgcctgaaacttcgcaccctgggcccctataggtcaaagtccagccggccacaagctcagcccatttcaacggcggtagaggtctgccgagcgaggcgcttgtgggaaattggactagagctgtaagccttgtcgtgcagcatatcgacaatctgaacggtcaaaataatcgtgaaggtgtttgaagctgttcaggcgaaaaagatatccatagagcgcatgcttgctgagatcaggcaagcgcctcttagttgtaattaccgtcgtgcttgccagttccgacccagcctggctcaccagctcgagatacatgctggatcgctgacccttgtgctccgcccccctccagaatcttcttcttcggtatgtctgcagcggagtctgaagtcctcgacgcgaagttgccaagtcccccaagatgaaaattaacgttcttttgttcgtgcaggatatgatcaaggaatgatgggcggcgtcaacggcgctcttgactacgtgaccacgatgggactgggatacgtcacgccgggcgtagatggggccaagccgaccgccaccgtcacgcagtcgacgaagcaggtgagtcgtcggcaacgcatctatcttgtttttgtcccgccggccacgatacctttactgaactgctgtttgcatacagggaggaatcgtctcggcctactgtacgtcccgatcgtgtctccttcccgttttcaacctgacaccggtttctctccagacctcggaactcttttgggatgcttgctcggcgggtggctcggcgataggctcggtcgcaagaagaccatctggattgggtgcatttggatcactatcggagctcccttgcaggtgagtcggagttcactcttgccaccgttccgaaagccgcgatttcactttcgccaccgttccgaaatgaactcccgccaccgctccggaagctggcgctgacctccctctctctccgacaggcagctgcacagaacgtcccctggatggtcatggcgcggatcatcaccggagtcggcacgggccacctcaacgcgatcgtcccagtctggtccgccgaaacttccggtcatctctctcgcgggttcttcattgcgcttgaattcacgctcaacatattcggcgtggtcggtctatggttattcattcgtcttctgacccgcgtcctcgtggctgacgaagttgattcaccgccgccccaggttgtcgcatactggctcggttcgtttctcccgcgtctattgccgaaggagacggcgctgagtgaacgcgtcatacagagtatggactgtccttcatcggcgacgggaacacccagatccgctggcggttcccaatcgcgttccagctcgtgtaagtttcgcttacccgaccgtcgcagcagatcagacatactgatgtacgccggctctatagacctcttctcggcctcgcaatctgcaccttcttcatgcccggtacgcatttcgcctttttccggagcggacttcctcgctgactctcccgacaattgcagaatcgcctcgatggctcctcaaggcagggtatcgcgacgaggcgctgcatgtcctcactcgcttgcgctccgaagacggtcagatcaacgcggaagcccaggccgaatttgacgagatcgaccgagcgattcaaatcgacggtgcggcagaacccggctacatcgacatgacattccgctcgcacggcaagctgcatctgtcacgaagggtacgtcagattggcaaacagcgatgaaagctccgactgaccgaatcgctgttaccaacagactcagctcgcgatgtgagatcaatttgtctcctgctttccgttcctcgcgctgaccttttctctcgttctcagctggatccagatccttcaagagtggggcggtatcgccgctatcacgggtgagttccttatcgggctggtcggacgagaaaagcgcctgacgattcttttcccttcagtctaccaaccggtcatcttcggtctcgccggcttcgacgcttcgaaggcaggctgggtatcgggagtcaacacgatcacctacatgttttctacgtgagtattcaccttctccttgccacttggcgagacgtggtcgctgcaactgagtcgattttcttttgcagtcttatctgcgtcttcactctcgaccgtatcggtcgccgtgtcacgctcttctggggtacgttccacttggtcttttctttcttcggcttgctcttgaagcgatcactgacgaaacatgaccatgcgcaggcggcgcggttcaggctttcgcgctcatcatggcgggcgtcttcgtccaccttctcaccgttcaccccgaaaagacggctcagtacggaggtgctgctaccgctatggtgttccttgtgcgtcaagaaatgttgtctcactgtcacagactcggaatttgctgaccgggtctttcttctccagtacaccgcaactttcggcgcaacttgtgagaagtctcgccgcttcttctttgagcgaaatgaacctgacctttgtttcactacttcttaccgaaagggctcaccgtaccctggatctaccccgtgagtggcgatgccttccgccaagcgtagtcttcacattgctgacgccactcgtcttcaggccgaaatctggcccgtcaacgcacgagcgaaaggaaacgctatgggagtcgtcggatggtcgatcggtaacggatggtgcaccctcctggtccccgtcatgttcgacaagattaaggaggtcagtcccggtttttttgccgtccgtcgtcttcgctctgcctcaggtatgctgactgcctgcggtctacagaatgccctctacatcttcggcattgctaatattctcgctatcgctgtcgtgtgggcattctaccccgagaccgcgaaccgcactctcgaaggtgcgctcgtccgttcctcttccaaacgctcgcaaccccttctgactttcgagccttgccgtcttcacacagagatcgacttccttttcttcagcgacagctggttcgtgtggcacgccgaggcagagtactcgcgcctcaagaaggaactcgaggtcaccggcgaggtcccggacgatctcaagacgtcgacccacctcaaggagaagatcagcctcgacagcgccgcggcttgaacacaagagcactttccgtcggttctctagactcgtgtatatataaattctttgcctcgatcttcgcaatgtaccttcttgatgggagttcggtcctttcggtccttgatcctcttccaccttagacacattgttaccatgaggcgtctctccacgtcggaagtacggcacgctgccaacagtgcgggcgatgcgagataattgaatgggtcgcagagcaacttatgaagtctacgagatgtcaacattgacgcgattgacattcgggcgactccccgcttggcctcttcgctctcacccggcacgccaccgccacagtcctggggcctgcaagggggtcaacgtccttgcgttgcttgattgagaccggctggacgtgaaacggacgcgctctcaagcggcgccaccggcgacaagagatccgtgctggacgaggaccgtgtcgtcaaacctcgagcggtcgtgacaagatgcctgtggtcaccaacccgatcacacccacgctgagcgtctctgaactacgagcgctcgcgaaccggcacgcgctgccgcccatcgtggattctcaactcgccaagacggtgacgctgcgcacgacccgcccgcttcgcgcaggcaagacgcgccagtacagtctacccgaaatcgactttcaactcttggaggccttgggagacggcttactcgaggcgagcatatgccgagtcttgtacacgaacgtcacgagtcgggctgaccgttccgcagtgctgttctccgtgagttgggtttgcgtggtctttactgccgttcagggggtcgcgtggcttattagggtatgctccccatgcaggcttatcggagtgtactccgcaacaatgggctactcgcccagctctcgcacggctaccgccttcatctgacgatgtcgccgcctctcgaccccgcgggcacggcagcaggcgcgccgttctcggtcagcgtgaccaagattctcgccgactcgttcgaagcatacatcggagggttgacgcaggcatcgggcgagcaagtcgcgaggtcgtggctcgaaccactcttgatcgacctgatgggtctgatctatccggccgtggaaggaccggatgcggtttcccgcggtgagtgtcaaagatgcgctggcgttcccgcgctgcagagctgaagaccctttcctttttacaggccagcgtacgccccgtaccgaaccgaacgccacgcctcgcaccgaacccgtcgccgccgaacccgtcgcccagcgacctccgaagcgtccgcgcgacgacgcatagcaaacatggcagtgtcgctcttctcttttgcttgcttgactagcttgacttcgagcctgtgtgaattcgattcgaacagcaattctgcggcgagcttgcaccaagtcaccagagatccagaacgaaagagagactggctacgagagctgtcttcgttcagtggcttttggggtgccaagagtatagtagggcgtagaagaagctgaaaagagggaccgagaaagaacacgatgacaactctgtccatttcgctacacacgtctgcaaacccgttctacatgctcgtgtccacccggcaaagctcagtcgcgaccagcgcacacctcgccacgggaaaagatcccgagattgtctatatgatatccttgaaaaccggctcgaaacacttgtgtccttcagtggaagggcacgttgcgaatgcgaccgcccgagccaaattgccggtgcggcagcgcgacttcaaggtcgcgacgaacgcggcgagtcaggcgcttcgagtcggccttggcgagcgagcaacccttgaccggtccggggcagacggcgtcgatcgagcccgacttggtgacggcgttggtgacgcactgctggacctgcgagatgcacgagacgtacgcggcgccgtacgaagtctggttgttgaagaacgactcgagcgacgagttgagttcggcttgcgtgaggttgtgcgtgttcgcggtcgagttgttgagcagagtcgacgagtagtcgacgaggtcggtgaagaaggacgaggggaggtagccgtcgtactgctgcgcgatcgagaggatcgtcgtctgcgtgacgacgggagcggcggactgggtgatacattcctgagcggcggtggcgttgccggctgttgagaaggtcgacttgggtcagccatgcgatctcgacaacacgtccataaggtcatcgagacgcactggagatgagttccgcagcgcacgactgcaagatctcggcggcggtgaccgtgttgcccgagagcgtcgacgcgaccgagttgatcgcgttcgagatctgggcgccgacctgcgcgccgagctgagcgctcggggtcgtcgcgttctggatgttgtacgagaggatgttttcgacgctggtggtcaaggaagcgggcaagacgccgacaaactgctcgaggacgccgttcatggccgtctggagcgtcgtgtaggctccgccgggcttggtgaagcacgcgagcgaggaggtgttgccggcctgctggatcgcgtccgtgtagcactgcgagacctgctcgagagccgtgaccgagttgccggacagcgaagcgatgaccgactggatcgaagactggatctgggtgacgagggcctgctccgacgcgggcaggagcgtgccgagcaacggcgtgacggcgtcaaagacggacgagaggatcgtgttcggaaggatgccgacgaactgtgtgcgttcaagtcagtacgagcgcggaaaggcggacgcgcacgcgatgaaagctcacctgctcgaggatcgtgttgagcgtcgcctggagaccagccgagtcgctgccggtcggagtcaagcacgagtatccggagggcataccacccgcggcgagaacctccgagagacacttttcgagcgctgccgtcgtggtggcattcaagtcactctggctcatattggcggcagcaaaggcctcgtcgagagcctgcttgatgttgagggaggcagtgacggcgtccgaagttgtgatcagagtcgacgtcgagacttggagctcggtgatgttgcgagtgacggtgatgtagaccggagccggagtcggagcgaggagagccgagatggtgccgttggcggcgaccgctgtaccgttcacggatgcggtgctgttggcgacggcggtggcggtggcggtagcggtaatgttttcggccaagatggtcgtcaccgccggcttggtgtgagtgactgagggtacaaacgcgggatcagcgatcgcgcaacaaaacgacgcgaggcaaatcgggaccaactcgccagtgatggtcgtcgcgctaggtttgccgacttgcttctggatgacgctcgagatggctgtactctccgaaaggcgagtcagtacgagtgaaggggaccagagaagccataatttctgcgcaactcaccgccggaaagggcgcccgcgactgcaggcgggatgtacgagctgtcggcgaacgatccgacggcttcggcggcacccttggcgacagtctgcggcgaagcgccctggaccttgggcgccggcttcgacttgatcttggacgcgttcttggtccacgacttggacgaggcggacgagggagacttgggcttggaggcggtctgatccgacttgtggacgacgggtgcggcgttataagagttgtcttgcgaggaggtggaggacgacgagccggacgacttggacgacgacgacgacgacgacgacttgtgggaagcctgtttcttcttgctcgacgatgacgactttttcggcgacgggttgacgagcttctgaacctcagggacggtgtactcgcccggcttgtggatcacgcccgggtgatcggagcaaggttcgggcgacgcggcgaccaagagcgcgagtgacgagagggcgagcgaggtgaggctgaaggaacgcatgacggagtcgagttggtcttggccggtgtgtgtgagggggtggtagtacgagggagtgtgcgacgcgtcgggtgaaaggggacagggaaagaaagtgtgaaggtccgcgggacgaagcgagcgtgaatttaaaggaacgagtggaaggtccgcgggcgaagtgcgcggtgggggtccgagagccgctttgtgacgagagtgcaggaaaggaggagatggagaaggagagaaagcgagaaagagagaagggcgcaagacgcgaagaaagtcgcgtcgcgtcgtaaaagcgcgccgccgaaagattcacgtgcgcgtcgagatgatcggatcggcggccgacccgcatgcattatggccatcgcaactgtatgtattgcgaggctgcaaagcacacagagttgtacagaggccgagcgagcatcccgtccaacaaactcgggtcggttccagcaaatcgctcggagcgactcggaaggcgaggtaccagcgtagcctcagccacagtggacagcggactccgacgaagcctatcaggtcgtacgatgaagcatagtcggccggtcgctgagagttagagcggcggtctatgtgctgttccagggatggccttggatgacgtcggcggttgagctgcctggtctggcgaggacggcgggccgcgtgctatggcgaggagaggcatggtacgaataactggccgatgtgtccccgcagcaggcagtctagccggttgagtgatccggagcaaagtcgaggagagaaaaagagaagcgtcgctgctcc

SEQ ID NO: 134 - DNA, 21152 bp, unidentified; identical to SEQ ID NO: 133
  misc_feature 1..21152: note = Fanzor polypeptide
  source 1..21152: mol_type = other DNA

SEQ ID NO: 135 - DNA, 21152 bp, unidentified; identical to SEQ ID NO: 133
  source 1..21152: mol_type = other DNA
  misc_feature 1..21152: note = Fanzor polypeptide

SEQ ID NO: 136 - DNA, 20549 bp, unidentified
  source 1..20549: mol_type = other DNA
  misc_feature 1..20549: note = Fanzor polypeptide
ggctacgacatgatgaatgaatgcacggcggaaacatgtcctcgtctccaaaagacaccacggcggcacctgtgtgtcgtgtagtgttgtgtcgtgtcgagtcgtgtcgtgtcgagtcaactctgaatagaatagtatattccatcatcactcatgatctttgcgtattcaagttgtaacgggttggccttgttcttccgttcgtgatggttatctagtacgcttgtagtgtaccaagaacatctcagtatggagttaaatgtgtcttgccatgatctacggattgaggttccaaactctcgcaagagagtcactttatcacgaccgagtgatatgcatacactgctaccttgattgatgacacaaggcttatgtaaaactttgtgccaaccgcgtctcgatgtgtaacggaactcgcaatcgacgataaatcccgagagcacgcctaccatctatatccatatagccaataatgatgagttggacatcgcgtggcaagcggtgcaacattaacattatgtcgttactgtaagcctagtcaaccgtctaccgttatactgtttacacgtaaaatttggcctgaattcatgttttctcgttgcaccacataataatgggcgttgttcgttgacatagctgaagtggccacagagctccgttctggcgatcagatcctcattcggacagcggggagcaatgagatcttccatcatggaatctttgttggtcccatttcaggatttcagattcccaatatcaaatgtacctacctgtatgtagcaacatgcccttcatcgggattgtgaaggggaaaccgcgggccccacggagccatgccaagccaagacacgccaggacacgccaggacattccaggccacgccgacaccccaagccacccaggccacgccaaatcacgccagaggttgcggcatctgcacttcaggggaactcgaagcaaattgttacttaagcgctggacccactaacaagaaaatgggctacaagccagatcttacagtcgtagacgcaatttgtgggacaccctaccggtgatccttgaacccaatgggtagatcagctaaaggcgagcacatatttttgcctttcatctctgtatttcagcatttaagctggcccaaaggataacaaggcaagctgctgacaaacccaggtgggtcggtcggtttagcgctcacactcgcctctctggaaactggggttttagggggaggcgagggaacacagaatacatacacgttgtcgaagcagaagaaggttcttggcagcgttcacgatcgtcgggtcttttatcatgtccggcgatcgtttgtacagccgccactcaatacgtttacactcgtttttagaggaacggcgaccactctcatcaaggacggcggcatctgtgtcgagtcgagtcgagtcgagtcgagtcacatcacatcacatcacatcacatcacatcacatcacatcacagctgcgaagggtggcaagagtaacggccgccgtccggctgaacgaccaagcacccctccttgatcgcatctgccatgccatcctcatcaaagctctggccacccatgcacaagcgcacatcatgggtgcatagctcgctgagcgccttcagctgcatgagatagttgtgccgccccccgggtggtgtgatgttgtcgcggaggccatgcatgagctggaccagtttgtcacgcttcttcgctgtatccttcacgttctccttgctcacgcggtgcttgcactcaaccaacaccaagagcttctgcggagcgcggatcacctcgaagacgccatcaaatgagtaggcatgcttgccatccgggcccagtatggccttgaacatcgggagctcctccacagactcggcacctaggctcatgtagtgcgtctcgactgcatggttgacttctgcttctgcaccgaagtcctcgttcgtcatccacccacgatgctgccccacagatgtagccagcttgttgacggtaccgatcgccgttgccaaggcctcctccatgacaagctgttgccgcagaatagattccacgagggcatggctctctgtagacgccatggacacacggccctgctttagcatcctgtagcacatgaatgttgaaggtatagacgcattgatgaattgtgcctactgatgtctggtaagttttacaacggagagccacttgcatcatagcgaatcttgtccacacggtagtcgagtcgagtcacatcacatggcgaccgacctctcgcatcatggcggaaactgtagagtcgaggcgagtcacatcacatcacatggcgacctctcgcatcaggcggcggaacgatgtcgatttacgggggacgatcgctcgcatcgcaaccggtgatcacatgtcaagcatgggtctgctagacaagcactctcgtatatcgatagggggatcgcggagtggggggattcatttgatgactcgcgtacaccatcactgtaacacttgggcttgcaacaacaagcccaaaaatacaataatcacacacaatttccttatataatgggcgttcctgcctcccggccgattttttaaaatttctaatcaggatttagagcctcttgaacgactcgctagcttgagacataagcaccaaggaatcacaattccgctccataccaagtttcgcaaccagtcaaaataggccgggaggcaggaacgcccattatatgagactttgccaaaaagggaaataacggatgaggaagacccggtaaaagtaatcgcaaactgtgatcacatgtcaagcagaggcctgctagacaatagatctcgtatatcgataggggaatcgcgggacccacggagtggggcaggggaattgagctgcagaagccaagaaccttcttctgcttctgacaacgtggatggacgggagagagcgacctgaggcattctgtgttccctcgcctccccccaaaaccacagtttccatcgaggcgagtgtgagcgctaaaccgaccgacccacctgggtttgtcagcagcttgacttgttatcctttgggccagcttaaatgctgaaatacaaagatgaagggcaaaaatatgtactcgcttttagctgatctacccattgggttcaagggtcaccggtagggtgtcccacaaattgcgtctccgactgtaaggtgtccttagtaccggtgggagatcaacggctgctcattgtttgtactgtcccctccgatgtatgaaatgattgagagtataaataaataatgagttgggatattaaataaaaggctacagaccatcctgtgcgcttgcatgcattgtacacacatgtttatagaacatgcattcgcacacgcgatcatcgttaatcctaacgcttccccatgacattcttgatcgtattgccctattctcttccaaccccaagattgtattagtgtgtaaaactctgcacaaaaaattttcgggatggccccttaccggattgatccaaccaccgcagcgagttggagagatgatggcgaaaggggggcgcgccgaccctctagcagtatgcttggtgtccaatcctcttgtacatgttcagggggccctacaattgagggcgaaccaaaatgaaaacaagcttctctatgtggctgccaaggccggtcacgccgatgtctgcaagctgcttatggatccagaggcagctggacttgagtttagggccagggcgaactctagctacagcttggccttggtggaggctgccaatgaaggccactcagatgtctgcaacctgctgatggttccacaggtggttggacttgagtatagggctctggagaactctagcgacagcagtgccttgtgggcggctgccaaggcaggtcacacagatgtctgcaagctgctcatggatccagaggtggctggaattgagttcagggccagggcgaacaccagagacagctgggcattgtgggacgctgcgagggaaggtcacgcagatgtctgcaagctgctcatggatccagcggtggctggaaatgagttcagggccagggcgaactctagagacagcagtgccttgtgggcggctgccaaggcaggtcacacagatatctgcaagctgcttatggatccagaggtggctggaattgagttcagggccagggcgaactctagcgacagctgggcattgtgtgcggctgctaaggaaggtcacgcagatgtctgcaagctgctcatggatccagcggtggctggaattgagttcaggggcctggcaaacaccagcgacagctgggcattgtgggccgctgcgaaggcaagtcacgcagatgtctgcaagctgctgatggatccagaggtggctggacttgagttcagggcccgggcgaactctagcgacagcatggccttgtgggcggctgcgaaggaaggacacgcagatgtctgcaagctgctcatggatccagaggtggctggatttgagttcagggcccgggcgaactctagcttcagatggaacttgtgtgcggctgcgaatgacggccacgcagatgtctgcaagatgctgatggatccagaggtggatggacttgagttcagggcccgggcgaactttagcgacagcatggccttgaggtgggctgccaaggatggtcacgcagatgtctgcaagctgctcatggatccagcggtggctggaattgagttcatggcccgcgcgaactctagcgatagcagggccttgcgtgaggctgccaaggcaggtcacgcagatgtctgcaagctgctgatggatccagcggtggctggaattgagttcagggcccgcgcgaactctgtcaacagctgggccttgtgtgaggctgcggaggcaggtcatgcagatgtctgcaagctgctgatggatccagcggtggctggacttgatttcagggcccgcgcgaactctagcgatagcagggccttgcgtgaggctgccaaggcaggtcacgcagatgtctgcaagctgctcatggatccagaggtggctggaattgagttcagggcccgcgcgaactctagcgatagcagggccttgcgtgaggctgccaatgcaggtcacgcagatgtctgcaagctgctcatggacccagaggtggctggaatttgttggtcatgggatggcatgtactccaccaggcgtgcacctgagtcctcgcgtgacactccgaacaggccattcaatccagcaattgcatcttcgagttttacatcgatgtagtagttcttcacttgctgggatggttccgactcctcgagtcacagagagactgactgactgactgacacacacacaaaggaatggacttaacagaggctgaaccacatgaacacggatggggagagaggggcgggtgattgacgaaagtgggcaggggaaactctaccgcaaccatactcgcaggcatgaatgacctggacgtcatacccaagaatttcgagtattttccatttcaagctaaaccatgtcacagttaagtcattggtgatggaacctaccaggcttcggacgggggtcgatgttttttccaccaacacacgtaattctctttcgtattcttcttgcaacattttgacagttcacgtcaaaattattattatatcaatgaagaaactcctttatgttgttctcaaataatatggtttgcctgttcctcgaacaacactttgtagtccgcctcaagctgccgcaaacgattatcaaagtcactcatcctcccttccctacatgctcaaaattattttggaaatgtgaacggcccggacagcgcatttctgctgaaggaggccaaagaacgcttcaagacatgcgaatatttcaacgggaaactcagcacgatcaagaccccgttttcttttgggccacggtaccggggaagaggcgatcgcttaagtgcggctggtccttcaatggatattctcgttaacatcttgcaatttgttgattcacaatcgtattggtgttccactgccccgtggatttctacaccgtacacgaagcagtttcattttagtattccgttgactgtagtgtaaaagaatggtcccactttacttacttctttacataaagaatggtccaactttacttacttctttacataaagaatggtcccactttactttatttgagaacaacacaaccgtgagaatttatataatgctcgacatcgaaattagtcacatactggatcgagtaaaagccggagaatgcaaatgggattcgggtcacttgagtgataatccatacctgacatgggacgtcgtgtcgagtaacccagacaaaccatgggattggtattggttgagcacaaacgccagtgtcgtcacgtgggacatcgtgtcgagtaacccggacaagccgtggaactggagtggattgagctcaaacgcgagtattttgtgggacatcgtgtcgagtaacctggagaaaccattgagttggtattggttgagcacaaacaccagtgtaatctcatgggacattgtctcgagtaacctggacaaaccatggaattggtattatttgagtgcgaatcccggagtagccacttgggacatcgtctcgagtaacctggacaaaccatgggattggagtggattgagcacaaacaccagtgtagccacatgggaaatcgtgtcgagtaacctggacaaaccatgggattggatttggttgagcacaaacaccagtgtagccacatgggacatcgtgtcgagtaacttggacaaaccatgggattggaattggttgagcactaaccccaatgtcacatgggacatcgtgtttagtaacctggacaagccgtggaactggcgtggattgagtgtgaatcccggagtagtcacatgggatattgtctacagtaacccggacaaaccatgggattggtattggttgagcaaaaaccccagtgtagcctcgtgggacattgtctcgagtaacccggacaaaccatgggactggcgtggattgagtgtaaaccccggggtagccaccctggatattgtctcgagtaacccggacaaaccatgggattggtattggttgagcacaccctccagtgtagccacatgggacatcgtgtcgagtaacatggacaaaccatgggattggtattatttgagcacaaaccccagcgtagccacctgggatattgtctcgagtaacccggacaagccgtggaactggcttggattgagtgcgaatcccggagtagccacttgggacattgtctcgagtaacccggacaaaccatgggactggcatttattgagtagaaaccgcaacatgttggtatccgtccaagacgcgtgccgtttagtgcgaagacgcagagccgcagcgactattcaggaaacatggagacacgtgaatacaaacccgagttatgttgtgtgccgacgcagactcttgaaagaattaattacactcccgttggtgagtacaatgtaagaagtagtacattgttacactcagaccggtcaataatgttacagtatattgaatcaattacaattctctatgtacaacttggacagacggtcgattgttgtacacatgtacacattgctgcaaagtttgaggagagtggctatacttgcgaatgtaagccacatgacagtctcgaggtggatctcaaaccccactaaaaaagtgtacaaccggaataaacctacaaaatcgtatgtggtcatagaattcttaaaggcgtcattaaaaatagatccattcacatctcttgctgttcttcgtcataaggtaaaggatgctttcggatttgaggtatcaaaagaattgattcgcgttgtgataaaaaggcttgggctcacaaagaaaaaagcaaagttcttctccaggcctgataacttatatgagaaaaccacgtcattcataagccaaagggaacggttaaaagaggaagggaggacttttgtatcgatcgacgaaacttcatttggaagacatacgagagacgtgtttggctactcaccaaagggagagctactggttgtaccgaggttgagacctagggtgacgacaatgtcggcactttgtcttattcaacaaggaaaaggagacatttattttaacatcaggcaagggtcttttaacacgcatacttttgttgagtttttagaaaatttggactgtccaactgacacagtaattatacttgacaacgttgctttatcaccactccaagaaggtcaaaacacttgcagcttcaagggggtgggagctcctatacactcctccctactcaccttggttcaacccaatagaaggggtgttctccatcgtcaaacgcgatttctataaaagccaagatgtgtataaggctttgaattctgttaaagagaaacacgtagaggctttttttcgaaagtcattgaatacaatttctggaccttgatacaaggaaatagatacattgtctactaaatggagacgatagtcaataaagagcctccggacaagcgtacgcgaccggaccgggcggccaaaattaaggacaggaaaaacggcgaggagaacgtggtaaagtgtacactgagtcggatcatagcggataaggacaacaaggacgttatcaccaaggtgattaaggagcgggtcgacagcgtatccaagaggacttatcttgccggtgttgcggtgaaccggatattaaaagaagtcttcgaaggggtaccagatgcgcaacttcacactgtaagtgtccctagcgtcgaccagaacttcattcggcagcttatggtggggtcgagacaggcgcacatggagacgagggacgccacagtcgaaaggttctttcacaacaactattggtttagggagaagattgaggggcgcgaggtaattgtgaaaaagaagaaacaatacgtgggtgccatcgctcgctacgatggcgatcgaaacctgtacagccacgcgtcgaagaagtacctgaccaatttcaataaccactacagagtccatctctccacatggatcaagaagttcgtttactcgaaggaaaacaggatcttggccaaggagttcaaagatgagcacggcattgacgagaccgtattccactgatacctcctctacgatatccactcttggggagtaaaggaagacctcatagcgatacattcgctcctaccggagcgaacaaagatgttgctgaagattcagcactcgatcatcggacgggacgagatcaaccgacagtggcttaagagcgtttccaacagcgccaagatgatccggtacaacgtctttatcaatcgatacctcgaggccacagaggacgagggctacgccaagctggtcaacattgctcccatcccaacagtcaagcactccttcatcacgatagacaccgacggcctactgggcgtcctcaaggacgtgggtctcgtcgagagtctcgaaaagacgctgacaaacaaggagcactgggagtcggtcttcgatgtggaaaacatccgttctactgggaaaggtgtgtttacatgcaccatagacactgacggtgtaatggcttgtacccactttcttagggccgagaagaaaaagatttcaatcaaggacgacggaacggcgattaagaagcagaccaagactctccgcgagttttccgtgtccgaccccaatgtggtggtcgttgcaaacgaccctggccgctgcaacattgcctttttgacttggaagaaaaataaggtcgaagaaaatgataaggggggtaggaagaggaagaggcactgcgagttcgggagcaagagactcacgcgggagcggtactacgttgagagcggggtcttcaaatctagaggtccgaccaagaagtggttgtctaacatccaggactgccttgacgacctgaaggacaacagtcccaagcgcacatctctagagtcgtttgacgcttacgtgactgtaatggtcaaccattgggattcttaatggggggagatgtccaagtcgcggtggggcgcgcagcgcctgcggctctacggtggcaagaaacgtgtcttagcacgcttcttcaacgaggtccaggcggatgtcggtgagaggaaaacaattgtcatcgcatacggttcttctaagtttgcccctggtggcaagggtgaactttctgtccctacaacgagcgcgttcaatgcgtttagagaccgtttcaatgggcgagttgccgtcattgacgaattccgtaccacaaagatctggcacaaggacagcaccaccgtcctccagagtgtgcaatccgaaaaaaaagggcgcacggttcgaggcttgctatggtgcagttccaccatggagaacagcaagttgtttgtaaaccgtgacctaaatgcagccattaacatccacaattgctttacaatgtacccaacccgccccggaattcttgcgaggccaaagaaatattgcaaactagaagttgtggtaggacgcacaattgattacaagctgacaggttctttacagaacgcagtgtcgagcgaagtgtagaagataaacacatacaagaggattttgggggactcggcatattatgtaacataattcccttgtccgagtgtataaacaatgctgattgagtgaaaagataaattgtgagcgaattacatgtcctgcactcgacgtaaatacggaatcccttgccaaccatattccaataaatgtccccgccatcttgctcacattccaacctatgcaggtgacagcatcgcttacttggaaagactggataaggcgaaaaaagaagtggaggcccaggtcgttgtcatgtcagcccaagctgtacaggatgcagccaggatagaccatctggcatctcactccaatgtcatgtcagcccaagctgtacaggatgcagccaggatagaccatctggcatctcactccaatgtcatgtcagcccaagctgtacaggatgcagccaggatagaccatctggcatctcactccaatgtcatgtcagcccaagctgtacaggatgcagccaagaccaactatctggcatctcactccaatgtcatgtcagcccaagctgtacaggatgcagcctagaccaactatctggaggccgctaggtttccgcacaacccgggtatacggcattactactactacagtcaacggaatacttaaatgaaacatccaaataaacggtataaggaggcgatggtcctacaaaatggcccgtccagcaaagaaacctccttacatgacgcaatgcacatcaacaaagaccccgtgttcttttgggccacggtaccggggaagaggcgatcgcttaagtgcggctggtccttcaatggacactctcgaaagtaccgacaaaagaacgatacggagtctgcaggatggagggccgtgatctaaaaaataaccacgatgttctctttaacatcctgcaatttgttgattcaaaatcgtattgttgtagacaccactcggtccccctccggtggtcgcgacaacattaggttacaccgcaaggtgtgccgtacacgaagcggtttcatttaagtattccgttgactgtaatctcacaagcattcatcgggaattattggtcagcttggcaaggcaaacacttgtcaacacaccaagcaaattcatgaactccccgcaccccccttcagaattccagagtgatgtcattccattgagttttgctgttttcaggtgcataaagggttctaagttcatgatggtattagaactgattgcgtcaactgcggccgctgcaacgctggcagagaaggcgtgttgtcatcctgccactcaaaaggtggtagttcattgcacaatgtggatgtgcggttgcttactaccactgagtatcagattgatgctatcttcttctaggattagacgctgctctggacacggtgatttcaagactgctactagggcattgctagttttgctcgagacagccacaccgtatgctgtttcacctgtgattatgcgcaaagcatcaaagggggttgcgaggatgctacagtactacaacgacattacgactgagcttacattggacatgaacggtgtttcttgcttgatcgccagcatgcccaccgtctttctgagcgctgcgcttaatgtgtgtggtcggcaggtcagcataggtaccgacaaggtcagcccacagttccaccagctgtacaccgacatgttcattcggacatgtaatgagcgtacacaggaacactgtcatctggtgggactggtcagtctcttcattgcaactcgttcccagtcacagatgcttgccgtcatagatgcactcagtcaagacggtcttggaaatctgtttcgacttttagctgaactaccagctaagatacccataccatgcatcgatgtgttcatccatgtggccaatgaatgtgtagcgacagcacatctgccagcaggggtggaggatctctttatccggtccgcgattgccatactgctagacaatgagacagcgggggccactgttgcatcaatttcaaaaacgatgctgcgtgtagcaatagcagagcctgcttacgcccaggccatggcaacagcacttgaaccgcacatggctgtcgcgccaacgcgtaagcttgctcgtgatctgcttctgaatccatgctctattcatttacccgattatgcactgagacaattggggatgcgccagtctcttcatgacagggtacgcatagtatgcgaattgattaccttggatgtccctgcggaagcattgctaccactaacgcagacactgccctcgcatagtgatggtaggttagtggacataaacggcgtggatggactgcaaaatagactttgcgaccatgtgtgcgatacaagtaaagcgaaaattcaggcggctacaaatttgttgtgtgaaatggtcaaccaacatggagcgcaccatcctggtgcccaactccttatttggctctgcacagttgctgtagagttcaagccaagtatcgaccgtatcagcaccgctatgggaatacgcatcctcttgagcagcagcttcggctactcacacatggtcacaatgactaactttggcattggttacttagcatgcgtgtatcctcaacaccgttgggtaaccggcgacgacgatatgcactgttggatgctcttttacgaataagtttcttacactgcaaaagcagtcaaagcggagctccacgccaacatatgactcacccacacacatcgcttgtctcaagcaggcttctgcttgacaattaggcagaggatcattttggaatcgtttacccacacaaggccctttggaacaagagaaccagaacatggcgcgcccctaaacccgtgtaaccctcgtatgaatcatttatatatttttattagttttaagcagagatgggtatacactcttatttcggtatcggaacgataataatttcaaccattggtgttactatggttatgttatactatggtaaggagattgtagaatttagcaaagatattgcagaatctagaaatagtattgcagaatctagaaatagtattgcagaatctcaacgcgagactataagtatcttatcatctcatattaaatatacaaaaaaacttgcagaatctagaaaaaaacttgcagtgttgaaggcgaataacgctaccctgactaagatgttgaagcgtattttgcggtctattactgttgcggatgcagataatttttcagcggaagaaagacgatggtatgttgataattgttctgcgtacaacgtccattgtttgttgtctgatgttgactcttctttgcctacatccgcttaaagcttctctttattgttcaataacaaagaacatattgtttcttttgacagaggaactgctcgtcttagcaagcggtggcggtgacctagacagcactctcatcgattcgagaggtaagccaacctcgagtgtgcgatcagacatcgaaatactaaaatgaaaccgcttcgagctggacaggttcttgaaaaaatcacgctcatgatgcgtacacgttcactatagctttcctgaaatcccttatttctcctgcaatcttcactctcgtgttcgcgctttcttgagtccacatggggcatttttttagccattcattgaatttggctttgtaaaacggtcctgcttcgtttaagtatggtaaatggttcccttgctttttcccacacaccagcatcgccgcttcttcagcaagaccaatgcagtgtaggaaatgtttcttgatacagtctgcgcagtatttgtctctgacgagtagatgttcctcaagcagaattgactgttttgctatttccctcatgttgtattctggttcacttacgggatctatggcttggcaagtgtggttaggttgattatttgttatgttttgatgcttacaataccaaaagataaaatcgtgagagtgtctttctgacgatccgtaagcatggcgacggatgtatgttgtttacattacaaacgtttttttgtcaccccagcactcaccagcacgccccatgggggtcgtcttggtaaaacatggagacgtttggataacgcacagttcatatcaagcatgagacacactactgggtgcacaagcaagagtgataggcgaacggaggaaacatgatcggataacgcacgcacggcggcggatgtcacgacgcatgcctcacacagccttacacacgcgaatctctctctctgtccaactgcgactcattcaatgcgccgaacaaaccagaatttgccccccgtacacacacgtggtggtggtgcaatgcatttgttcaggccaaaaaaatggggagacgttgattcattttgttcgtccaccgagtgtagagacatatcgaccaaacggaagaaaaagtccaatgatcgacactttgcaatatagtgtgttgcacggagtattatgtgcactgggtcctgcagacagtgtccggttggaatcatgctcgaaatctcttaaccattccattacagtcggagacgcaatttgtgggacaccctaccggtgacccttgaacccaatgggtagatcagctaaaggcgagtacatatttttgcccttcatctctgtatttcagcatttaagctggcccaaaggataacaaggcaagctgctgacaaacccaggtgggtcggtcggtttagcgctcacgctcgcctcgatggaaactgtggttttggggggaggcgagggaacacagaatgccacaggtcgctctctcccgtccatccacgttgtcagaagcagaagaaggttcttggcagcgttcacgtctcggttccacgttgcaccacagcgcacattggatgatgcgcttttgacactgtctctacagtgcagtactttgtggaccttgacgttcttcaccaccatcttctgcttctcaacagttatagacccttcgattggggactctttgcaaactccgcgccagactacgctgtctgccttcatgttgacaagcctctggaagcagccgtgacatttacaagaagtgttgcgttcgtcgacgtttttgaacaaaacattcttacgacgtgagaggcacctcctgatctctttgatgggtccagaacatgaacgactgataccatacccttggttggaccagttgccgaagccaacaacggtcgtctgtgcccttggtgcaatcacatcgcataccttttcaatcgtcttctgtttaccaacgtatcgaaagaatcgcatagatcggtagcctttgttggctctgtgttgtaggaggatcgggagcgccttgagataagctctgacatggtcctgcaggtcggacatgttgctcgtattaggcgatggaatggacttcacgaggtcttgagtctcgtcattccatttgtaggtgcgacgcttgcttgtattgtacccagcaacttcgctaaagcgagccgagctgaaagactcgatgcgacctgcagaagatgctaccgtgacgatatctgtcattccagggtctactccgacacgcagcgcacccactgcgtcattgcactgtacgatatttgcgtcctttggatagcctgcgttttctccttcttcaacgacctcttctttacccgtctgcttcatttggacggatacccctttaccgtcgctgaggattcggttgtcaaagcgagaccttttcgtctcaagaccttggacattaaagtactttcggcacagcattgtatggttctcgtaacgtccatcgccagagacgctctcgagtggcgaatcacccatgctgagaatcttcatgaaagtcatggaagatatcgggacgtacgaaattgtgaagccgttcttgcgaggaaggatactgaacagacgggggtgatttgttcttgtttttttatctttcggatccactcgtccgacctctcccaactctgtaagcacgtgatggaacaatcgcattgtcaggtgcgctctagtgttgaactgcttccctcttggcatcggaaagagagccctcaagtgactgacaacctctttgatgtggatcgcatgcacgaggccctctgagatgattgtgtcgattttcgattctgggtactggaccaccgctttgacaatcttcttgaaatgtttcttcagagagggatgtttcaagcgcaggtacttgataacgaccctgtccacgtttgcccagacgctgttgcacgccatcgtcgccatttgtattgagacgtctgcgattacttgtccccaaggacgaacgtccaccttcacgtaccctgcaggtcttagggcgtcgaaagcaaccatggtatcattgaagctctggcccagagtatcctttcgaacattggaggttgataccgcaagtaggcacctgtaataaaagttccgatccaggtgtggcaactgcttgacgtcaaagtctccatcatcgaggcatcttgtgatatgaaagtttgcgaataagtatgccactgcaactgcgtggttgattaagagtaccatgctttgtatccttgaggagatctgatgcctcgatacatccatgcacagagaattaagcgtcttcttgacgacgctgatgttaatatcgtcatctcctttgtcttgcactacccccattaagagggggtgagtattctttttcttttggtgatataatattgtacccacatttctttataccatttcatacgttatcatgattgatgcagagataagacaccgcgcggttgttcactagattagatgcattgaatttttgtgtcaatcacctgaagacagtatctgtattgacaagatcggttacaaatcttgatttggtcaacttttcagaatccccaaatataaggtgtcccaatatcaaatgtccctagctgtatgagtttggcaagtcttgagactttgataccaatactacgggagcgattgaaggaggcttgttggtcactattacaagctgggtattgtgttggagtcagaaatacacttgccagttccatatcgagctgtatgtcaatgtatgatcgggggggggggggcgtttgactgtatgcattacctaaaaaataaaaaattgaaaccatttccatctgagcaaagcaatgaaacaaccaacccaactctatccacaacgttaaataactaataatgtcaacagtcggtgagaaaatatggttgcaacttgctaatgctgcatacaaatcacaagatccgtctctgattatctttcccaacgaattagctttgttgttcacattcggagacgctttcttcccagcgttctctcagttcgtggacaatcagatctatggaatggacatgtctgaatgctttgactccatattgtatatggacaaaaggaacagacacaaattgtttgcgctgaaagccttgtttgtgtccgaagacaatccaaccatctaccgaataatggagaggatgtacatcacccgacctggattggacatcaacatcgacttatttggctccgatacactgtcgatctcttactttgatacagaaatccaggaggtcttcttcgagaagatttgcatgtcttggctgcgcgtcagtaaggcagttcgagtgatcgcagagcgataccgcgaacacctccagaggaaaaggaatcacatggtcagtcacgtgctcgtgcctttcatcgtgcgaaaccacgtggcaacttaaaaaccacgtcaactagaccccgttctctgtattttttccatgaatacgggggctctgcttggtatcgacagcgtttcgaagtttagttattttcggaaagcaaacgaggcaactactgttgcaacctcccacaaattgctgtctccgactgtacttccgagagatccttgacagttcacatgcaaacgcaacggcggaaacctgtagcctctttctcgtccacacactcactctgtgaaaagagaaccagtcaaagtttcgccattttttttgtttttgtgtatttgtgttttgcatgcgggggacctggttggtcatgggatggcatgtactccaccaggcgtgcacctgagtcctcacgtgacactccgaacaggccattcaatccagcaatcacttgcttggatggttcttcacttgcttggatggttccgactcctgcatggttgcttgttgtacaatcggacaagggaattatatacaggattcacaacaacgtttacactcgtgtttcgaggaacggagaccgaccgaccactctcatcaaggacggcggcatctgtcgagtcgagtcgagtcacatcacatggcgaccgacctctcgcatcacggcggaaactgtcgagtcgagtcacagcacactgtgatttcgcagacccgtaccgtccccacgttcgtccatccatcctcacacacaccaaggcggctttcgctgacttcgaggcgcgcgaaaaacgtggcagaaatgccacgtttacactcgtattttcatgggcgcgcgaacacacgtgtcagatatgctgacatgtttcccctggttgcgtctgccacccctcgcagaaaaagtctgccatgggtactacagtcggcggaacatggcgagcatcgaggctggcatgtggctgcatatggattgcgtcaaccccatcggccatgtgcgtactaaaatgatggagcaggaggacaacaccgaggtctaggaactgcaataagtgggggaataaatacttgcgcaagcgtcacaaggaaggggcatgggcctcggtagtataaataaataatgagttgggattttataaaaggctatagaccatcctgtgcgcttgcatgcattgtacacacatgtttatagaacatgcattcgcacacgcgatcatcgttaatcctaacgcttccccatgacattcttgatcgtattgccctattctcttccaacccaaagattgtattagtgtgtaaaactctgtgcaaaagattttctggatggccccttaccggactgatccaaccaccacaacgagttggagagattatggcgaaaggggggcgcaccgaccttctagcagtatgcttggtgtccaatcctcttgtacaggttaagggcgtacaattgagggcgaaccaaaatgaaaacaagcttctctatgtggctgccaaggccggtcacgccgatgtctgcaagctgcttatggatccagaggttgctggacttgagttcagggcccgggcgaactatagctacagctttgccttgttggaggctgccgatgaaggtcacgcagatgtctgcaagcttctcatggatccagcggtggctggacttgagttcagggcccgggcgaactctagcgacagcagtgccttgtgggcggctgccaaggcaggtcacacagatgtctgcaagctgctgatggatccagaggtggctggaattgagttcagggccatggcgaacaccagcgacagcttggcattgtgggccgctgctagagaaggtcacgcagatgtctgcaagatgctcatggatccagcggtggctggacttgagtatagggcccgggcgaactctaccgccagcagtgccttgtgggcggctgccaaggcaggtcacacagatgtctgcaagatgctgatggatccagaggtggctggaattaagttcagggccagggcgaactctagcgacagctgggccttgtgtgcggttgcgaaggaaggtcacgcagatgtctgcaagctgctgatggatccagcggtgtctggaattgagttcagggccctggcgaacacaagcgacagctgggcattgtgggccgctgctaaggacggtcacgcagatgtctgcaagctgctgatggatccagtggtggctggacttgagttcagggcccaggcgaactctagcgacagcagggccttgcgtgaggctgccaaggcaggtcacgcagatgtctgcaagctgctgatggatccagaggttgctggaattgacttcagggcccgggcgaactctgtcaacagtctgcaagctgctgatggatccaga

SEQ ID NO: 137 - DNA, 20561 bp, unidentified
  misc_feature 1..20561: note = Fanzor polypeptide
  source 1..20561: mol_type = other DNA
gcgcttccgaagacgtacggcaactctttcaggacgttcctgaactgctggatcgggggaaatggaatgaaggccggcatttgactaacatacaggtgtcggtggagccttacagtagttctcaaataaagtgggacacaccttataatcatccagactgcagatcgttgcttttgggcaacgttggggggggtgaagaggtaaccgtcacatctgtcacatctggcgcatctatcacatccgtcacatctgtcacatctgtcacaaccggtggcctccggtcgcccacccactcggttcctcgcggactcctttatgggggctcccctctggtcgcccccggtcgctccgctgtggggaggtgaaaggggctccgccgcttgttgaataaaatctgcaactgaatacctgaaggcagttcgaacagaaaatccctgttcgtaaaggacagcagccccgggggagttgacccctatgatacccctatggagaattcattgtctttattactacatttcccccggacccgatgatatacgggtagcttaaattcaacggtagcattcagccaggccatcatgctctgggctcaacatgtcatgagctcttggacacgttgtatatattacaaaccttcctcagactcctcacaaaatatttgtagtgaaccacggacctgtatctggtttcaggggatatcattcaaattatactgagtttcccaaaattatttgagaacaactgtatgcattacctaaaaaataaaaaattgaaaccatttccatctgaacaaagtaataaaacaaccaacccaactctatccacaacgttaaataactaataatgtcaacagtcggtgagaaaatatggttgcaacttgctaatgctgcatacaaatcacatgatccgtatgctccgcatctgattcgctttggcaacagattcacttttccagctgtgatgttcacattcggagacgctttcttcccagcgttctctaagttcgtggaccatcagatctatggaatggacatgtctgaatgctttgactccatattgtatgtggacaaaaggaaaaaacacaagttgtttgctctgaaagccttgtttatgtccgaagacgatccaaccatctaccgcacaatggagaggatgtacatcacccgacctggattcgagcacatcaacatcgacttcttggacgaaactacactggataccgcttactttgatacagaaatccaggaggtcttcttcgagaagatttgcatgtcttggctgcgcgtcagtaaggcagttcgagtgatcgcagagcaataccgcgaacacctccagaggagaaggaatcacatggtcagtcacgtgctcgtgcctttcatcgtgcgaaaccacgtcaactagacgtggccacttaaaaaccccgtcaactagacggggccacttaaaaaccacgtcaactagaccccattctctgtattttttccatgaatacgggggctctgcttgtcatgaccaccatttggtatcgacagcgttccgccgtttagttattttcggaaagcaaacgaggcaactactgttgcaacctcccaagaatcttttacaaacaacgtacacattgtgtaagacttaaaagttacgtagttgatgtgaactgtgggcccccctccggtcgcccacccactcggttcctcgcggactagcttaaattcaacggtagcattcagccaggccatcatgctcttggctcaacatgtcatggagcaatgatttggttgctccaatatttttggattagaacccgggtcaaaaccaataccaggagagggtgcgtgtggatatgcgggttaagacactacacaagattttgatgcgatcatgcctgcctgcagaatgaacgatctatcccctttcctaagatctgttgtaatagcgcgcagaatgcgatccacctgatcggatgatgtgtgcactcctccacccgtcttgcacatccaggcgaaacactcacagttccatctgataaggcggtactcgtgcaagcttgcatggggcaactggataagcagactggcaatgttgactgctcgctcacgttgcatcgcctcgtctccttcctcaccactgcaaggcacgcatccaaacttgcggtgtccagctaagaacacgtcgtagcgcacaaactgaagtttggcatcgcgcattttgctattcccggtgggggagctgaagttagcgatgcttggtgtatcgctggtgtgagggcgagatacaatgccatggtgtgcataaccattgcgccaccccccgatcatcacaacaacgtggtctccgtggcgtaaggtctcgaaagccagagctgtgttgtgcacgacggtgtttgttggggccaacgaccaatggccagcatcctggtcctccagcaattgcaataacgaagccatcttgcgtcgtgagcaacggagcaaatgcccttgcagtgaggtgattgcagatctccattggcgcgggtacaggcagctctgaatgtgtattgtcaaactgcgccatacgttggaaggaatctgcttcatgcataacatgctcaatgttggtatctttatcgtgattagatgagacgacaatgaggggtttatatttgttccaggttcagtgaagctcagtgaagctcagtgagtgtgactgaggactcgtacgctattcttcttctacttttcgagagtgtacggccacaccggagtgtaacctaatggtgtagcaattcatggggcaggagaaaatgattttttttcgtgttcattgtacgcagggggactggacaagtagcagttgtgcaaggcactgagtcctacttagtctacaaccggatgaggctagacgagggaccgtcttggcaggttcttcatgttaggttccttgccatccaacatgaccagagctgcctgattggactcgggagtcacattcgaaatacatgtgaaaaagcttagtcaaacaaattgtcgtgtgtacactcgtgcaacaacaggattccttgtaccggcttcagttccgagcggatggtagtcgctcacactcaatgatgttagtgtttgcttcgtctacagtaattctcaaataaggtgggacacaccttataatcatccagactgcaggtcgttgcttttgggcaacgttggggggggcagataccactctcatcacggcggcacctgtgtatgcacaggtgccgctatggccctccccatcaaaaaataacgaaagtaacaaaattcagggaaacctaccattctacatcacggttgttctcatcctcaaccaaccaacctaaaaactgcttgtcaatggatgagaaccaccgtaccgcattaaacaagtggcggagcccctttcacctattccccacagcggagcgaccgggggcgatcggaggggagcccccacaaaggattccgcgaggaaccgagcgggtgggcgaccggaggggagcccacagtgtaacatcaaccagcagacacacacacacaccggagggggcatgtcgaagcagaaatcgtgatcgtaggcgcgaaacaagcaacgcacgaactccatcttgagggcatcgtcattcctgaaggcacgggcgagacggcatcttcctgaaggcagttcgaacagaaaatctctgtttgtaaaggacagcagccacgggggagttgacccctatgatacccctatggagaattcgttgtcttccttacactcgacggaatactaaaatgaaacagttttacaaaatcggcctcataccacaaaacgagcttgaactgcgcatgaaaagagagtgcgagaaacaattgccgatacgtacgtcggatgttcaggctgaggaggcacagcagcagctgcctcggttacctcagcccggcggcagagttcttcgatcgcatcatcagcttgaggggtgccgagcatcgccctaagctccgatacgtcctttgtgtccatcctgtatacaactgttcaagacatatatattacgtggcaaaacgagaagagatttcttcaaccccaacacaactacacaaattttaacatattcaaatacagtcgacggaatactaaaatgaaaccgcctcgtgtacggcacaccttacggtgtaacctaatggtgtaacctaatggtgtaacctaatggtgtagcaacccacggggtagtggaacaccaatacgattttgaatcaacaaattgcaggatgttaacgagaatatcgtggttcttttttagatcacggctctccatactgcagactccgtatcgttcttttgtcggtactttcgagagtgtccattgaaggaccagccgcacttaagcgatcgcctcttccccagtaccgtggcccaaaagaacacggggtctttgttgatgtgcaatgcgttatgtaaggaggtttctttgctggacgggtcattttataggaccattcactcaaacaatatatgattgtcaccacattatacctgttttttgatgtttcattttactgttccgccgactgtaggatatacgggtagcttaaattcaacggttttacaaaatcggcctcataccaaaacgagcttgaactgcgcatgaaaagagagtgcgagcaacaattgccgatacgtacgtcggatgttcaggctgaggaggcacagcagcagctgcctcggttacctcagcccggcggcagagttcttcgaacgcatcatcagcttgaggggtgtcgtacatcgccctaagctccgataaggtctttgtgtccatcctgtatacaactattcaagctatatatattaccgtcttataccgtttttttgatgtttcattttactgttccgccgactgtagttctcaaataaagtgggacacaccttataatcatccagactgcagatcgttgcttttgggcaacgttggggggtgcagcaggttgaagaggttctcgaagatacaagcctctttggtacaagccaagctcacttctctttgcatgacgaatgccggttgaaacaaagaacctcgcatctcgttgtttgcccccaccagatgcaagacggatccgttgaacacacgcatgtgacagcgaatggcgtcctcaatcccagagtaacaacaacattccctggtatacatgatgctgccgatcgctttcacaaatgcattcagtgtttgcgagttcaagactgcgtcatcggttgcagagatgaacatgcaccgtcgaagtttgttgttgttcttgatccctctcagtgggttgaggccctcggaaggccgcgcaccgcaaaacaacatgaaaggcaacactgttcctctgtgatgcattgtcgcatttgacacctcctccagtgacaccttcgccccgttggtcatgacgagttggccggaggatccatgaccacacaagacgatcacgagcaccgagtcatcatgtgagtgtgccacgtgatcatccaacagatccatcagctccgccttcttcaagtgcccaggaagcacaacgacatgaaagttgagtgggtgcaaaaagcgaacccacgtgctgtggtgaccttgcatgtccaaaccatccacattcttgcccaacattgttcctgcttcacgcatgtgcacacataaagtcctctgaatgtgatccgtaggaacataagtataatcaacatacaacaaaagtgccttgctactggatgatgaagagggcgagttggttggcagctcatgttcatggtggaaaaattgatgatctggctcttcttcatcatcatcatactgcgggagacgccgacgcatttcgtcaaatattttgaccctgagtacagtaaacacacgatttcccccttatccacattcacttgagtacagtaaacacacgatttccccttatctacattcacctcgcggtggggacctgcaagcaagctatcagggtgcaatttgtgatcttgggccgcatgaatccacgaattatgatcccaatcactctggtgtccaactaaaagtcctaattaagtttttgatctcagagatgtcggtgagaggcgttggccaggcagagaatccatgattctcaggatatgcgagccacattgtaacccgatgtctaaagtcatcgatagcctctgatattgttccccctattcccccctgacatgccaacaaggaatcttccacagttcgaatactgcaaatgaaacctgatatcggactactgtcgtctgtatactgaacggtgactgtgtacgttggtggcatttgtatgatttttagaatgattgggctttatttgtaaataaagcacgccttataatctaaaaactgaagatcgttgcttttgggcaacgttgaggggtgtacgtacccatgtcatcgtactcacctccttatattcaagcatgtgattttggcacggcatgcaacgcatctcttggaggggtatacagaggcaggcagcgtcggtgataggcgacctgaactgtcaagtcatacacgtccgtacacacgttaagctggatgaatacaatgaagcttggtgggcggactctacaagtggtctgtgacaaacgtaacagcttccgacccgctcctgcgcttttcttgtatgtcgagaattcttaacgccaattttataatggcgatgtcgtacatttatttccaaatattgtcgcttatgtattaaaaacaaccaacatgggacacaaatttgtcatcgtatctgcctcttgtccgtcacttgaagcatacaaccatatattacatccactataggaaatcatggggtttcgcatcatagcactggataagccccttacatattgcattactgaactactatcggtgtggcaggtgacttcattgccagccatcagagatgacaatggactcttctgcggccgtcaagcactgatgtgggcgcaggagaaggggttcgacatcacagaggatgctctcgatgcatgtagtgtcacaatcagcgaattgaaacaactgactcgcgaaaatagaccaggggggcaaagagtgaatcctgtgcatacattataattctctacggacattcaaaagaaaatgtagaaatgttctgtgacaagtacagagaaagctctaacgttgtttgtatcgacgaagcaggattttacgcaggcgaacaaagaaaatttatcttttcagaggtgttcatgtgaacacgtttaaaatagggagcaattcgttcaattaaaatccggaggaattcttcagtatttattttttgttgaaataattgttgttcacgagatggagtgtgcgtttttgctgagtttgtgagcaatgcacttgtcattcagcgcggatacgtgttcggcccctgacaattttatagaagtgcctacacctgttcttcattggagtcccgtcactccacacatgatattgtaagcagttgagacaagactgcagctgcttgttgtgttgcaccttgaattccgcaaaaatgtcttgctctacatttttatacattgttaacgaaactagatcatgcaacacctttgagtcgtacagcatgatctttgtttgcgtatcaatcatgttgatgatcgtgtctaacacatcttgtggcaatgcacccatgagctaagatgtgtttttagttacactcagaccggtcaataatgttacagtatattgaatcaattccaattctctatgtacaacttggacagacggtcgattgttgtacacatgtacacattgctgcaaagtttgaggagagtggctatacttgcgaatgtaagccacatgacagtctcgaggtggatctcaaaccccactaaaaaacgaaacttcatttggaagacatacgagagacgtgtttggctactcaccaaagggagagctactggttgtaccgaggttgagacctagggtgacgacaatgtcggcactttgtcttattcaacaaggcaaaggagacatttattttaacatcaggcaagggtctttcaacacgcatacttttgttgagtttttagaaaatttggactgtccaactgacacagtaattatacttgacaacgtggcgtttcaccactccaagaaggtcaaaacacttgcagcttcaagggggtgggagctcctatacactcctccctactcaccttggttcaacccaatagaaggggtgttctccatcgtcaaacgcgatttctataaaagccaagatgtgtataaggctttgagttctgttaaagagaaacacgtagaggctttttttcgaaagtcattgaatacaatttctggaccttgatacaaggaaatagcgacattggctactaaatggagacgatagtcaataaagagcctccggacaagcgtacgcgaccggaccgggcggccaaaattaaggacaggaaaaacggcgaggagaacgtggtaaagtgtacactgagtcggatcatagcggataaggacaacaaggacgttatcatcaaggtgattaaggagcgggtcgacagcatatccaagaggacttatcttgccggtgttgcggtgaaccggatattaaaagaagtcttcgaaggggtaccagatgcgcaacttcacactgtaagtgtccctagcatcgaccagaacttcattcggcagcttatggtggggtcgagacaggcgcacatggagacgagggacgccacagtcgaaaggttctttcacaacaactattggtttagggagaagattgaggggcgcgaggtaattgtgaaaaagaagaaacaatacgtgggtgccatcgctcgctacgatggcgatcgaaacctgtacagccacgcgtcgaagaagtacctgaccaacttcaataaacactacagagtccatctctccacatggatcaagaagttcgtttactcgaaggaaaacaggatcttggccaaggagatcaaagatgagcacggcattgacgagacagtattccaccgatacctcctctacgatatccactcttggggagtaaaggaagacctcatagcgatacattctctcctaccggagcgaacaaagatgttgcttaagattcagcactcgatcctcggacgggacgagatcaaccgacagtggctcaagagcgtttccaacagcgccaagatgatccggtacaacgtctttatcaatcgatacctcgaggccacagaggacgagggctacgccaagctggtcaacatcgctcccatcccaacagtcaagcacgccttcatcacgatagacaccgacggcctactgggcgtcctcaaggacgtgggtctcatcgagagtctcgaaaagacgctgacaaacaaggagcactgggaatcggtcttcaatgtggaaaacatctgttctactgggaaaggtgtgtttacatgcaccatagacactgacggcgtaatggcttgtacccactttcttagggccgagaagaaaaagatttcaatcaaggacgacggaacggcgattaagaagcagaccaagactctccgcgagttttccgagtccgaccccaatatggtggtcgttgcaaacgaccctggccgctgcaacattgcctttttgacttggaagaaaaataaggttgaagaaaaagataaggggggtaggaagaggaagaggcactgcgagttcgggagcaagagactcacgcgggagcggtactacgttgagagcggggtcttcaaatctagagggccgaccaagaagtggttgtctaacatccaggactgccttgacgacctgaaggacaacagtcccaagcgcacatctctagtgtcgtttgacgcttacgtgactgtaatggtcaaccattgggattctcgatggggggagatgtccaagtcgaggtggggcgcgcagcgcctgcggctctatggtggcaagaaacgtgtcttagcacgcttcttcaacgaggtccaggcggatgtcggtgagaggaaaacaattaatgggcgttcctgcctcccggccgatttttttaaatttctaatcaggatttagagcctcctgaacgactcgctagcttgagacatcagcaccaaggaatcacaaatccgctccataccatgtttcgcaaccagtcaaaatcggccgggaggcaggaacgcccattaattgtcatcgcatacggttctgctaagtctgcccctggtggcaagggtgaactttctgtccctacaacgagcgcgttcaaggcgtttagcgaccgtttcaaggggcgagttgccgtcattgacgaattccgtaccacaaagatctggcacaaggacagcaccaccgtcctccagagtgtgcagtccgaaaaagaagggcgcacggttcgaggcttgctatggtgcagttccaccatggagaacagcaagttgtttgtaaaccgtgacctaaatgcagccattaacatccacaattgctttacaatgtacccaatccgccccggaattcttgcgaggccaaagaaatattgcaaactggaagttgtggtaggacgcaaaattgattacaagctgacaggttctttacagaacgcagtgtcgagcgaagtgtaggagataaacacatacaagaggattttgggggactcgggatattatgtaacataattcccttgtccgagtgtaaagctaacgggataaacatgtatctaagagttacgcgcgcgacggcgtaagcaaaaactgcggtactaatgggacaggggggggcacgggcaaactcggtatacaaaatataatgggggtggggggcaacggggaatagagtactgaaaaagaaggtggttacaatatcccgagcgtttgtgggttgctacacccttacattaccatgcgattcacaccaaagcgtttccacctctacagtcggcggaacagtaaaatgaaacatatataatttccatctgtttcattttactgttccgatgactgtaggtcacacttgtacttgtcaaattacgtccgacgattgttgtatgcatctttgaaattagtgtaaagttacaggcggcggcgcgacgctcccccagtgcatgtttgtaagtcaatcatcagtgtcacagtaagccttcatctgacgtagttgttcctcacgaacattcgctaccctaacggatcctccatgtcaagtcgtagcatccatagtggaaccgttgcacacaaacatagcttgctgctgctgtctgcaaatccttagaatttgaatgccgcagtaagcgatgacatatgaccgattaatctcgatgatgtagctgttctccacacgcgcagccttaatggcagttacatctgttgtatcatgcacactcatctcaggtgtgaacactgtgataccatctgcattctctgtccaaacgcgtcccgtgtggtttgacaagctttgaagcttgatgactatgtctggcgccatgtcactccggagcatgtggacggtgcgattcatatagcttatcgacatgggaacaatgcctgtagaagtcatgacagcaggtgtattacacacacacataaatagttgctttatattaagaatgaggcctccgacaaaaaagaacggacgcttgatgaatggatcaagtgggccggtgcgctccgcatgaacgcatcgaattgcagaaaaataacaaaatgcaacgagaaagtatcggatgcgggtgaagtcgttgacaaaacttcaaagccccgtcatcctcacgcaaacggtgtcgtccagtcatcaatcatcctcgtccatcggagtacacacgcacactgtccagtcatcctcatcaatcatcctcacacatgcacggcggcttgcgcatacccttgttcgtccatcagcgtccaaacgacacacgaatatatgtcgctggggccgggctggggtcttcagggtcttgaggccgggacaaggatatgtcgcggaggccgggctggggtcttcagggtcttggcaaatcagggtctcaggtcgcgacaaggatatgtccgacagggcgatgcggggaatcaaagacaactcacgtagaggagactgggacaagagacgggactccaggggtgactcttgactcggggttacaagtgaattaagatataattgaagactcaggcgtaggcactctattcatagcttttcctatcggaatattcctaaagaacattcctcgaacattccttcgaaaattcccaattggatcttctctcaaagggtcgctcccaaacagacctttccctaggaaaatcccccacggaaccttccatcggccaactagatctcggatcgggaacattggacggcctactattgcgacggaaccttacgcaggtcctcgcccaaactacaactcaaagctctcatatctgactgtactgcgctacgtgcgtgtatctttgtgtcacacccgaaaatctgacacacgaaaatctgagaggggggggggtcaatccacaatccctagctacatcaggtgactcgccagggcgtgcatctgctactgcaagtttttggtcgacatacacatattgcagttgcagccgctcacgacgtgtcctgcggctctcatgataccctcctcgtcctgcctgatctcgaaaggtttctcccgaaaaagtacacagaatgcatgttagccattgtacatgcgtcaaatgaagtgaggcctctctcgaatagcatgtgcatgatggtaatgtgcccgtgtgcgaatgccttgtcatagtgatcgtcggcgtagccagttctgtctatcgcattagcgtccagtaggatctgcacgacctcagcgtacccaaacttgcaggcaatcatgaatgggtcgtcgaagtggttcagacggagacgcacgggtcctccagtgatgaggaaactcctcacgatgtctgggcggttgcgtctgatggccaggcccatgcactcaatgacaatcttgtcattgatgacatccttccagtattcttgcatgcatctcaaagcttcaatgctcccgtcactgtgtatggccgccgacgtctcactgagcatgcaagagcgtgctactttgggagagacatcagagttatcttggactaaagcgagtatgcacttcatgtttcccattgattgcatggcacgaactgccttccgcatggagcagaatctattcaccaacagatgtcgcatgtacccaggggtctcccacgctgccttttgcatggagcggctcagcgcccacggaaaaggtgttgaggatccgctacggtccacagtcaatgatgctatgtgtagccacacctcggttgggatcccatgatatgggacggatcccatgatgttgattgttgtgcctaagggaaacaagtgcgtggaattaaatgttgtaatcatcaaatgaaggaatcaatgaatagtcgatgatattgatcgtgtttaccttggacgtgaataagcaagtggggataagtagggatttatttatgtggtgaatgggttttgtgaatgaaataatgaaataatggaagaataaatagatggcaaaacccgctccgcgggtatccttgtatccggggttttagctcctatggtttacaaatgatgggcatcgttcctgccgcccggtcgatttgcacggcacacaccgcatgccccatgcaaccccatggcacacaccgcatgccccatggtacacacagcatgccccatggtacacaccgcacacaccgcatgccccatggtaacgcacacacgtacccgcaggccatgggtacacacacatgcccatggtaaccaagaacaacgcacacaaacggaactaccgcatgcccccgttacacaacatcccaatgtaacagaccgcacacataaccaagaccgcatgccccatggtacacaacctcacacaccgcatgccccatggtacacacaccgcatgccccatggtacacaccgcacacaaaccaaagccatatccgcaatgcccgtggtacacacagcatgcccccattgtacacaccgcacacaaccgcatgccctccgtgtgtacaacccgccacgagaacaggcagccccattggtagaacacctcatcccccatgttacacaccgcacacccgcatgcccattgtacacaaccgcatgccgcatggcacacaacccgcatgcccatggacaaccgacaccctctgcccccttgccaccctcatgacacaccaacattccccaaatggtacacaccgcacacaccgcatgccccatgcaaccccgtggtacacacaacatgccccatgcaacctaaagacctcaaatgccgggcttcgcccctgcacgaaacgtgcgtgatcctgtgttgtaaatctatctatcactcttcttcacgtgcgtgtgcgtgcgtttgcattattgcatgctttcggtcgagtccgacctttgcatcaatcatattaacgcttttaacgcgcacaatgtgagacagcaggagaaaagacacttctgaacgggtttgatcggttacaaagattgatggtcaactgtcaaaatcccaaggtgtccattttcatcagatcaaatcacaaacgtagcggccgtcgcgaaggggtgccgattgtacagaacacacacttgtattggcttcttttccaacagtcttcgcatcttgcagctttgcattccttgcatgaagaccccttcgtgcgcagatttgcgcattgagggcaacaccagttagcacccgcggcaccctcatcttcgttatcatgcgtcaagtccacttccaatgctctctgcccacgtttggcacgttgcacagtcagaggcacaacactaacactactagggccagctatggagttgcggcaaagagggcacgaattcagtcttggaaagcagtctccgcacacgaggtgatcgcagggaagggcgagcgctgcaacatgattgtttaggcagcaaggacacttccacaaagggcgctcgatctcaaccacctcgacctcattatcaaccacctcgacctcatcctcaaccacatcgacctcattctcaaccacctcgacctcattctcaaccacctcgacctcatcctcaactacctcgacctcattctcaaccacctcgacctcatcctcaactacctcgacctcatcctcttcatctgtagtcacaggaataaaatgaaaacccgtgtcagatattaataaatagagaaacacgggaaatgtaaaacgacatcgcagttgtacattatattaaaagcaaacaattgcatgtaccttggtcctctgacgacgacgatatatagcctgtcaagttgacataggatgacttgggtatgtttcctgtgttacgaaaaaatggagcataaaatcagtcaggcaggcagtgcagcaacagcatttgactatcctgtaatatagatcctacaagctcaactcgatctagcatcctgtaagttatcgaacaattgcgacagtgcaggcaggcattgcagcagcagcatttgactatcctgtaagctaggtccgaccagctcaactcgatctagcatcctgtaagttatcgaacaattgcgacagtgcaggcagcattgcaagcagcatcatttgtactatcctgtaatcatatccgaccagctgaactcgatctagcatcctgtcagctatcgaacaattgccgacagtgcaggaggcaattgcagcagcatctaacactatccggtaagctaaggtccgaccgcgagctcaacctcgatctagcatcctgtaattttcgaacagtcgcgaagtgcggaatggccttgtttgcctctcattcaagcaggcaagcagtattgactatcctgtaagcaagatccgccagctaactcgatctagctcctataagcgatgaaacaatcgcgatttaaaaacgccgattgagcgagcgagcaagcaattcctgagcaatgcgagcaagcagtttcctgagcgatgcgagcaagcacttcctgagcgagcgagcgagcatttcctgagcaatgcaattcggcaatgcaattcaaattagcgaacaggcgatgcaactcgtcgcaaaatcatggaagctatttcaaagacacctcaccttgggcctcagaatttccaggaattgagtggtaaccagcgaaagatgtggtgcatcctcgctggaccgagcatatgaacctaccaaacccttatcatgtttcagctgaaactctcgacgtttgacatgtctatcctgtgacacgtcacctttcaccgatgcgagcgtttgctgtcagccagctagcgacacgaacctccgggcatcgtgtggtttcgcatgtccgggcagcgtgtggtttcgcatgtccgggtagctcgcgacacgaacctccgggcatgccccatgcaaccccatggcacacaccgcatgccccatgcaaccccatggcacacaccgcattccccatgcaaccccatggcacacaccgcatgccccatgcaaccccatgcctcatgcaaccccatggcacacactgcatgccccattataccgtttttttgatgtttcattttactgttccgccgactgtagggataggaggaagacgggtatagatatcgggcaggaagggggggggggggggggggggctttgggcaggagatttggcttgcggggccagagaggtaaggtgatgtcgggattagggagaagggaattgatggtgttccgcagggggtggttggtgttccgcagggggggtccgcaggggtgttccgcaggggggggggttggtgttccgcagggggtggttggtgttccgcagggggggtccgcaggggtgttccgcagggggggtggttggtgttccgcagggggtggttggtgttccgcagggggtggtgggtgttccgcagggggggtggttggtgttccgcaggatggttccgcagaggtgttccgcaggggtgttccgcagggggggggggggggggggtggtgttccgcagggggggggggggggggggggtgttccgcaggggggggggggggggggtgttccgcaggggggggggggctttgggcaggagatttggcttgcggggccagagaggtaaggtgacgtcgggattagggagaagggaattgatggcgtgacgcagtggggtggttggtgttccgcaactggatgcagttgacttttacaaaaaaaatcatggatgcgcttaaactgccaagcacattcacgtgcaatgactttgcagatgtcctggagaaacacggcatacacgaacacaacctgagttataggcccggattcatatttccacctttgtacacagaggacaaattggcagcgtttgtgagagagtgcggggttctcaaacgacagtacacggacatgttgagaaacgattgagtattcaacttttacaacggagactaatatagattttgaaactgaagtagtttctaggcaactccgtgacccaaactgtatcagaaacacccccaatcaaagggggtgtgatcaggcctgcgcgcattgcagcttctaggcagctcccaaagccatcaatcgtgctctaaccaccaaatctcaagagaagtttggcaacttctacgtgtccaccctgtctagccaacgccagagcacgccccctctggcgtctaactgcttccataagagcagctcctcctagacagtctgcgtgtgtagggtggactggagcagacaggaggagtctgaccacctcggtgtggccaccctcggctgctctcagcagagcaccatccatctggtagtccgctcgcgcagggtgggctggagcttccatgaggagtctgaccacctcggtgtggccaccctcggctgctctcagcaccaccgcatcgatggcctcagctgacaccagctgtttgtaagaacataccaatgtaccgtgacgtggcgacccctcattcatgccatgcccacagaataacaaaagagcaacgtccacggagggctccaacaaccaagccaattggttcatgacggtcctccggtacacggtgccttcgagaacactgatctccataccagaacccaaaaccttgttgacaaaaacatcatggtccttcatggctccgccacatctgtaccccttcaagtcccttggcagcgtaccacactcttgcaatgtgtgcataagcacgggtcccaacccgtctacgtagtaacttggaaaaattaacaaggcgcgacgagtcttcacggacgccatcatgtgctcctactctcaaataaagtgggacacgctgtaatttccttttttgccaatccgataccgcgaattaataataagaagtgtctgtgaggtgtgctggcagtgataagagtccgccgtgttgttgttatgctgcaatcaatgacgatcgatttccagtgtggcattctcaagccgccgcgtggcatgatgtgtgataaggatggacgagacgctgcctctgccgtgcgtgatggggctgggcgataagccgccgccgcatcagttccgtgcgtgtgcgtgatgagtctggacgaggagccgccggcgtgcatggattctttggattgctttgacttgcatggacttgagttatctcatgagttcttcttgcagagctatctacttgcttgatactgtattggaccgtacttgtttgtggatgcattgagatgagatgcattgaggtgagatgcatgagattgcattcaagcgtcagcactttgtctctgtacgtttatatatagcgttttcttgtctgctgcgcctttagggacatgaacatggagccggcccccctgcaaaaccaactacccttctacgtcacccaagagcagctcgttgcattcgagctccgcatcatgcaacgcatgcagcaacagttgaacgacattaatgatgcgcgcactgagctcatcacagccaacatgcacatgcaacaacagatcaaccacgtgcgcgacgcagtgcgggcgctggagcacaggtgcggtgttgggacattgacctgtgcggcggttgcgctaaattcgagattttaaccgggcactttttgacacatgcctgcaggtgggatgccggtgcccaggatgcgccactggcagagaacaagaagcgctccgcaaaaagctcctgcacgaaacacgaatttgcgtaagttttaccctatagtgcatcccggtgtctcacatgcagaagcaggggcacaagccaagctcacctctctctgtttgactgatgacggtcgaaacaaagaacctcgcatctcgttgttcgcccccaccagatgcaaggcggatccgttgaacacacgcatgtggttgcgaatggcgtcctcaatcccagagtaacaacattcaccggtatccatgatgctgccgatcgctttcacaaatgcattcagtgtttgcgagttcaagacagcgtcatcggttgcaaagatgaacatgcaccgtcgaaattggtagttgttcttgatccctctcagtgggttgaggccctcggaaggccgcgcaccgcaaaacaacatgaaagacaacactgttcctctgtgatgcattgtcgcatgtgacacctcctccagtgacaccttcgccccgttggtcaggacgagttggccggaggatccatgaccacacaagacgatcacgagcaccgagtcatagtgtgagtgtgtcacgtgatcatccaacagatccatcagctctgccttattcaagtgcccccgcatcgcatcgacatgaaagtcaagcgggcgcaacaagctaacccacgtgttgtggtgacccggtatatccaacccatccacattcttgcccaacatggttcctgcttcacggttgtgcacccataaagtcctctgaatgtgatcagtaggaacataagtataatccacatacaacagaagtgccttgttgcgggatgctgaagagggcgagtaggttggcagctcatgttcatggcggcaaaattgatgatgatctggctcttcatcatcatcatcatactgcgggagacgccaacgcatttcgtcagatattttgaccctgagtacagtaaacacacgattccccccttatatacattcacctgagtacaccagaaactcctgatgatggccactgtagagaacatgaccatgaccaggcatgcagcaacgactcccgcatgtccagggtcgatccggttccatggcatgctgcatgagcacgcaggaaaggtacgatgactctctcccccaccccctgttactcagctaattgaatctcctgggattgctgattgaagatcctgaaaagtacattacccccccttagaacgagatagttgcctatccaggtgacgataaaaaaatcattcccaattcgtgcagcagggatggcagagtctgctactatcaatgtgaccccctctggaatctgaattggctggtagatgataggggcctcagcctgggtatcctcagccacggggtgttggacctcaaaccggatcttggcaatgttagggtccagtcgctccatgaccatgtgcacgccatctccgatcagtctgcggtacaagttgtcattcttgtagctgaac

SEQ ID NO: 138 - DNA, 22982 bp, unidentified
  source 1..22982: mol_type = other DNA
  misc_feature 1..22982: note = Fanzor polypeptide
agtggtgaggttaggtacacacaatgtattctccaatgtaacctcaaacttgcattgtggagtaacagtcagtatatccacatcacctgagcacaataccggcatagcacttgaatttgctgccgttatctccggaatactcggcgtatagcacacgtttttcatcttgtttacgtcggttatcatatgacgactcgcaccactatccaagtaaaagtcatctttactataatttccgttcaggaaaatagccgaaaacgcatgtgtcttctttatttgcgaattattctgtttgcattgtgatttgtagtgcccaaatagcttgcatcggtaacatttaatatttttctcagatttgtttacatttgagccggccatagacactggctgaactgacactgcgccgccatgactaaatccgccatgatgattcttcgcatgtctgccaacatgaccgctggtagcacgactgtgctgccctctgctcaaaaatgcattaccggtttctgcattgtcacccgccatatcgaaaagctttgtcttcacgacgtctgccgtaatggcgattcccgaatgttctatggccattatcattgggtagtatttttcaggtagacccgccaacatcaaacagccgatccactcgtcatccactttaaagcccgttcctgataatttttgagcggtttcaattaattgcgtgacgtaggtagtcatcgaatcgcacgtatcaagtcgaatcgagatcaagttacgcaataaactgattcttctcgcaaaaccggaatcatcgaacatagcttgcaatttctgccacaaatcctttgtgcatctagcttctttaatgtggacatacagcgacggatcgatagttaaaattaacttggctttggcttttgcatcttctgttagcgttgattcttgctttatatatttctccatgttttccaacaccaacatattctccgctgcaaacacccattcgtgatagttctcacgacctctcaatttaggcacgttggtcaaaaaagagttcgaagccatttttaattttatcacttataatgtttatctggcgattatcactgccgcacctactcctatgctagctaacctaaaacaaaactttttagaattaacctatagggcgcgactgggcccataacctaatctgataaaaagaaacgacttgttcgtttgatacccaatggcggacagactttattcaaaaaaatcataagacaggttataaacaccacagacaaaagataggtacttatttcttacaacaggtggcgcagcatgtttatttgatgttaccattataaaataatactttctaacacttttctataagagaatacaggtcactgtttaagaaaggctatagtattaccaatatgccttctctatacatcccaaactctacaccgcgtttaaaccgacttcattcacaagatttagtccaaaaatccacttgagtgagatccttccaacatgacaccattcataatcctcgctgtaatgctgggaatttcagaaggtgccgctcccggtaccaggtgtaacgacttcgaagccaactttaatctgaaggatgtgattggttcgtggcatgttgtggcaataatacctgagaaattgtttcctgaaaagcaagtgacgtgttacaaggtggatattagtgagactgatgaggtaagccttaataatttgataattatgattgcaagtataatccagcaaaatgggacagtagcacgtagcagcaacgtttgcagattgaatttgtcaaaagtataatcagaacgagaataaattgtaaaactttatttttacaacttacataaaggtgttcaatagataaagtaccgcttattgccatctcccgcattatagcaagttctctacttgctaataaaaatttaaacctttaataataattgtatgatctttcgaaatcgttgacctaattttaactaaccagttaaattttaacactattggaatgtgttcttggtaccagtgatctcgttgaaatctacattgacacagtcaaaaacttttaaaaaaaaaagctgtagaaatattgatttttcgacacccaccatccatagggcttactaccagttcagaaagaaatattactacctttctgaaagagagatttcgcttcaatatagtgatataatacaatatttcaccactttcacacgacgccatgtaatctcaaactaagcaaagattatattataaagtactagacaactgacaaaatatcattctaaatgcaaacaaattaatttaaattactcccagacagagaacaaataatcgtgctcatcacataaacattaatttgccctgggtagaaattgatccgacgacctccgctatagcagtcaggaccactaaccactacaccaacatgttattaaccgcaatctttatattacaagaagggttatattcagtttcgttacgtattcagctcgaagatattccgtacttattcatcatcaaatttaaattcctcattccacaggctggtctccgatggttaatcaataaaacaatagagtctccaacgtcaatgctgccgaacaacaagacaggtattataatacgccagcggtaccactccgaacatccctttgatgtctggtctaaatccgtgagcgaagtcagcggctgcttccaacaagttatttcattggatttggggaaacatgacattcgtaagtaaattgatgaaatcattgtaaatgaacgaaccgaacaaaagcgaaactaaagtattgatataccggcaggagaaatacatcaactgtgaataattagtagatttaaaatgaaaatacccacgtttttgtcactccattgaaattttatcaacctcggttcagccgtttaataattgtaaattgcattgtcatcgggtttgaagctaccctaaaaatttcagcctgctagtttatcgggaagtgcctcaaaattgagttacaaaaatccaaccggaacgaaaaataagcaagaaagtgagtttataaaaaaacgtggggaaattgcaactcagtagttattacgattcatgagatactacctggtgacagacagcgaggcttttaaccctttggatagggaatcgtttcgcgggtttgatccccgcttaaaacaagtatttgtgtggtccaagaatgcttgtcctgagtctgggtgtctttttgcttgtgacttgaatattggtaaataccgcacggcaaaaaaataaaataattaaccattttttcattttgattttgtttattttatagataaagccctgaaacatgacgcgatgatgcagctccatctgctgcaagagcgaggctcggagccattcctgctgcagctgctgtggggacggatgatcactgtcgtcatctacaaaaggaaacaggtattacttaactctacaaaatatatgaaacagatgtggtaagaaaagcagtgtaggataagtttgtttttttttgggcagcatattaaaaaaataacttattataccaagataggcacaggcttttttccgtacatgataagattgagaattgagtcatttctgaggagattaattttatgaatataatataggtatttattactattcctagaatggctcatgatgagcatctttagttactcaggcaaatacctatgtttatgccgtgtgaatgtatttttattattagaatttgctttgttgtggatctaggtacttctcaatttgtaaactagttgttttatatctaatcatttattttattttcttttagggagtgactcaagatgaactgaaaccagtatttgagttcatgaaccaattacgaggaccacagcggcttccgaagatttgcgacagccgattaaaagacttgcttgtgttttagaaacaagaccttgatattaaaatgttaaacaaattattttcctgtaatatttttgtatgggcccatgtaggttgcattaaatttattttataccaccgcgattactcaattattataaaataaaaaaacctttaacaaataggtattattgtaataactttcgtgaggcggataattcataacgtttttactaggattatccgactagtttcggacccaactccagtcagataaatctgctctcattttctcaatttttgcaactttattttgaaagtttttgctagcaagtaagaacataataaaacctcacatgatattgcttatcaatttaaaatccaatgaatcttcgtttaaaggtatttgccgtagaccatggacgatgaccggccagtaacaaatagtgctcgctcacgccaccataaccctgcaccgctatattgtaacgaaatgccaataaagcaaaaataaactaacgttttgcgccaaagagtatcatttgattcacagatatggctacattttgttgtaggtattaactccgtccgtctgtgtaaggttgtgttttgttacattttattaaataaagttgcagatttattgagaaaaaaaaatcatttttcagggtcatcttctttaaccgtggcgatttgacgtgacgaatgaagatgcttcttaacccgttggtgtggctcgggaaattaagaaaaaaagtgttctgaatgccttgatcgatacacaaaatacccctcctactggtttattatatttcgatcgttgtatttgattactaacgcggataactaagtgaactaagatttcttcatgcaagaattttcagatcatgtagatctgaaaattcttgcatgaagaaatctcttagttcattttctacttaaccgctatagacggaaagcatattttcaggtcctttataaataaattaaggaacaagtctcgcacgacgtctctacagcaattattttaatctatccagtcttttctattgtagtttcgtgacattaccttattaactgcctttctttattgctcgctatttcaaagataattctttttggttgtgttacgttttgtgtggaacggtgacgttatgtggttcattttgtcattacgaacattattgcggttaacttttagtaaattgttgaataattcactgaagtagttaggtgacacgaagggtcaaaaccgatatgagaagtacaatatttattgtgctaaaggcgagcattgtatacctcttaagctctgagtttgaacctacaacatattatgtgcctattttaccattgtaattttaatatgtaaatattaaaactaaacaattacgttgtggtgctctggcctatagattttttgattgtttcaatgcacagaaaggctttcttgcgagtataggtagcccagcggcatcaggtgttgtatgaaagcctgtgattgattcgcgtcggacaactcgaactacaaatgcattgaatggatttttgtatacaggttgatttattttaaggacaaaaaatgaataataaatgtaaatttttgtaggtgttacagttggggagaaatcacatctaacttagaagttaccgttaccgtttattaagttaacttttatgcaacgaaaacaaaataaaattaaaaatacaatcagagtcagttactagtactacgcacgaagtggtatacatttcaagaaaagaaaattagcctcatcagaatgtaattttaacgtaattttccttttttttatttattttcttactaactaaaaaaatgtcatcttaagacagcattttacgaaaaatgacaaaaaaacaaattcccatcccctgtagcgtatgacaggcgatacacgctgagtccaacacaaagggggttccactcggctcgttttatatctattgtttatgcgcgacggggacccttgacggaatacatgcttaatgacggtagccacggtataaataaaaacacgcttttattataaatggcaggaggatgtttcgatttgaatacatcctgtatatattgagtttggtgaagattttcttttgtttttcaactagcagaaaagcaaagcctgttgtttgagacctcaactcaggtgaaaaacctgaacactactttaatttctgttgtgatttttgtttaaatattacattacctacatttatttgggcagtcgtgaaataacgaaatgttgcaaaagccaaatacaaaaggttttgtctgctattaccaaaccttaattcaaatcttttccaaagattaacgatcataccaaactaaacgagcagcccataaccggaatagttatcacagaatccaatcaaacattttgattgtcttaaccgggtgaccggaatatcaaaaacttttaataggtatttaacttcagaatctcatctttgcactgacgtaattacctaagtcctttagcaataaaatggatataaagaccattttataatagggtcgtaaagtgagtaagggtgagattgaaggtactttttctaattttacgattcgcttcggatggctgagggcagttttttgttcacctgcgttttactgtcttatgctgattagtttaattgtggagataagttatcgttgaatttggaagttagattgacgattttttatttatttttgtgtttagaccttgataagctgtgggcttcagataaacgcaataaaatatctatttataaatgcagatgggttttcagcaggcctgtttcagttctggaagcaacaatgagcaatttacgtaagccagaagatattgcatgatcataacctgttacacacaacattggcaattttacttatgtacatcaattcatcaattatattgtactcatcctcatacacttttcgctttacaatatcaccggatccctgacttttttgggtcttcatccattcaaaagttaatgacatatcaaagcgcggtctcaattcaaacagccgccaattaatacggtcagatggacccaaacactagcacagccttccggagatgtccgcgcaatttttcattaacccgagcgtgcgagcgattattgaaagtcgttcgtgcgattaattagtcgccgctagggtcgggctttcattacattgattattgtttagatatatatgttgttataggtgatatagtgtagatgtttagatgttagggttattgatttggtgtcagggaagtgagaattttttggtatgacgaattgatgacgaagtgcgtcgagatttaattgttctcctgcagagcattttttttaagttttttgtgattggattctaattttatttgaactaaaaaattatacgacgttggaaaaggcagaaaaaagaaggactaaaatcacagtaattttatactttcgaaatttagggtaaactagctgttgctcgcgacttcgtccccgtgggtagaagatataagttatgatttataactgccctgcttttttcacatttcccattgtatcttcgctcctattagttgcagcgtgatgatttatagcctacagccttcctcgatgaatggcctattcaacacaaaaagaatttttaaatttggaccagtagttcctgagattagcgcgttcaaacaaacaaacaaacaatcaaacaaactcttcagctttatatattagtatagatttgggtgtttttgtatgttaattatgcctctattatgataaaactaaagcaccgatttcaatcaaattcaatattcgtactttgtaaataatggaacacgaaaagcctacacagaaataactttcgtgtatacaacttgtacaaaaaatcaataaaaacgaaaataaaagcattgaaaatcaccccaaaataaaatcaaacggttctctttgtcttttttatataatcgcatacacaccaatacctggataccataaaataaatagttaaaagtaacacattttgttccattgtctacgaatcgaagcaatgaagccaggctacttaaatttaatgtacactaacgtaatgctataaaaacaagttaatctcaatacacggatcgcgcttattatggatagggatgggggaggatgctatcgatagttttataatgaggtatcgataaaagtgtcacatgtactcacatatcatattgttggtcgtttttgctagtgcgattcaagggtttgaaaaatgaacatacttaggaacttaatttatttatattaagtttgatttttcttatacctttagaataagaactgctttattttgaactaaattgtgttttctctactatattttttacgccacattataattcacataacagaatacatatatgttgtacagaaccacattggtttcaaaatttcgaccatttttagaatacgtaatgcgagatacacacgtacaatctgttataatattactttagctggtagtactaaggtgttgctaaaagggtaaatctaacgattgctatttttcaactcacatctaactcgtaattcagttttaaggttgttaagacataacatcgataattgtcccatcactaaacgccaacactaccggaaataaaaatcgtaaatgaagccattcgtgcaccgaggcggtccccaaacggaattaaatacgtttttcaggactacccgcgtttaccgtccttttatatcaggtggtaacgttagttatttatacgaagccgaattagccactgaaagtcaatttacgacagcaatttatgtgtatacaacttgaatgtaatgttgactgtttgttgatctacattatgtatgtatgtgtaggtcgaaatgtccgagcttatactgcggcaagattttcatattttacgaaatagtatgtgattttatagggattatgctatttttgtatacgagtatgtaaaactatgaatgccgttgcattcttaatcaacatttaattaagtttaaataagatctccgggaatttgacaatcatcagtatattttacaaaataactaactcaggcttttgattagcacactatttttatcgctcacttaaaactacaatgttccaatatacaacataccaataatgaaatcgagaaaaagattgtatcattgaatcaagattacgaggaggctttggccaaggtatctcaacttgaagagacacaaaaagaaaatagtaattgcattagcaatcttgaaaagcaaattcaagaacttcaacttaagtgtcgatcgtcggcaattgaaattagaaacgtaccagtaatgccaaatgaaaaaataaacgaccttcttcagattgcctcgtgcttgggacagactatccaaatggatctttctagttccaatatccgtgatgtttatcggttgcctggaaaacctggcctcactcgttctatactagttgaattctcaacggtatatttcaaaaataacgttttaagtgcagtgcgcacttataacaaagagcgcaatatcagggataagttgaacacagagaacattggcattgctggagaacgcaaaccaatctacgttgatgaacatctctctccaactacaaagaggcttttttaccttgctcgagacttcgcgaaacgcaacagctacgatttctgctggatatctaacggaaaaatcctaatacgaaaaagttgtgatacaaaggaagttcacttcgtgaagacagaacagtgtttgttgaaattggaatccaagcaatgactattcatcccaaatttgaactcgaatattagcgtcagtagtgatcattgtagcttttctcttttttataaaaagtttcttttctataataagttttttgaaaatattttttttaaatgttcctgtaacttatacattcttaaaaaacaagttcaaacatgtaaatttctaagtgactttagccaattacactttataactgtaataattatatattcttatagtgagatatgtaacgtgactgatatttccgtgtatatgccactgcaacgtaaacctatagtattgcttaatcatttaaattgcatcattctttattatcgcttaaggcaggtttcgttgctctctaaagataactgttacatcaaaaatgactgataacataaatattatagctaatgacattgatgacttcaaagtagcaaattcccacatttgttcaccaaatgaatgttctgagcttgtcgaaaatcctaacactactttaaaaattatacacattaatataaggagcatcaataagaatttcgatcagtttgtgtgtatgttatctatgataaattttaatttcgatattataatcctttcagaatgctggttaaaaggggcggcttcaccacctcatcttgttaattactcttttcatgctacaacgaatcacttaatacaaaatgatggtgttgtgatatatgtaagaaatggacttgaatacacaatatctgaaccatcttttcgggatgcaaattgtctaatatgtactgtgggtaatactgcaatcgtgggcctctatcggtcaccatcttattcggacctaagcaacttttatgacagtttagagacggtgatgtgtactttgaaatcatttaaaaacgtggccatgattggggatctcaatgttgacattaaggataacaacaatgttgatcgaaactctagtgaataccttttatttactgcatctttaggattgctaccagcacatgtgtttccgactaggcttggtaactgtctcgatcacattttaatgaagacggacacaactgtaaatacaatagtacttgagacccatattacagaccatttacctgtgatcctatgtctgaggtatcacaataaaatatacaataatactcaaaaatttataacgcgcttagactatgcttctattaaggaagatattgacaaatatgatttcaattccatcatgaatgaaactgatgcaaataaagctgctgataaattgatttcggacattcaaaatgtggtttctaagtacacaacacagaaaaaaaccagtaggcgcacgcgcattttgaaaccatggatcactgaaggaatgcttcgttgtatcaggaaccgagataaaatgcatcttaatgttaaaaaaaatatcaataacaacattcttctcataacatataaaagataccgcaatttttgtaatacccttcttagaaaattaaaacgtgagtatgaaaaaaatcaattttgtaaagctcagaataatccaaaagcaatgtgggacgttataaattctatctcaggcaggaaatgtcagtcaccgtcagcaacagaacttttgcgactagaaactagtgcgaaactctctgcgaaccgggtcaatcaatatttagttaatattggaaaagacctggcttccaagctagttcctcctgattcttcgaccgctaacaacttaggagtgatagcttcacaatgcaactcacttggaattgaatcggttagcgaagatcaagtgtcagcgatcattgcatcgcttcggagtaactgtgcaactggctgggataatatcccagctttagtgcttaaactttcacagaaagtcttggtaacacccattacacacttatgcaacctttcaatatctaccggtgtgttcccaaacagcttaaaaaaagctttggttactccggtgtttaagggtggggacagaaagcttgtgaggaactatagacctatttctgtcttgagtgccttatccaaaatcctagaaagaatactcaataattgtttaacaaagtatctcaaaaatttttccataatatccgataaccaatttgggtttcgatctggcatatcgactgaagatgcagtaacaaacttcagtaatgcagtagttgattgtttagataaaggatacaaatgctatggtatatttttagatatatcgaaagcgtttgatacggtttttgcaccaatacttttatctaaactagagcttatcggggttcgcggtccatctctagatatatttagggactacctatccaatcgctctcaggtagttaaaattgatgatgttattagtgaggaagaacaaatcgaatacggagtcccacagggaagtatcctcggccctacactattcataatctatgtcaacgacttgtgcaagatgaagcttgatagttgcaatatttttacatacgccgatgatacagccttattagtctatgcgaagacctggttagaagccaaatccttagctgaggctaacctgagaaaaataatgatatggatgtcttcaaacttacttactctaaacatagacaaaactaaattcatacgtttctatctcccaaattctcctacaccaccaattgaaaccacaacaatcacggctcactattgcaacaaaacctcagcaacgatctgttcttgtccacctttagcaaatgttccctgcattagatatctcggtgttatgattgacgaaagattaaattggcgcactcaaattgaaactcttaccgggcgtgttagaagattactttttatctttaaaaatcttcgtcattctgccgatctatcagttatgcacacagtctatgttgccctgtgtcaatctattctcagttattgcattcctgcatggggtggtacttataaaactctgtttctacaattagaaagggcccagagataccttctcaaagttatacactgcaaacctcgtcgctactcaactacagatctgtataaggaatgccagttattgactgttagacaattattcgtccttcgcaccatactgcggcgacattcacaactaccccttagtaatcaaattttacaaaaaagacggggtgctcttgtatgttctcctgttggatgtaggaccagtttcgcattacgtcaatataacgcactgagttctagaatttataacaaaattaataataaaatctcactgtataaattaaataaacataacttgaagattaaattaacccattggcttaagtctttaaattataatgaaacagaggaactcatagtaattgtaaagtaaaatataagtacctaaatagatctactgtaagtaatcaatattgcacaaaacttttaatgatattgaaattgtaatagcattagagaggagagccgccgattcccgaaatacgagctagtctcagtttgggaatcagtgtgctatttttaattaccccactgtacaattaatatgcttatctttgtgttgtgttgatttgcttattgtacttttgaaggaaataaattattattattattattatttgtatctctttttagtcacgggatcacttcatgtgaagagacccggtcctttttaaaggcttgcacggggacacaggtccaacatgtagaggccttgttgagaactttaatctaaaatgtgatggggtatctaccaggggccatccacccctgctctattaaagaacaaacatggacgacccaaggtagcttcaaaactattgcaaattgtaatgtgtataaataataagggctattggtattaataatgttaaatggaatggtttcctttaaagctatggaaaactatagcacctgcctttcaacacataaaaatggaattaaattggcaggcggtgactcgccggctcaaaaatgggccccccatcataccgccacgataggcagcgagaggcaacatcagtgagataggctaagggtgtagagaggtgcgacaccgatttcaccatcgcgggtcacggacccggagcgggtttcctcgttattacgccattagacacttccacccccgagcatatagctctagcgacccctctctagccagccagttaaggcaagaaagagctgggagtccccgtaaagagtgaccccctggggcattcaggttccgttgtgtcgctactcacaaacagctcgccacaagctgccctgcggatgtatgctcctacatataccttcagacacattttttatttatatctcaaggtttgaaaaagcatactattgtaccctctggtcatgcgttattcccatggagagagagaacgactagccccgagggggcttattattattattattatttcctttatttcattaaaatacatataaattacatttttaaatatatataaaaaacaacatacatttaaaaatataaaaaatagtgtccaaccggcaacgggtacagggcccaagctgccggtggtcagggctccagagagaggaacctcctcacgatgcgcgccgtgtccagaagtaccgctttctgaatcaaacccttgacccagacgcccaacgagagcctccgaagatgttgatcgaggctcttggctattaagccattggcacttacgactatcgggacaatgattgccgagtccacctcccacaagtcgacaacctcgtgagctaaatccaaatatttcaattgtttttctttttctgctttcacgaggttctcgtcatgggggatagtgatatcaacaatcattgtccgacgctctgatcgatcgatcaccactatatcaggcttattggcaacaatagtcctgtcagtgatgatagatcgatcccagtacagtgtgatatgaccactttcgagaactgggtcgggcacatacttatagtacggcacctcagattccacaagtttgtatttcagagcaagctgctgatggataatcctggccacttggttatgtctgtgcaagtattcaccgttagcaagacgagaacatcccgaaactatatgtctcaaggattcaccgggacagtgacatgcccgacagatgtcaactgtaccatccttaattatatattttcggtagttattcgtcatgataacttcatccataattgcacatacaaacccttcggtttctccaaagagatctccgaagcgtagccaggccacggacgctaagaaatctacatcggccccgtgaagggtccgataatagcgtccgtgtagctccttgctttgccatacatctttgcggtctttgacgcttagtacgataggtttgtgccagttctctttacctagagagagcggagtgaagcccttatccactgccaccacatctcggtgcatccccacgtccactcggaggaaatactccctgaggttacatacctcgcgattatggagggtcttggcatttaggaagccacgacccccacactttcgcgggatatataacctcattaccgatgatcgcgggtggtgcattcgatttgcggtgagcagtgtgcggactcttctatccaaggcgtccagttcggtctgtgtccacttgagtatgccaaaggagtacattatcactggcatgacccaaccattaaaggcacgcaccttgttaccgcccgataaggaactttttagtaccttattcaggcggccaaagaaacgtgtctgtaacgattgtttcatgtcagcgacattaatgcctaacgcctctgacatacccaagtatttgtaggtttccgttgaggagagggacctaaggtttatagaatccgagagctgtatgccctgggattctacaatcccacctcgttttacatgcatgactgcacatttgtcaacaccaaattccattctgatggaattactgaagctttcagtaatcttcagtaacttcatcagttgcaacttgttggaagcaaacaatttcaggtcatccatgtacaacaagtgggagattacctggcttcctctccgcaacgaatagcccagccttgaattctcaagcagagtgctaagaggattcaaggctaaacagaaccacaggggactcaaactgtcaccttgaaatattccccgctcaatcctaataagttgaccgctcttttggatatcccgacatcctggatagtgaagcaccgtagtccattgccccatacatgacttcaaaaaagtgcgtagagttgtattgattttatacaactctagcaccctcatgagccatgcatgtggcaccgaatcataggccttcttataatctatccaacatgtcgacacaccctttttggagcggcgaacttgttggcaaatagtcatatcaataaggagtagctccttagtaccacgtgacccattcctacatccattctgagaggcagacatgatagaaaaccgttcaatatggtcattaatcttttctctcagaatggatgtaagcagtttgtagatggtgggtaaacatgtaatgggtctataatttttggggtccgtggtactacctgttttgtggagcagatgggtggaaccagtagtgaagaactgtgggagcacgcccgagtctacggcagattggaattgggatgctaagcaaccatgtgaacttggtagccatttcaaccagaagttatgcagtccatccgggcccggggctttccaattggccaacggacggactgcattggctacgtcttggggactaatatcaatagcccccatttcttctattcgttcacacgattgctcaacatcacgtatccaatccccctcagagtgggttacaggtgccgaccagatgctgcgccaaaacaaatttgtagcgacatcatccggcaggcgtccggcaccctcctccgacgcaggttgctcccaagatctgtacacccatctttggtctctttggaacatacggttctggtgaaatcggtccacccgagtcttgtaccgtcgaatacggtttgcccaggcacacaccttttgcttaaaaaagtcaatgcgttctgtaactcgggcggtgtattcgctggggctaatattagtcccagcaaacgcccgctttacaaaacgcatgaccctagggcgagtgtttccgccccgaaacgcaacaagtttggctatgagtgtcctggcctcagcaacacgcttctcaatcctgcactgccaggctggtgccgcttgcttaggccgtgcagctgtgttatctcgaaaggtaacaccagctacacgacacgccgcaacagccgcacagtacagaagcgagtgcgtgtcaccgaggtcttcgctgttcccaaaataactggatagcagcgaatccaggacacccattagcgccttgtttcggttgtgcatgggcaagcgaggtagtcgcggtctctggtcccggggtgttgaccgatactccagaaccgcctgttccaatgtactccttatatgatcactgcactgggtacttacagttatagcaccgtcatcatctcccccgtcagcagggttggcaggcagcgcgcttgcagctggcgcttccgctattgacggggtaacgacgacagggctagtctgcacttcagagcgcaatcgatcaagcgtcgcgtcatccaacctgtgattacgttggataactcgcacttgatccgacaaacgttgtgccgatacgtcgacgtccggttcaagggcccgaaacagagagagcattctggtacggtacgcagtgaggttagttcctccccctgtcgccccatagtaggcgcgcatgacattctcgttcatgggtcgagtccacttcatgcgctgcactacaccaccgggagcgggagccctgttcgaggccggttggcctgagggcgccaagctgctcggcggccggcgcctccccggccgacgtacaggtgttggcgacgtcggcggggatgtgcgaaaccacatttgctatcagtcccattaatgatttcttattagacaattattatatttcctcatgaatgaatatattgtgacatctggtgttctttagtatttagttctaggctttccacgatatcccctgggccacctgaaatcagccaacgcactaagcatttagagagtcttaaatctacttccttacgcgccagagcccagcctaccctctctatggtctcattacagtttcctaggccgacacggtggcgcggttcattcactgactcccattgtgtggtgatgtttcgtttcagtcactttccatacttcgtgacgtcatcttgcgtgtaatcatctattcaacctccagtaacccaaacgtaagtcttcaatacacgcgaaaattcaatcatcctacaatatgtcaccacctttacttagtttacccaaatttaccccaagatctaataaccgaacgttctccgagtgacctatgaaaaaagaaataaattgaataaactgcggcggtgaaaggaaattgcagtaatatggtttgttgccaagggttaatggacaggaaacaatctgaccgtaaccgtcccattttagaaccaaatctagttttactgtaactttgtttaactgtgattttaggagtggagatatttttggttaaacttgatttatagttccaattccgaattagttttatttttgaagttcatattaaagtaaaaactaaacgactaaacaaagtgtgaaataatggcaaacatgtgttttatagaactgtcgtgaagacttatatcaaattttattgaacgaattgatttttcgtttgtcgtagcaaattatctcaatattaatgctacggggctacgttacgtaggccagcgtagaccagccgtagactatgtacacacaatcacgagaaactaaagaatcttcaaaaaaagttgattttaatatagttgtgttaaacctgcaatatagctctgctaccagtaacttattttatgaattacatttaaaagtaatccatagccatcaaagcaacaaaaacaaatcttttaaattgaaataaccaagatcattcttgcataatacgaaatacaataacatctctggagtattatcaaagatattcctgccttttttcctttgattacctttaaaaacgttcgtcaaagtcccatctcattaatataccttttgacggtttcctgtgaagctgatcatttcgcgacagagacgctccctgaggtggcttgcagtgtgttattgtttgtgcgggcggcaaatgtcaaaggagggtagggtgactgtggaaacgaaagtatttgggataaaattctctttatgagtagtatattcctgaaaattttggttgttacctgatgagagcaacaaatgcatgacgttattttttttttcgtcagggctatagatggacgtcgtcagatatcatggagacaaaaaaaaatctcaatgtaaatagaatactctgataattaacaaatgagaaacattttttgtgtatgagaaaatatcctcgaaatatgtggttacttcagtcgtagtccattgatcaggccgccaaagacttgccgctgtaaaaggcatccgccggcgactgcttccgcgcgcacgcacctttaatgaactaaaaacacaaacttaagtaccattcacacaaaaagaaaaaaatgcagcggctataaaaatacctaccttattgccatggcaattttttctttgagaattttaaatacaaatcttaaaatagaacagtaagatgaggtaataatgataattaaccgaacagctggcaatgtgagtttaagttaaaaaatacgtcgcatatacatacgtatcttaaatatccatcaacaaaagatgaaatactattttataagctaaaataaaataatttgagtgggtattaaatacaattaattcacgaataacaaccaaatgaattccccacatttaaaaatatttattcatatcaacaaaaaacgccacgattagctcagttcatctgaagcgtctttcacaaaaagtatggccgcaaccatttgtttttcattacgtggaaataagagctataatgctgatagctatgttttgttctagttcaacgaaaacagaaatggggaacaaatgaatattttatacgtattacgagtacttttgttttgacgagaaagtgagtgatgatgataatgtacgagtattcagtacgggtgatacatcttgatatagttgggagaaatgtcaaatggtaacctctgttttttataatatacataattgctgttattgacactgaagtatttaaatacaaattttatatatctatttaatatactgtgaatctattaattaaatagtacattttagaactaaaatatttttaggtagtttatttaaactttttttaacatgttgttttgtaccataaaatttagcacttattaaagattcagtagcttcctcttcataacattttcttacataattgtatacctactaaactaaaatatcttgtgcagtgtcctaaaatataacaaaatactaagcagtatcattacccaaattctcaccgaatacaaaacctacctcttatttccctacaattatttcaaccttatatttttcgacagatttccttctcaacaatcaataaaaccactggtttaagtaacttgccggcaaaccgtaagaacggttcacacatgaacgctcctgtaatcctgtgacgagatgcccaagaattgtgttaaggaccttactaataccaacataaataacattaaacacaaaccttaactcttaagatatacggtcgatattgcaacggctgaaccgcaaaagaaaagttggatacacaatttcgcggttacacttttacaaatttaatttgcgttagctttgagctgtatatcgttgagttaagggttattttgctttgtgtcaagtgtggatatggtttgtaaagatgaatcttttaggatattgaatgttggagtataagcgagggaaatttagtcgtatttgtgggtaacgacttaccttgttaagatttgtacggcatttaagggtaaattttgtacatgaactttccaagaacatattgtccaagtgtgtgtatttatgtgcaataaagtaaagtaaagtaaagtaaaaaagtaaattttcgcgaatattttggttcatctgtaggtacctattacctacctactttaatcttatgcactatcgtaatacattacattttctattattttaatgagtaaattttattgtgacacatcagaagaggcatattatgaggacaatttctatcataaatattttgggcagtgcgaaaaacccaaaaaaatcttgtaaaactaaatttatgtaataactagctgttgcccgcgacttcgtccgcgtggttagaagatataagttataatttatacctgccttctatctatcttgtaggattcagtcagcgtttgcaatgtaagcgcaaaaaatgtgtttttttacgacttcacattagaaacctcaaaaattgtagcctatgtgttattctgatgtataagttatattgtggtaaagtttcattcaaatccattcagtagtttttacgtgaaagagtaacaaacatccatacatccatacttacaaactttcgcctttaaaatagtagtaggatttacaaagtaccaacaaattctcatttcattcacagatataatcaaaatcttcattttacgcctcctgtatcgagactcaggtgcaacaccaaccaagattgcctttgagaatgtcctcaaataataatataatgaaacgagataatttggctctggccacatctggtcttgaagtatacagccctgtggatgatactcttaatttgaatagcttgttaaaattgtattgtcaacattgttctattattttttatggggactaaaatttaaagcgttacggagtaggtaattggtgttatgtattttataggttggtaatttaatttgattttgtttaattatttttgattatgccaaattgttgggttgtgtattgtagaatggttttagttaataacgtgtgtggttcgtcgaatcataagttgctgaactgtaaataaatatccatgtaattgacgacacgaaagaggttgtatatggtatgggagtggatactttttagggttctgtacaaatgggaccgtattacctgaggtttcactgtatattcgtctgtccgtccgtctattgccatcctgtctcatctaccgcacactgttatatttcaaaagggcaagggcatgttctataaattttgtttcattgatatattttttaaagctaacaatatctccaattaaatcccagcaatatttcttcaattaattaacattattatttaaaaccgctcaaacgtaacccttatgtatttcatattttcatccccgctggggttgaaagcatgctgtcggggtgaaaataggtcatgcggacaccgcctttaatctgtttaattaacatggaaaaaaaggttcgatttcaccccctgggcatggctaatgatgtgttaatcaagggtaagatagctcgtgtatgtggtgatgctggagttatgtggcgtaggtttgtttataaagagacctattgtcgtatgtgtatactgggtccataacctatgaaatgcatggtaatgataaaaggttgaatttcaattgaaattgaattattgaaattttagaatcgagaatcgtgaaaagatttgggggaagcctttgcccaaccgtgggtcacagtgggctagagctaaaaaaaaatatttccacaaatttgagcaaccaaatcaattaatccaagtctttacatttggtagttcttatttaagcgttaatttaaaaaaacgcttactacttcctaagtttatcaaaaaccttgccacatttaaaccatcttagcaacaaaaccccaaaaaaaggcacattcacgacaaacacattatttagcaaacacacgtagaaccatgtgagcgtaacaataacagaatttgatattcctcgaaagggattcgccaaatcttttgtggccgcatcagtgaacttgacaaattgcctgtcgtaaccctacaggtaatgtatgatttattgtcagaattgaatactcttttttgcggtgaagctaaaagagtttttgattatgtttgtaatagtatggtagactagtaacgtgaagatttggaatcatggtatttgattgtaagatacaaatatatttttttgtttttcaattgtgttttatggcatcaatttctgttgaagtatgtcttgaaaaaaggaaaaaaaaacgcagggaaaaacactccttattc

SEQ ID NO: 139 - DNA, 22982 bp, unidentified
  misc_feature 1..22982: note = Fanzor polypeptide
  source 1..22982: mol_type = other DNA
ccaacgcagcactttttcttatcagtcggcccgcccggggcgacttgttattgtaactatagtccgtaagatagtcttaagtttctattgtattagaattaattaataaatatgttttaattaagcagtcttacaccaaactctgtgagctcggggtcgtaaataataaatcttatttcgtctctttaaatattaatttttatttctatttttaaaaagacaatttcccgctcccgaaatctaactacctacgaattggttttgacaatttatttcgataataacaaacattggtttcgttcaaaaacaaataaccacctgtcagcatattattttgaattgttaaaatctgattaacgttgttaaatcatcattgtttattaacgataattattcttgttaatattgattaactaagccaaatgtaagtcttgttagattttgataatgataatttgattggtaaacacgtggcggaaatgcgccattggacagagttattgtggagggaatgccaaagtggggcatcgccctatataagaccaagcattcgtttgtgctggcagtctcatcttcggatctgactccattgagagcactagctcccgacaaaactgtcggtttacccggttacagctctgctgtatattttacatagctgtattgctgctcctgagccgatacactttgtaaccacttttgggtggctttgccactgtacgaacagtgaccttgtaggtctgttcggagacgtacttgtagtacgtattatcctatgtgtcctagctagtctatttagattattatttttaatttgtgaagttgttaatcactgtaaataaattcttggtgtattgattttatcttgtttatcccacgaaaatggggactcccaaccctggtgatacgccgctcggcggtccttgatcctacatatatatatatgtatgtaacatgttaaaaaaggtataaaattatcctataagtatgctgattaattattattatttattattactagcctggaatgtcccactgctgggcaaaggcctccccactcttcttccacttgtctctgtcatgagccgcgagtgaccagttcggtaagaacgaatccaggtcatcccgccatctccgtctgggtctgcctcgctgacgtcggttttgtgtcacggaccattcagtggtaatttttgcccattggttgtttggcatacgacagacgtgaccagcccaattccacttcaacgtagcagctttatgagtaacgtctaaaaatttggttgtggcacggatcttagtatttcttattctgtccgtaagtttaatgttaagaagactccgttccattcctctttggcaaacctcgagtgcggacctctgctgacaagtcaaagaccatgtctgtgcgccatacgtgaggatcgggagaatgcaaacgtccatgagtctctttttgagggatagaggaagttttcccttcataagatctttcatagaccaatagcttttccaggcattttcagtgcgtcttgcaatttctttctcttgtcttgcctggaaggaaaccatttgacctaggtagagatattcatcgacgtaagcaatctccgcaccatctaacgatattttgtggtgaatgctgttagtcatcactttggtcttgacatgttcattcgaagtccaacctcgagactcgccttgctaagatcttcaagcattttatttaactcgctggctgaagaagagaagagaacaatatcgtcggcaaatcgaaggttggacaatatcttttggccaacgataatgcctcgccctgcccagcctgctgccagcttctgaaagacatcttctaacacggctgtaaatagtttcggagacaatgggtctccctgtttaacacctctatctatgcgaaatgatggtcctgtaatagaatttattttgattgctgctgtgctatttttgtaaatatttttcattatttgaacgtaaactttatcgatttcctgtttttctaatacttcaaaaatagaactgtgtttaacactgtcaaaagccttactgtagtcaacaaatgccatgtaaatagggagccgatattctgtatgtttttctatgattttattgatggagtgaaggtggtcggttgtggagaggccacgacgaaagccggcttgttctggaggttgaaatctgtcaagaggcgccgaaatgcggttttcgatagatttaataaatgccttgtataaatgcgacaccaagctgatagggcgataattcccaatatctgttttgtcaccttttttgtgaagaagaacaatttctgcgtggcaaaatttgtttggtagaattccagtcttaaaaaatattgttgaaaaatttgtaacatgttgaagaaggacgggctcaccgatctttaaaaaatctgtggttattccatctgcaccgggacttttgcgatatttcatacttcgtagcgcctcatgtatttctgtagcagtaaatggcaagatgtctttgaagtatgaattatcttcggtattctttgttgccttgctgtttgaacaatcgctgtacaagtctttataaaattcagtacaaatatctaaaatttttcctctatctgtgtgttttcttccagagtgatctttcagacacgttattgttggacttcgtttgttggaaataccctgcatagccgatctaagcgatgtatgttgttctagagctgattgaatgacatgggtgttatgctgtcttatgtctttacgaatactccgtttgattttccgattgattgccttatattcgggagtatacattttaagtttaagcctatcgttaatcaactcttttgtatggggactaagttttctggttttatctttactagctttcatcttgtaactaactttttttattgtatccttaatatgattatattgaagatcgatatcgtcatcatttgtctcattcaataaactgaaactatttgataaatcaaagagaaactgtttttgattggctagaagtacgcttttatttacatgtttaatagagctgttaattattttggcacgtttaatattagtgggaaattttaatgtacttcgtagaggtctatggtcggagctaaatttaaaattattaagaatctctacgtttttaactagttgtttctggtttaagaagcaaaaatcaatttcattttttgttattttatctggagatagccatgaccatcgacgctggggttttttatagaagtagctgtttcctagacttagactttgaccgaaagcaaattgtagaagtctcttgccgcggtcgtttcgtaatcctaatccatgaggccccagtatattggtgttatcatattcttgtctgacaccaaccttagcattgaaatcgccttgtacaatcgtctaagtgcttcggttcccatcgtacgctttatttaaaatgtcataaaaatcttaaatttcactgtcagaatgagctatggttggtgcataaacttgaattactgttaggatgttgttctcagctatttggaatctaagagcagcgactctgtcagaatatgacttaaactccaaaatatggttcttccattttttggaaatcaaaaatcctactccgtatttacttcctgtccctccactataataaaatatactatggtttctctccaatgtgtcttcaccgtctcttcttacttcagctagtccaatgatatcccacttaatgttatctattgcattttctagttcggttaggcgttcttcagttctaagtgttcttgtgtttaatgttaaaacatatagtgcatcggaatcctttaaacgtgctttggtcgtctgacaattcaaatgcacgacagttttacgtcatatcgaggaccgatatgacggtatatgctgattaaatataataaaaattacactatgattttacctattcaattgaactaagtaaaattacatcttagtggtgagtcattagttgtttgtgcagtagtatttaaagagcgggagctcagtgaaacgttcagttgctgctcggctagcgaagaagtaacatctaaggtacgatattattctgattatttaattgtaatttatgtactgtagaatgtatgtattggtaacagttacttggttgtttatttctttttttttatcaagtataagtataagcctaatgataacagctatataaattgctagtgaacataaataaataatgtatttattttataaatgtgttttgcttatttacctagctatttccagagttgtttaatgttaataatttatatacctaattaaaccaagaataaatatactttctatctatatcaagggcgtatccggaggttggttgatgcgtaggtgatggttgattaggtgacagctgactggttgatgaaagttgacagctgacagcctgatgacagatgacagccagctgacagatgacagttcgttgacagatgacagctagctgacagatgacagcttgatgacagagggcgcgtcttcaatgacgaacacagggagttatagccgtctcgattgttgctgtctctttcacacacactcagagatgcttgctgcgttctgcgcgcctggtacttttgaaaagtattgaaatgattttcgaattaaaatttaatatttaaatgctaattataaatgcggtccggagggaaggaatacgaggtcaatccttacaactgatattgtcatatttatcatctagacagcaaaaagtaggcgtgaacgccaatgacctcccgtttatgatggccaatttaaccgacatgattttgttcgcggatgatacctctttcatttttaaagttgacaggaaagccttagacgtcactaacataaataacactctcaatttactatcggattcgtttgcaacgaataatctatttctaaacgcgtccaaaactaaatgcctaaagttctcagttccaaatgttcggtctcaatcaggtttaaacgtaatgttagacgataaataactggaatgggtcaatgaaacggtttttctaggcatatcaatagactctaagttacagtggggtgctcacatctcagcactgtctcgaaggctaagctcggctgcttttgcggtccgaagcataagacagcttactgatgttcccactgctaagttagtttatcacgcgtatttccatagtattataccatacgggattttactgtggggatcagctgccgatattgattccattttcattttacagaaacgcgtgataagagcaatctactgcatgggcccgcgagaatccctaagagaaactcttaaagacattaaaattctaacgcttccgtcggtttatattatggagaatataatgtacgttcgaaaaaacctttataatttcaatgtaaatagtgatttccataatttaaatacgagaaattaataaacttacggttccaagattttggttatctaaaaccaacactaaatcgttcctagggaattctattcgtttttataataaattgcctaataatattacttgtttaccttttagcaagttcaaaatgagcgtaaaatcgatgctgattaataaagcttattataaaattagtgattatgtagatgataagcgcgcttggtcttagtattgtctcggtacatgtggcctccctggaggttgactagatcaattttgtcgtacttgctattattagttgccacgtctttattcctgcaggttttgacatgccttgacattcctgttaaggatttcattaggactacatattatttcatcatctcagcctatagcagtccactgctggacataggcctctccataagttctccagcgcgaccggttcattgccacctgcatctaaagggacccagcggttttcaccaggtcgtcggtccatctggcaggtggccatcccacgctgcgcttggtggtgcgtggtctccactccggaacttttctgccccatcggctgtccgatcttcgcgctatgtggcccgcccattgccacttcagtttgctaatcctacgggccatatcggcgactttcgttcgtctacggatctcctcatttctgattcgatcccgcagagaaacgccgaacatagccctctccatagctcgctaagcgactttaagcctgtggaaaagtcccttcgtgaagcaccacgtctcagagccgtaattcatcactggtaacacacactggttgtacacctttgttttaaggcactgaggtactttggacgagaaaacgttgtgcagtttaccgcacgctgcccagccgagttggatccgtctactgacttctctctcgaagttggacttacctaactggactacctgtcctagataaatgaattcgtctataacttcaagagccgagttctcaacagtgactgtggtgggtctaacatggacgttgaacatgattttcgttttttgcatgttcattttgagaccaacttgttgagatactctattgaggtctccgagcatttgccctagttcttccagcgattctgccataaccacgatatcgtcggcaaaccgaaggtgagtgatgtattcgccatttatattaatgcttcgtcctttccattcccgaagcttgaaggaatcctctagagcagctgtaaacagtttcggagatatgacatctccctgtcgtactcctcttattaaagggatttccttcgtgcaatgctcctgtactcggactaacatggtggcgttactatacaaacacttcaacacttcgacgtaccgatagtcaatacggcaccgctggagagacctaaggaccgcccaagtttcgacggaatcgaaggctttaatgatagtccacaaacgccaagcatagtggccgattatactcttcggtcttctgtataacctgccgcagccgtggtctatggtactatagccttaacatagtacgtattgtttgatatattatgtaaaatattcattttgctttttttttgttatgctttaaatatgcctcgtaaatgcatcaacagtgtaaccccagtaaaatttatttttctccattgttggatttattattataatatatgttttttatcattttacaattttacgctgttcttgcataaacataatatttgtaaaaatagtacaatttttacaaatattatgtatacatttattttttaaaatagtaacttatgaagtttcttccggttcttctccataagagtgacactttggaaccgcgcaacgagagccatcaccttaacgttttgaaagtgcctggaaaacgacctacttgaaataaaaaacttttgattttgatgtctatgtctacgtcttgtctatattcatagtcagccaaaattgactggctttcttcaaactttcctataaaacaaatcaaacatgagtttttttacattggattacgccttacattaaatgcaatatgtttcgtagactacacacttttggttcccattttgttaaaaaatatatatgatggatggtcggctccatcactgtttaaaaagggcgaggttagcgtcgctgacgtcacgttttttgactattttccatcttcaaatcaaaacactttatttacttcaaacaacttttatttagtgacgtaacaatcagtataaatacaacggcataaaaggaatggcacagtgtgacggagatgtgttccgtccggcgcactgagccgctctgagcccgtcgcctctatttataccgaccgacgtgctcgaagcacatgtccgagtttttaggttatgatttaaagtttataattattttgataatcttttaaattagttgaacagataattaattgaaacggataattaattgaaacagatggaatagaatatttatttaatgttgttacaggtataacaaaaaaataacaggtgccaaaagggtgtacattattgatatacataggtgcaatcacaatgaattaacaaattaaataaaagtacttgactaaaataaaaatcactaataaacacaataaaggaacaaaatttgttagaaacaatagtaaaattatctgcttaataacatttctctgttaaaaatcgttaatgctatagtaacatttactaactaggaacattttgaggctttttttgaataatttatcattcattattgatgtgttctccgctcgatgcgcctcgatgtggacgtgtgcaagtaatttgttgaacttttgcttaaaattcaagtaattaaatttgtgattggtggatagtgtcaaatcgtattccttgtctagcttgtggagtttttatggacggactcctcccagtgggtgggactagagagggacagctcgtattccggtgttttcgatttgaaaagtgaaactgttgtgttgggccagagtgccgtgatttgatccttggccctgagaatcgacggtcgggtgttgtgcgcactgaaccagttgaacacgtagcgcgcgtcgcgaaataccggtctgtgtgttgcaagcggctacgagtgctacgacgggctacgacctcaccacgcccccttgctacgcgtagcagccagcttagcgcctataaatttctgtggagcaactaattgcgcctgcgcaactaacaagaaattaatcctaggcgcttgcagaaactgaagtcacaagatgtcaaaaattactcgtacgcccccgccgactccaaaacctcagctgatgcacacacattcgaaatcggatccagacttgccatccgcgatggaagaaactgccgagcagagtcggaatgtaacatcacgacataaacgcccacgtattttcggttctccatcagatgaccatgatccttctaaggcatttttgaccaactttaaaaatgagttaatggtaatgcttgaagactggaagttggaacaacaaaaaaccttatctcaattggttaccgatgtcgctcacttaaaactacaatgttccaatatacaacatagcaataatgaaatcgagaaaaagattgtatcattgaatcaagattacgaggaggctttggccaaggtatctcaacttgaagagacacaaaaagaaaatagtaattgcattagcaatcttgaaaagcaaattcaagaacttcaacttaagtgtcgatcgtcggcaattgaaattagaaacgtaccagtaatgccaaatgaaaaaataaacgaccttcttcagattgcctcgtgcttgggacagactatccaaatggatctttctagttccaatatccgtgatatttatcggttgcctggaaaacctggcctcactcgctctatactagttgaattctcaacggtatatttcaaaaataacgttttaagtgcagtgcgcacttataacaaagagcgcaatatcagggataagttgaacacagagaacattggcattgctggagaatgcaaaccaatctacgttgatgaacatctctctccaactacaaagaggcttttttaccttgctcgagacttcgcgaaacgcaacagctacgatttctgctggatatctaacggaaaaatcctaatacgaaaaagttgtgatacaaaggaagttcacttcgtgaagacagaacagtgtttgttgaaattggaatccaagcaatgactattcatcccaaatttgaactcgaatattagcgtcagtagtgatcattgtagcttttctcttttttataaaaagtttcttttctataataagtttttgaaaatatttttttaaaatgttcctgtaacttatacattcttaaaaaacaagttcaaacatgtaaatttctaagtgactttagccaattacactttataactgtaataattatatattcttatagtgagatatgtaacgtgactgatatttccgtgtatatgccactgcaacgtaaacctatagtattgcttaatcatttaaattgcatcattctttattatcgcttaaggcaggtttcgttgctctctaaagataactgttacatcaaaaatgactgataacataaatattatagctaatgacattgatgacttcaaagtagcatattcccacatttgttcaccaaatgaatgttctgagcttgtcgaaaatcctaacactactttaaaaattatacacattaatataaggagcatcaataagaatttcgatcagtttgtgtgtatgttatctatgataaattttaatttcgatattataatcctttcagaatgctggttaaaaggggcggcttcaccacctcatcttgttaattactcttttcatgctacaacgaatcacttaatacaaaattatggtgttgtgatatatgtaagaaatggacttgaatacacaatatctgaaccatcttttcgggatgcaaattgtctaatatgtactgtgggtaatactgcaatcgtgggcctctatcggtcaccatcttattcggacctaagcaacttttatgacagtttagagacggtgatgtgtactttgaaatcatttaaaaacgtggccatgattggggatctcaatgttgacattaaggataacaacaatgttgatcgaaactctagtgaataccttttatttactgcatctttaggattgctatcagcacatgtgtttccgactaggcttggtaactgtctcgatcacattttaatgaagacggacacaactgtaaatacaatagtacttgagacccatattacagaccatttacctgtgatcctatgtctgaggtatcacaataaaatatacaataatactcaaaaatttataacgcgcttagactatgcttctattaaggaagatattgacaaatatgatttcaattccatcatgaatgaaactgatgcaaataaagctgctgataaattgatttcggacattcaaaatgtggtttctaagtacacaacacagaaaaaaaccagtaggcgcacgcgcattttgaaaccatggatcactgaaggaatgcttcgtcgtatcaggaaccgagataaaatgcatcttaatgttaaaaaaaatatcaataacaacattcttctcataacatataaaagataccgcaatttttgtaatacccttcttagaaaattaaaacgtgagtatgaaaaaaatcaattttgtaaagctcagaataatccaaaagcaatgtgggacgttataaattctatctcaggcaggaaatgtcagtcaccgtcagcaacagaactcttgcgactagaaactagtgcgaaactctctgcgaaccgggtcaatcaatatttagttaatattggaaaagacctggcttccaagctagttcctcctgattcttcgaccgctaacaacttaggagtgatagcttcacaatgcaactcacttggaattgaatcggttagcgaagatcaagtgtcagcgatcattgcatcgcttcggagtaactgtgcaactggctgggataatatcccagctttagtgcttaaactttcacagaaagtcttggtaacacccattacacacttatgcaacctttcaatatctaccggtgtgttcccaaacagcttaaaaaaagctttggttactccggtgtttaagggtggggacagaaagcttgtgaggaactatagacctatttctgtcttgagtgccttatccaaaatcctagaaagaatactcaataattgtttaacaaagtatctcaaaaaattttccataatatccgataaccaatttgggtttcgatctggcatatcgactgaagatgcagtaacaaacttcagtaatgcagtagttgattgtttagataaaggatacaaatgctatggtatatttttagatatatcgaaagcgtttgatacggtttttgcaccaatacttttatctaaactagagcttatcggggttcgcggtccatctctagatatatttagggactacctatccaatcgctctcaggtagttaaaattgatgatgttattagtgaggaagaacaaatcgaatacggagtcccacagggaagtatcctcggccctacactattcataatctatgtcaacgacttgtgcaagatgaagcttgatagttgcaatatttttacatacgccgatgatacagccttattagtctatgcgaagacctggttagaagccaaatccttagctgaggctaacctgagaaaaataatgatatggatgtcttcaaacttacttactctaaacatagacaaaactaaattcatacgtttctatctcccaaattctcctacaccaccaattgaaaccacaacaatcacggctcactattgcaacaaaacctcagcaacgatctgttcttgtccgcctttagcaaatgttccctgcattagatatctcggtgttatgattgacgaaagattaaattggcgcactcaaattgaaactcttaccgggcgtgttagaagattactttatatctttaaaaatcttcgtcattctgccgatctatcagttatgcacacagtctatgttgccctgtgtcaatctattctcagttattgcattcctgcatggggtggtacttataaaactctgtttctacaattagaaagggcccagagataccttctcaaagttatacactgcaaacctcgtcgctactcaactacagatctgtataaggaatgccagttattgactgttagacaattattcgtccttcgcaccatactgcggcgacattcacaactaccccttagtaatcaaattttacaaaaaagacggggtgctcttgtatgttctcctgttggatgtaggaccagtttcgcattacgtcaatataacgcactgagttctagaatttataacaaaattaataataaaatctcactgtataaattaaataaacataacttgaagattaaattaacccattggcttaagtctttaaattataatgaaacagaggaactcatagtatttgtaaagtaaaatataagtacctaaatagatctactgtaagtaatcaatattgcacaaaacttttaatgatattgaaattgtaatagcattagagaggagagccgccgattcccgaaatacgagctagtctcagtttgggaatcagtgtgctatttttaattaccccactgtacaattaatatgcttatctttgtgttgtgttgatttgcttattgtacttttgaaggaaataaattattaattattattattattattggttttggtatcttattgtaaacgattggtgccatacaaaagacacttttatgtagtaaggccgtgttagacatctttacacataatttttggctatctcgcctgtttctattatttacttcagagagcctcttaaacaaatttggattagatttaacaaagaccgagatttcagagatatacagaaggcaaagttaaaatatggtgcttaataaagagtggtctacgtagagtcaatggactgcatttgaaacattgacctgatacattttttttgcattttaaaaattacatctttattggtcgaatttgcccagaagatgataccatatcgtaaaattgagatgaaactaccatggtaagctgttatcagagcttctgtgtttaaaactggcacaagttttgataaaaggtaggctgttttgcctagcttttcgcttaggttatctaagtgcgctttccagtctagtcgttggtcaacagttaaaccgagaaattttgatgactctacacgacatagactgttgtttttgtaattaacgattaggttaggaggcacgattcgttggctgaagtgcattaatttagttttcgagcggttaatttttaaattattattgtctaaccaagtgataatggacttaagttgttcaatgcaatacgattgaacacgttttgctgacccagcaatcgaatacagtcgcactaagtgcgcagcgatagccagtgcagtttcggacagcaaaccgggcgcattcgtagcatatcattagccatctagctcatttagcgtagcgtttaatatagcattctatcaataaatctctcaaagatattccagcgtttaattcaatcgtagctagtcataccacttaggtcgcgacccccacattttggtccttcgagccggatacaaggacttcgcggtcggaaaattcgttaattcgggtctaacggcagtgaagtggacttgtgtctgaacagtgactattgacaagcagtgtttattatcttagcagtgaactttgtggtagactccagcagcagcaagtattgaatttcaatagtcagtactgaaaacagcagcgagcctacagctcaaaatatcagcatcagcaatcactgacgggaggcgcaaccttcgtcagtccagcagcgaataatcaagtaagatcgttcaattataatatttttgtagcactcgcacgaaaatggagcaagttctgtacctcagtcagaccgagattgcagagagcattaaaaaacttattatcaactttaaaaaggatagcgtagagcgtaagacctttgattattgtaagcgtaaacttgaattactcgaagcatactggactgaattccagaaaaatcacgagaagctaattccttacgaagtaacgaaccataagtacttcgtcaattcagagtttgagcgtagccaggacctttatttgacagctaaacaactaatcggtcaatgtcaagaagagtccatccagcaaggtaagcggtcgccatatcctcaaccagagcagcaagaagcagccggcacttctctcacccagccggaggcaccagctatagcagcaaccccatcgtttcaatcgaggggatcatcgagcaagcttgacgacatgctccataagcagtcgataaatttcaaagcttttattcgagccgtcggaaatatagacatagagtcactaaccgacaaatgggaatttgaagactcccttcagattctacaaaatcgctggaatgcaattgataatcttcattgggaaattgtcggggagtcggaagaaaatcccgcttacgagtcccactttagcaagcatgaaaaaacctttaacagcatgaagaaagctatcaactcgaagatgtggtctacgtcacatcgcgagaaatccactccgaaaatggacatcccagtatttacgggcagctataaccaatgggtgtcatttaaggatttgtttaatgaagctatccacaaaaatacctcattatcaaacgctcaaaagatgcaattcctaaaaggaaaagtcaaaggtgaagcagagcgtttgatacaacacctgcctatcagctcagataattacattatctgttgggagattcttaatcatcgatatgataataaaaggcgtatatttacatctcacgcgaatgtatttttgaatcttcctaatatacagcagcaatcgttttcagccatcaaaaaattgcatgacgtcacgttagagagccttcacgccattaagaacttaggtgccgacattagcacatgggaccctctacttgtgcatattttgtcgttggatagtgaatcttattcggaatatatagagtcgttaaaaagcccgcgcgagctaccagtattacaagattttttgacttttctagagaataagttcaccagcttagaaacagcgcgtcggcgacaagatagcgcaccaaagtcgcaatcatcttatcaacaggatggtgtatccacatcattttcaaataacaagaaaaataattattataaatcaaacgattataattggaagcaagcaaaaccagttgcgaaatcgttacacgtgtcagcaaccaagtgtccactttgttttgatgaacataatttgtcctattgcgaaaaattccttgctatgtcaaaggaaatgaaacttaaaactgttaacaatcatcaactttgtattaattgcctatttaatcataatggaaataactgctattcgacaaaaagatgtcgcaaatgtcatggaaatcaccatacagtattgcatgaatgttttactcagcagaaaccaaactttacgtccggtccgactaagcaacaatcaaattacaaaaaacaagaggaaaataaacctcaaaataatagcaatggtgttcatgcatcgcaacgagaggtttctgaaattcttttagcaacagctttagtgagggtgacgtcagcagacagcacacagctagttttaagagcacttattgaccaagggtcacaactatcattaattagcgaaagagcagcacagcaacttggattagagcgacggcaatttaatggatgtgtatatggaatcggtaatatggacaacaagaaaataactgcaagggcatgctaagcattacatgtcaatcaatgtataccagctttcaatttaatactgacgttttaattatgactaatctcattaaaaacctgccaaatcagtcgtttgaaaagccttgttggtcacatttagagcacatcaacttggcagatccggagttcaataggagtcgcccagtagacttactactcggggccgacgtttacgcacttatcatgttaagcggtatgataaggggttcagacacatctgcgcctctagctcagcaaactcagcttggatggttattgtgcggtggcgttaaaacttttcattgcaacgtcgtcctaaacaatatagcggatattcatgaattttggcagattgaggatattcaagagcaaagtgaaatgtcatctgaagaccaggaatgtttggaatattacatgtcaacaaccaaacgtttagacagcggtcattacgaagttagaatacctctgaaacaacaagcaagcgaaaagttaggatcatccaaggagatgtctttagcacagtttcgaaacctggaaagaaaatttagcaaacaagaacaattagcacagcaatataagcaatttataagcgaatatgagcaattaggtcatatgaaattagcaacttccagcagtaagctacttgaatgtttcttacctcatcattcggttcagcgggcagactcttgtaccaccaagctacgtgttgtatttaacgcgtctgcaaaaacatcttcaggacatagtctcaatgatcttatgcataaagggcctaatttgcaaaaggacctgcaaggtttattgttgaaatggagggtataccgttatgcgttcacggcagacattgagaagatgtttcgtcagatttatgtcagtccagcagatcaaaaacttcagcagatcgtgtggcgatcacatcccgggcagccaatcagagcatatcaattaactacagtcacctacggtacaaaggctgcaccgtttttagcaatgatgacgctgcgtcaattagcaacggatgaacagcataatttccctcaagcagcaaaaagcttaagagaagacttttacactgatgatctcgtttccggtacccatactattgaagaaggaatatgcaatatagcagagctaaacatgtgtcttagcagcggaggattcgtgttgagaaagtggtcagcaaatgaaaaaaggttattggaaaagattaactcatctcagcaaactttaccaacaacatcgttcatttttaaaaccgaaaacacagggaaaactttgggattacgttgggaccccaccacggatgaattcagttttcaatataccctgtcagcagaaacagcaaagcttacgaaaagagtgctcctctcagaaatatccaagttatttgacccgttaggttggttagcgccactaactactaagatgaaattattatttcaaaagatttggctagacacaaaaattcaatggggtgatgaaattccagatgacataaaaagcgagtgggtcaaattaactgaagatttagcttatataaatcggatcagaatccctcgttggctgcaaagcaagcttgacacggtaattcaaatccacggattttgtgacgcatccacaaaagcgtatgcctgtgttgtgtatgccagaatcgtttcagcgaaggaagtgtcagtggtactaatcgcagcgaaaacaagattaataccgaaaagcaagaccgtatcgttaccgcgactagaactctgcgctgcagagctgttatcaagactcatatcaaaaattactagctgtatacacaacatacaatacgaagtgtatgcctggagtgactcaaaggtcacccttagctggatacagggtagcccagaacgttggaagccctttgtatcaaacagagtaaggaaaatttgcagcataatatcaccggacgattggcgtcacgtatcaacaaaagaaaatccagcagactcagccagtagaggattatcaatgtcacagttgagtgaaaatttgttgtggtggcgaggcccagcttggttatcaacacccaactttaagcctaagcaagacaaagctgagtatacgactgaagaagagctcaggttacagacagcaactgttcagcaatatagcccgcaaaacagcataattgaagatttactaaatcgtctcagctcattcttaaaaataaatcgtattatagcatggttattgcgtgcatttgcaccgaaatctaaacaatcgccgtcgtatctcacgttacaagaactaagaaaagcgaaattaatcataattaaatacgtgcaacgcgcggaatttatatcggatattgaaaatttattgcacaagaaaaggcttacttcagacagcaagctattgaatctcaatccttttctggacaacaacggcatattgagagtcggcggacgtctgaaaaatgcaaacatcagtgcagagatgaaatatcctataataataccatacagcgggcggttaacagagcttcttatacagcaagcacatgaacttacctttcatggaggagctcgacttaccttgtctttattaagacataactattgggttatcaaaggtactcgagccaccaaaaagcagcttcgtaattgcgtgacgtgtaaaaaacaagagccgagaaaactgcaccaaataatgggagatctacctgatgttcgatctaacccagcaccacctttttataacactggagttgacttcaccgggtcgatacgagtgaaatccaataaaggtagaggcataaaaacatctaaaggatatatcgccttgtttatttgcatggttacgaaagcgatccatatagagttagtttcggatctaagcagcgcatctttcatagcagcattacgtcgtatggcggcacggagaggatctccgaagcacatttactcagataatggcacaaactttgtaggcaccaacaagattctccaagaggagcagcagcagttagagcaaatttataacgacagcttttatagagaaatagccgagatgagtatagagtggcactggaactgtccttcttggccaagtgcggggggaatctgggagcgctcaataaggagcctgaagcaacatttaaaaagagtaataggtgatcaagccttgaccttcgaagaatacagtactatactctctcaaattgaagcgagccttaattcaaggccattgtgtcctttatctgacgatattgaagatatcgattttctcacgccagcacattttttaacaagccgcgctggtctaactattattgaaacgccacaggatgcaagaacacgatggtatttatcacagaaaatatttaaggatatatggaagcgttggaaaacggagtatctatgccaattatctgtacgaagcaagtggtttaaagcacagaagaatttagaaatagaagatatggtcacaatacatgatgacaacttcccggctggaaaatggcctgttggtcgtgtggtggaagtccaccctgggagggacggagttgttcgagtagtaactttaaaaacaaaaaatgggtatataaagcgtcctatcttaaagctatctattttacctatagcaaaagaagaagcaagtaagcaaaagcaacagaaaagcaaaacagtaaaacagcaaagcattgaagcagaatcgggattagacaagagcgaagataaaccgtcaaatacttgtcccagaatctttagcatagcactagcattactatttttcatgaccatattaacacccactgaagcgtcttacaaatttacatcatttgaaaacaatcagtcattgtattttgatcctctgggtcaaatgcatcttatccgcgatgagtggaaaatcgtgacttactacaatatgtctccatactggcagggagacaaagctataacaatgtttacaaattatctcgagcaaacctgcgggaaaatacaagagcagagtcattgtcaaatcatcattttacaaatacaacatgagtacaacgaactacattattacaaccagctgttgctagatcagcattttagagcgcgctcgcgaacccgacgcgggcttatcaatgctgtaggttctatagcaaacacattgttcggagtactcgatcaggatttcgcggaaaaatacaagcgtgacattgacctcgtgcgtagtaatataggtcatctaagtcagttatataagaatcaaacatcagtaatagaagcggagtataatattttgaagagaacagaagatactattgaaaagcaacacaagatgataaacaagcatttgaattatctagatagcgtcaccaatacattgcagaaataaattgatgtgatgtctattcagcaagaatttactttagcagcggtagctacgatcagtatgattcaaaacttaaagcgaatgcaagattcttctcttgataccttgactgacatatatcgtggtcagatcaatttgcatcttttgccaccgaaacagttacgtgaagaactacaaattgtgtcgggtcaaatctcaaaagaattatctctgccaatcgatgacatccagcttaatcttcccaagatctacaaactattgaaaatcaaagcaaggatgagtgaggagtatttcatattcgagattaccttaccactaatcagcagagatacattccagctatatcatgtaattgctgtacctgttcaaattaataaaagcatgatcagtgtcaagccagcatcagactacgtcgcgatcaaccttagaagagattcttacctatcagcgagcattagcgatcttcaaggttgtgaatatcaagaccaatcttacctttgtcgtttgcagggacctatcaagaacctcgatcacgatgaaagattctgtgaaacagagaaaccttcgagctgtagattgaccaaatctagctgtcaaaacaaatgggttcagctacacgatttttctacctatttgtatttctgttgcgatgtaaactctttgagagttatatgcgacgatgtaatagaatcacatcaagtcagcaaggccggacttatttaccttagtaagcaatgcattgtaaaaggtcgggatgttacactttattcttaccagcaattagagaatacgcttacacttcaaccaaatatactcgtaggaaagctaacgcctatacatcatttggtcaaagatatttcgctccctatccaaaatcttgatgaagctaactttgaaaaggtacagatgaatgagtctctaaagcatctcggtgaacaaattaagtctatgaaagaatcagctcagcagacagagatcctgacgacacatgatatacatcattatgctttgtcgtatgggttattagcagcagccatcgcagtgttcctgtggttcctgaggaggcgaggacgacgagcccttagctcgcccgaacaacagcgtgacgagagtgtacctaccagtgtgagtgtgtgcataaaccaatctgaccagaaccaaagctctagtgtaagtgcgcgagatctaccccaacccgagatggggtcaagtgtgagtgatagtgttcgcggacatagctttaccaaacggtggtctagcatacgtttaaaaaagcgagacatatcgacgtctcctatcgcgaaaagacaatcggtatttactattgaagactcaaccgtttgagcatatagtttttagtcgctagcttgtaagattttattgttctttcaccttgtgaatcacttaccatccagcattgttttaaccttcattagcatttagttcatcacactcacgtaacttcctttctttgtactagctaatctcatctctcccccttgggagtatgttcaatgcaatacgattgaacacgttttgctgacccagcaatcgaatacagtcgcactaagtgcgcagcgatagcccgtgcagtttcggacagcaaaccgggcgcattcgtagcatatcattagccatctagctcatttagcgtagcgtttaatatagcattctatcaataaatctctcaaagatattccagcgtttaattcaatcgtagctagtcataccacttaggtcgcgacccccacataagtgttttatttatttcagcctcatatgtggatttatttgtacaatcgatagtcacggtactatcatcggcaacaaacacataaggtgcggggtaacttttggtagatcgtttatatacaatataaataataggggtcccaggacgctaccttgtggtaccccgtacatcatagtacgtttgttagacctataaactatttccttttatgtttttatatcaattttgacaacttcggtaaattgtttcggtaacagctgaaggacattacctcgaatcccataagcgtttaacttatcaagtaatatgtcataattaacataatcaaacgcctgtgtcatgtcacagtaaattgcagtaaccggtatctttttatctactttattatatttcataactttatccaaaaaaacatatacagccatattgatatttttatttttacgcaaaccgttttgggtgtcacttaatatatttttcctttctaaatatttgtatatttcctgataaatgaact

SEQ ID NO: 140 - DNA, 20681 bp, Tetradesmus sp.
  source 1..20681: mol_type = other DNA
tagctcagcagcgcaaagagcagcaacccactgcatgaatggcttccactacattgcaggatgccaacattggccgttacacagcgcgactgtcccaccaagcatgcagtgtatgcctgctctgcgctgattgtgtgctggccgctgctgctgctgctgctgctgctgctgctgctgcaggagtttggccagctggacatcctggtgtccaatgcagcagtcaacccaacagcagggccgcttgtagacacaccagcaggtgcgagaacagctcgcagcactgcctttgcaaccagcttgcttctgcagcacgtagcccctgcacacagctttgaagcacccaatgggctcagcttatatcatctgtgtgtgtagtacctgcaatgctccactgcagggtgtgcattgtggcaagcactatgaaagacgctccaaccctaatgctgctttgtggattacatgttgtcctgctgactgtggctgcagtgacaggacatggtgttgcgttcctgctgctgctgctgctgccgtggctgcttctgctgctgctgctgcatctgctctgctgctgccggtgctgctgtgctgtgcattgcaatgcagatgccattgacaagatcctggacatcaacatcaaggcggcactgctgctggtgcaggctgcagctccgcacatgaagcgaggggggcgcatcatcctcatcagcagcgtcactgcataccagtgagtagtttttcaaacctgtcggcactgctcaaggcttgaagcactgctgaagccttaacagtttgtacatgtgtcatagtgctgccaaagagacttacatcattgcttttcagtgccacaacatgcattttggggtgtcttaacaagcgctgcaacagtctgcaccgccagtacgcatcctcgaggacttcctcagtgtttcagcactgcacgtgtgacagatctgtgtctctgcattgcgttatgctactgtgctgctactgtttcacagatcttttgcgcgttgctgcccatgcactgcaggccgcctgcccccatcgcaatgtatgctgtcagcaaaaccgcgctgctcgggcttaccaaaggcttagcagctgagctggggccggacggcatcaccgtgaactgcgtggcacctggtatcgtgcccaccaagttctctgctgctctggtggcagataaggagctggtgagtttcgcgtgtaaaaagatcacgtgctggttcggttcctgtgttgcatagtgtgcaacaatgtgtcttggccaaactcaccacctcagtggtagccgagtctcttctggatggtattgctgttgacggcgtggcccccggcatcgtgcccaccaacttctctgctgctctggtagcagacaaggagttggtgtgtgcttgcgtgtttgcggttctgcgtttgctatggggctgtgcaagcgcgctttgtgtgctgcaaaggtgtttgttacactgtctggtggaagctgtttggggccagacggcatcaccgtgaactgcgtggcccctggcattgtgcccaccaagttctctgctgctctggtagcagataaggagctggtgagtgcttttgttgccaataaccggtttctagggcgtgtatagggggctcagctgtggcacaatgcttacgacctgtgttgccagccgagctagggccggttggcatcaccgtgaactgcgtggcacctggcttcgtgcccactaagttttctgctgctctggtagcagacaaggagctggtgagtgctgttgtcgccagtaaccagtttgtagctgtagggcacgtgtataggcatgcctgtatagggcatgtttatagggggcttagctgtggcacaatacgtgcaacctgtgttgccagcttagggtggggatggaaggtattgctgctgactgcgtggcacctggcatcgtgcccaccaagttttctgctgctctggtggcagataaggagctggtgagtgcttgcgtgttgcggtttgcagtttgctgtggggctgtgaaacagtgcgttgagtgctgcaacagttctgcattgcctatctaaccgacagctgcctgtcggtcagatggcgtcagtggcccctggcatcgtgcccaccgctgctgctgctgctgccgccgctgccgctgctgctgctgctgctgctgctgttgcacttgcaggagcgtgctcagatagaggcgaccagcttgaagcggctgggcaccccgcaagacattgcagcagcagttgcgttcctggcatctgatgacggcagctacatgacaggagagacgctggtggtggcggggggcatgagcagcaaactgtgaagtttgaacacgtggatgtgggtgcagcaggagctgcgatcgagtatcagcagaacggtcgatgttgcagacagccggccagcacagctgcaggctggtgccgctgttttgtggtgagtgttggcttcagcaggctggcacaatgcttgaaggcgcaattgaagcggcgcagctgcattttcggttgttatctggtgtggttttggccgtggttgtgtgcagttgcactttgacagttcctgggggcaactcctacttctggtaacactagtggttacccgtggctacgccactcgccaactatatcgaagacatgggcttctgcatgcacgtttcgttgctgcatgtacagcactggcaccaatgtgttacaaccctcagcacctgaggcataccagcttgtagctgcagctgatagcatatgatacatcatcatcatcatgttacccattaagccatagcatcaacgccatatgatacagcatatgatacataacacaactattgagttcctcaagcacactgttgcattgccgagagtgaaactcaaactccaacgccgaggaacacctcatgacatcatggtacacaacattcttagtgtacacaccagctgtaacagcctctgttgctgcacggaagccctcaaccaccaacaccttgagggcaccccagatgccaacccttgaaaaggccacatacaactggccatgtgagaacacagggcgaggcaggtacacgcctgctgcctcgagtgtttgcccctgtgccttgttgattgtcatggcatatgcaacgcgcaccgggaactggcgacggcacatgtcaaaaggcatagcctgcgcatcagagggtaacatgatgatgatgatgtcaaaaggcatagcctgcgcatcagagggctgcaggttcaggcgtggcagccacaccacttggccctttgcagggcctgtggccacctttgcctggatgaagttgtccatgagttttgtgaccaccatgcgtgtgccattcgccaattgtgcagacatgttgcgcagcagaataaggaagaggctctgtgagttgtgatgttacaagctgaaacgtgaatgtgacatctgaaaataacttccttatacagtttggcagcggttgagcacccggtgatcaccttgtggatcgtttggtctatcgtcggtttcccactgtgaaattgtataatgcgcacaacagcattgatgcagttgcggggcaattgcaattgtgtaaataagtcactcatctaatacaattgcgcagacggtccgagaggctttctgtgcgactgtccctaaagtgcactggcaatctcaagatcaccccaaaaatcacaagaaaccaaaaaacacatttttctctttaccatcaactatggacatggcgcaatttttcagcgccaccagggaacaagtacgtgcagtgctcagcagtttccttgccccaactgcatgtcttgtacacactttaacaactgctgccttacttccctgaatgcatcctcctggctgcatggttcagccaaattgccatactgcctggcagcttcaaccagctgcgtaaacatggattgacattgtttgacaggctcaactccaacacaccatcagccaactaagcagcagatcaggagacaatcgactccgtgtcacattgccatcaatgttaactgctagctcttgaaagcagactgcaaccgatcataccacttcttttgctgctgctgagtcaaaaaactagaggttggcagcaggacaaaaatggatgctgctgccttcagcacgttgcttgtaaagctcgcccaggggtactgctgcttgctgtccttcacccagggccgccagtcaagcatgccagcaactattgcaagaatgagcaggaggaccaccctgatcatggcctctttgcgtgttggcatgccttgccctgaagaacaggcgggaacacctcagtctgtcttgagatgtttgcccttgcctgcatgaagcaacccccgcaaaagagatgatcactggataacagagtggctcttgcacggtggtgtagtatgcaacccattttagaatacaccacatgtgctttgttcatgcattgtgtttcttgcttttcagtgccgcttgagctagtagctactggcctacacgtgcaccccagcaccccagcatgcttctcaccaatgctttccaaaatctcccgtttctggtcggccagagccttgtccagagccttgtccagagctgtcttcagtcgcttctcctgggcagccagagctgcctgatgctcgtcacccagagttttcatgccatctctaaacgttgctgagctcaccagtgccctccctgcaaaggggtgaattggacaatgcatcagaagtcaaaacagcgttatctacgatggtgtgtatatgtgcgtgcggtatacaaagggggcttgcaaagcagtgctgcagagccttgggtgcataagaaagtggcccagtggtagctggcatgtgggcatgatggtacatgcagcaccgttgatggctaggactgcatgaacccccatggcccctgcctcccttggcatgactgtagggcatgtgcagaatgtaataaaccagcttgcataatcaagaaattcatagaccaatccatgctgctgtggcaatccagactgcaacaaccctttccatgggaccagcaagtagccctgcaaatgactttgcagcaactgctggcaggcaccacaggcggccgctacatgctcacatttcaccactgcatgcggctccaacgctcacctggtgctgctgcggtaaagcatgggccaccaaggaatggcagatgatggcgcatgcacaggggcaaggcagggcagagcagggcagcacaggtccacatcagtgttgcatgcaatgggctgtaactgtatgcatgcagcattcagcagtgcaggacggtaatatggcactcttatgttgtcttttgacatcacagcgagcacacttcaatcaacaatgtgtgcagtgtgtgtagttgcatttgggagggcagagttttatagcaggagatacaacgtctttgatgtagttatgcacctcaaataccatgctgctgctgacaggcaggcacgcatgatattggtagtgagcatgctgcaggtggtggtgcattccgtgcgcctgaccaccagggctgctactgcatggggttccacggctgatgctgatgattagcagacatgcatgacagctagcatgctgcataatgaggtgcaggttgtactcctgacaatgagccatgctgttgcatggggttgcaatttgaaaagcaatagcgtaatgcgactggctacagctactgttgagacaagttcagactattgttgactctgttttgtcgtattacatggaaagcgacgcgtttcgggctccacccttcatcaggcttcaatcctgtgaacacggacagaatcaacaaatactcgccatcagaagtgtgcaacagggtgcaggttttggggtgaggtcactggccatgttgccagtggctcgaaccctgtacaatactgcactgcaaaagcaaaccatgaggtcttgatgatgaacacagggtgagagccactggcaacatggccagtgccctcacccaaaaacggccagtcagtgactggcctttactaagaatgaccccaggttcctgccttttgtgaatgcaacaatcggtctctctgaaacctcagcatgtagatctccaccgccaatatcatatgcaccccgcagcaactgttgcagccgcagctcaggtatgagttgtgcatacggcaccaccatgacaggcttgctgttcgcagttgcagctgtgctgctattgctcacagacaggtacctgtgccgcaatgaaaacgacactcggttggtgatgctggctagcagacgctgagggtaacccctctggcgtagccggtgcacaaatttgcgcaccatgcagtcaaaccagtgttcgtcactgttagtgacaacataccgaatcaactctgcattgatgaagctcctaaacacactaggtggatagaaagagtaatgtgggatgtaaaggtacttgttcagtaccttttggtgtgtgcacactttgatacgcactctgccatctgcatcgcagacatcctccatacacctatgaacaaccaagtcgagaaaatctacttcaaactggctgtagctgtgtgtgatctttatgtttggcaacaatgtgttgagcaaactgatgaaagcaagcagtttctgctcgctgccctcaaaaaccacaaatccatcatcgatataacgcttaaacagagaggggaagtcgctgcccaagcgttgcttggcaacaccttcccactccctggccaggtagagctgcaaccccacagctgctccacacacagcagcaagcaatgctggtttggcaggcttgccacaatcaccattgcaagcacacgcacgactcacctgctgctgctgtgggttgaaagaaaaagccaggtgggagccgtgaagagcacatgcaaaaacacacgggcagggccaggttcagcaaaaggtcaaacaaagaagcttgcagcatgaaagcgcagtggcatgcagcacacaggagcatgcaggagggtgttgcagaggtttcacaaggaatacaacacaagatgcacgatgtcggtcaagaaaaggtggggtggggaagcaaagcgtggagggggcatgcattccacaccgcagcatgcatcatcaacacggacacaaacaggcatcgtgcgcattgaaggggttgcatgcatgcagcaaaactcttgctacagcaccataggaaaaaacatagcaacacagggttgtccaccaggggccatgcagggtgctgctgcacacccttgagtgagcaccaaagttgagcaaccgcggctggcatgttgcatgtggtgatgcatgcagcacttgtaatggctaagactgcttctgcttggtttcacagctgcttcaaatgcaatcctcaagcatgcctgttgtgagcaaggtgtgcaaccccaggattgctcgcatctccaaaatccaacctcctgctaagctgttgccaaattctatggttctggtggcaaacaatagacattttcacccacgctgcacgcagcgtataatgacagcctgatggacaccctgattgagtcagcgcatctgcggctagtttcagtggacctttgaaagcttgtctaatgctacagcttcccagtcatccgactgctttagaacagtgcaaacgccttgtcggtcagcagcgtgcattggcttcaagagcgcctagcataatcagcaactgttatcaaggctctgtgatactgcgtgccgacatgcagagctgccagcaacaccactgcctgcaccaaccaaactggggttcctgctgctgtacacggggcctgcctgagattctcatgactcaccagactggctgctcagcttgttgattagccgcagcaactccagctccagcgcctgcagctgttccaactcctcacggttgttggacgcttccgctgcgtcgatgcgagatctgaccttctctaaccgaacctcatggcgttccagctgagcttgaatgctttccagctcctgctgcatggcggacacccctgccaactcggctcctgctgtatggccgaggcacggcgcattaacatccatgaatggatgttggaacgtgttattgtgttgctactccgttgaattaaggagcaatggtagaagcctcgtcgcacctcctgaactcattggactgaagctgcggatgcgcaagcgcagcactgagtgtttcccaatcacttttctacaaaaatttcgccgaggcgtgaatacatgcaatctaatgatggacagctgctgtcgatatgtgctagcaacgaggcaacgcttgatggatagctgctgtcgatgtgctagcaacgaggcaacgcttacagagagcgattcaaccacgcagtacacaccagctgccaagtctgttgttcggtgtcgtcatacattgtaacactcgtagggttcggctgtttcctatcgtaggcccttccctcagcgtgtaggtgcactgctgcctcttctggtgctgttcatctcatctccatctgcatctccaggcatgccaaagtccatatagcccttgcagtgatagtaaacggcactgaagcctgtgcctagtgtggcctggaactgcgccagcatcccgctgagacccagcacccagattggcggctcagctgacagccctggtaaagagctgtgatcccaggtgcctcgcgctgtctctgcctggcgtgaccccatgtacaggtgctgagctgtggccatcagggcctgtgcagcctgccgcgcgcagctgaaagcaaaagcctgaggcattcaccaaggtaaagcgtatgctctctgcatacagtgcaagctctttgcatgttcagtaggtttgtgcatttgaagagcttctgcaggctgtcctggtatgcacacaagtgagcaggcacatgctggcaatcaccttgcagtcccaccaagcatccatcaggcgagtaatggttctggaattggcggggaaagccaggtcaacttgcacaggatcatgaaaaatgagatagcaaggagcttaaacatcagctgcagcaggagcagcgtgcgaacaaggtcagtaaactgtcgtcaagctgcagcaagcgacagcagccttgtggctggtgttcagcagcaacatcagtgatcaggaatccactagttgggtgggtttgagtacctttacaacacagcaacaacaatccagcattgccactctggcacttccatcctgccacctgagcacacttgattctgcttaagttgttgctgtcaaactacaagagagggagcttaatgggtaacatgatgatgatgatgaagagagggagcttgtaagcgttgtacgaacgtgtggctgggtcgccgccagagcatgcagcttgccccacagcaacaggtgtgcctgctccttgtgcccccttcaacatgctcatgcttgctgttgttgttgctggtggtggtggtggtactgctgctgctgcttcactgtgcgcaggaaaaggacaaaaaggtcagcgagctgaacacaactgctgcaggcgctatcacgctgtggacagacaccgggtggcgccaggtcatgacgatcgtgttgccaaccttcagcatcaggaaattggaggaccctgagatgcgcgtcacatacgagatgtacaagcacctgttccctgccgatgatgaccctgacctgagccacatgccaacaggtacagccaacacgctgacccatgcagccacccaactgcgcacagcattcacaaacaacctgtgggtgccgctcgtaccccgcctcaagcgactgtgccgtgcctggcggcggaaacgtaagcaggaacaagtggccaggagcgatgatccgagcatcttggacctggtgcgggcgattcatcatcatcatgttacccattaagccatagcatcaacgcctggtgcgggcgattgagacaagggcagactatgccatggagaagaagatgcatgcagcggctgtggagtttgtgactgaggtcaggcggcggctggggctgcctgatgcaggtgccaagctgacggagtcgtatgccaagcgcaaccagcagcagatgctgctgtctctggcctggctgcagcgtcgcgtggaggcgttgggtggaaagggtgtctggctttgccctgtcttcagcgtgtggcgccagcatcatcatcatgtgtggcgccagcatgtgcagctcgactgcaccacgctgctgcacatgctgagcggcatgcgcctggtgccagagcacctgatggtaaagcagagggcgaggtaacagactgggagggcgtgctggatctggtagccggcgtgtttgagccgccctgccctgcaaagcagaaggggaagctgcagtggtggggctccttgtcaacagatggcgtcgcagccagctttgtgtgcgcagacacaaggccagtctcaaaaaagggcaccaaaactacagcagcagcagcagcagcagcagtcaccagcaacagcagaagcaaagggaccacaggcgctaccaccccagcactgcctcctccccacgacttggttgttgtgggcatcgaccctggcaggtgcacgatcatgcacgccgcgacccaggtgcagagcacccgcacgctggagtggacgctgccccgcaagcgctaccgcctaaagtccgggctggcacaggcgaggccaaggagcggcgttgggacacggccatgattggtggcgcctggaaacagatgaaccagcagagcggagcactgcgcagcagctctcttcagcagctgacccagcacattgcggcgtacaacagcgtggctgaggagtgctggacatccgccatgcagcgggccaagctccgctgccgcacttatggcggccgcaagcgctgcttggaccgcttcttctcaggcttggagcgggacgtgtcggcagccgagcccaacaagcgcctggccattgcctatggtgccgccacgttcagcccctccggtactggcaagcccgccacgcccacaactgctgcctatagagcggcactgcgcctgtggagctctggtgcaattgtggagaagcagaacgagtgccgcacctcaaagcagtgttgtcactgtcatggagatgtggaggcttgctggcagagcgtacggctgcagttgggaccagcacccgacacggacgcttctggtgctggcccctgcccatcacagctcagtgccagaattcaggtggagacctgtcacggacccacggtgccaaaggctggcgcctacctgagggggttgctcttctgcccacagtgcagcaagttcctcaaccgtgacaggtcagcagcgctcaacattcgcttcttgtttacacaaacacagctgctgggttgctctatgcccacacagtttgtggctcgtcgcaagcaaaagaagcagaagaagcgcaaccaggccagctgaaacaagctggtatacagagggccatgtccacttttgatccggccatgctgtagatatgtgtgtgagaccacggccagagagaatgcattctctgcagctgccatcctatctgtcatcacagcacatgcacaaaaagcatcctgacaccgctgctggcaatgatgatcatggctggccttccatctgactgactacctgacatgcatacctaggtctctctcgctctcgtgctcacctgtccgatcatgatccgcatctcctgcggtgggtatgctgctgctgcagcactgctgccaggctgcacagggattgctgctgctgcagcgctgctgccaggctgtgcagggattgctactactgcagcactgctgccaggctgtgcagggggtgctgctgctgcagtgctgctgctgttgcgttgccgcttgggtgtgcgctcggcgtcggtgccctgaaggcaggtcacaagggggcatggcacgaatgttgtttgacaatgtatacatcccatatgatgcaggtcactggcgcagttgcaggtgtctgtaaaggagctagcattcgcacactgctagcagcaaacgctgcaagtgacatgaaaatcacacatgagccagttctacagctgccgctactgccccctgcagccaatgttgccttgtcacctacgtcatctaccttgcgcttgtgggcagccttgcgcctgatcttgttggtagccccgcgcatggcatcaccctggacagagcagcagcacaccatgagtacagcaacaggtaagaaagcaccacgtgacctggtgatgtgccagcacagtcagtaaagctgctctgcatatacatcccaagacacaaacacacaggatgcaggtcactggcacagatgcaggtgctccagtacgtgtgctgtttgacaatggtgcagacgctactgctttctgtcaaagacctggcatttgcacgctgccagagtttgctgatctcagttgcaaaataccatgaccggcaattgccattcctctctacttctgccgctgctctgtcgcacctgcagctggagctcgcgtgctagaccagtatttagcagctccctggccttgtcatcagcaccaacgccagccagccacgcctcgctggccaggtctgcagcagcagcgcagctaccgaacatggcatagcggctgctacacagcaccacgctacaggcttggaagccgggctgttcgcacagcaggttacacagctgctgcgactccactggcaccctttgcagtggtttgtgcgtgcgcttgctgtagaacttcagcgagtcaggcaggggggcattgctgacatccagatgtgcgcgccgctgaaggccggagctatcgcgctcggcggcctcaatgctgcggatggtagtgttgaagaggccctgggtcaagtgagggtctgggccatcctggtacagcgcttgagggcattcaaggacaatgttgctgcctgcaacaagctggttgagtgccgtgcagctgctgcactcccagtcatcgtcagggatgcaggcaacccccaagcatgccatgtgaagtccttggaagcatccctcacatatcagcatggtttcagggctgtcctgactgccgcatgctgtgcagcttgtgttggggtcaataggctcccctacagttccctctcggttttccatagcactgcaatgatagccagcagtagcaaattacaccggttggtggtggagcagctgttgtgcaggctgggttgcagcagtacagcagcagcaggtggtgtggtgagaagactggttgatgggtcgctgctgcagcgaagctgcgccgcttgtaatctatcatgtagctgattgcaaagcatagctgtcacagagttgctaagcagcccaggcactgcagacacgtctgatgccttgatgacaagctggcatgttgaacagttgagtgaatcttgcattccatgagcgtgtggaacattgcgcatgtgtgcgtgccaggaatggcagtgcctggagtctgctgctgctgctgctgcaacagtctcacgctatcagctagggcaggcaagcattgcaccattagggatgagcagatcattgcaagtgcattagaggctagtgcattgcatggctgctggggcaaacgacaaacaaaactgtccgaatggctgaagcagccagccgacgcccgcactcccacaactattgcaactccgaatgtttatccgcatccgaatgaacttgcctctttgccagagcaatatggtaggaggcggaaggccagaatggtgggttgtttcgctgcagcaccggagactggttgctttaccgtgtgtgtcgtctactgcgaacgtgcactgatggtggaaacagtcgagaggggcggacaggcgaggaaatagtcgagcgcagccaaggatcaagatgctcttggattgtccttggacataatctgtgcacttttcagcaacacccaaacaacttgctggatccctactgaatgtgttcaaaaatagccaaaaccgtagtccgatgctctttagagtgctttgcggcgaggcagccaaactagtgcacagcctccaatctttaagggttgatagggcacccaacatgcaagcgcagcttgtgtggcggcaagccagacatgcgcagtgtgttcaggaactctggtgggtacaaataagtttgctgctcaccacgcaccaccgagtctgcactgctgtacacgcggctgtcaacctgaacgccatcagggcgtggtgcacacattcttgctgtcatcagatcattcactgcatcaacatcatcattcagaggcgtaaggatagcaccctccacaatgtactgctgtcgtgcagcatcactgcgctggctgtcaatcttcccatacacagcatgtattagctcctgcagtgcaataacattgcacaataacattggcagtgctgcagtgcaatgcaccggacagcacagagagcaaggcacgtgttcctgtgctattatgttctgtgttgtttggaaaagttgtcgcagccctttgacacgggcactgtatgatcgctgggacccaactctggaactggacaccctagtctgcagcaatcctgtcagagctgatgcgcgtggatgcaaacgttcacaacggttgactggtattgattcctggcacattaagatcctgctgcctgtgcacacgtccaacagtgtcgtgttccacttcctggagctcagcttcgccgttgatcgccttagcaccgctcaagagctataactttccacaaaaatcataatccacgacatgattatggctgcctgacctggcatgggcccaacagtgctggtgagcaggcaaatgcgctcggtacttcgtgtctgacgctgcagtgtccgcatccacggctttacgtgctcggaccaacctctaaccgctacctacgttgctatttgtctcgagcaggatatgtgtgatccagcagcacgacagcagcaacagcagttccttgctgcacaatgtgcaagcctagcggggctctggaggtcgcagcagctggttgatgttcacatacaggcagcagatggcgatctgcacggcgctcatcgcgttgttctggccagcagctccggattcttcagagcgctgctgtgtggggcaggtcaaagcatgaaagagggcagtagcagcagcgtatgtggcttgcaggacagcggcatggtggtgcagctaccgtacagcagccagcagctttcatcgttactgaccatcttatacgagcacagcattgaggtgagagctttttgagggtggcggaatttctgtggttccttgtggctcagacgaatgcttgcttcttgcaggaaatgagcttcatgcaacagttctctaatttgttctgttatggttacagccacgccaactgctgagtcaggcgatggctatgtacagcacaccttacctgcccacaagccttgctgctgtggctgcaacaccagcacatgcaacttacggtgcttccttctacaggatgtaagttcttgaacatgtatttcacaccggctgctgctgatgctgtcttgcaggtgtgtgctggcaacgtggcttggctgttggacatggcctcttacctggaggtgcagcccttgcaggaggcctgctgcgaggtgcgttgttcaatttccgtgatgtcatcgtcattgagaagggcacctgcagaatgagcttctcccaagccatgtgctggtgttgagatcctgtgtatcagtatgctggtgcttgccgcgtgccgccttggatgttgagatgttggtcttatgttcagtggtttgaattttcagctgcgctttggacatggcctcgtaccttgttacagcctctgcaggaggcctgctgtgaggtgtgctgtgctgcaggttcattcatggactttattgaatgtattcaacaaggtcaatgcatgaatttgcagcacaacccacctcgcagcaggcctcctgcaagggctgcacctcaaggtaaaagtgcgcagagggagctactcccaagccacgtgctgctgctggagttatgtgtgtcggtatcaaattgtcagtatgtttgctgcttgcatggtgctgctgcttgctgttcttgtggcatgttatgtagacatttgagtgtttggcttggcttggcttggcttgtacctgggctcatacctggaggcacagcccttgcaggaggcatgctgcaggtattgtgctggagtgtcattcaattcagtgatggcgtgtcatttggcgatggcatgtcattgtgagaaagaaactgcaaagtgacccactcccaagccacgtgctggtgttgggatcctttgtatcaatcagttgctgcttgccgcgtgctgctgactgctgtgactgatgtgtcgttcagtggtttgcattttgagcgtggctgttggacatggcctaatactcggaggtgcagcccttgcaggaggcctgctgcgaggtggtttgtcacactctattcgccgtcgtggctgggtgacagtcattggtgtcaccctgcatgcactgctgaacgctgtgtcaaggcagctgctgctcaagctgttgctactgactgctggccaaagggccgatggtgtgtcaagattgtctttgctgtgcttaggcctgcaggcatgtcgaattggcctctgcaatcacagatcgtggacagttcacaccacccaggacggtattgcaagccattttgcatacacacatcacctcaggtccttcgggtgcaagtacaaccccgttgttcttgcgtctcgctctgcgtttctgcctgtcctgcagtttctgcgctctgctctgagccccgaagcttgcgtggacgtgctgctgctggcgcaccactaccactgcagcgcgctacagtcagaaggggtgagcagcctgctgcaagtcctgcaaccgcggctctccgaccccatctgcactggttcgcttgctgcctttgttatcgcggaccagcataactgttgcatatttaaaccttcagccaagcatagccctagatgctgcggtccgcgcgctcttatcgaaaaaagccaacactgaccgtcggcatgctgcctgcaggtgcagtacattgcgcagcacctgtcctcgctgctgctgctgcctgaggtgcggcaggcgctgaccaagctgccgccagtgctgctggtgcagctgctgtccagcgaggccctggaggttgaccaggtgggtgcaatggtttgaccaggttgcaagccgctgcatgcaagtcgctgcatgtattgccagagacactgcctgattttgtgcaccgcatggcggcgggcgcaattggtctgagaggagcaaagtgaatgcaagtgctgctgcattcgttgtcccccctcccctcaatgagattgatgccgttgggttctagggtaccgtgccaagcagcttcgagtgcgctcatactgctgcatttgtcaccccctccttcagcaatacacatgccaacaagcatcctctgcattttgtatctgtttgcttgcaggaggctgagctagtatgccttgtgtcagactgggtagcagcagcaccacaggaccgcctgccgctgctgcaccagctgctgccgctgctgcagctctcactgctgcctgaggaggctccgctgtcgcagcagcagctgtgcgcttgcacgactcctgcggctgcgcaactcgcgaggcagctgcatcaggctgcagtacagtgccagcagcagcagggtgtgcagcagcagcagcagcggcagcagcagcagcagcaaggggtcaaccgcgaggacagcaggatcctgcaagtcctgcaacagcagcagcgacagactgcgagctcagcagctagcagtagcgcctccgctgctgctgctagtgctgcatgtggcttgcaggacagcagtctgcaccctgctgctagtgtggacttcaacaaccaggcaagcagcagcagcagcagcagcaatagtgcggccctattggcaatggagccaaccacaccaacctggatagactgcgttggcggcagcagcagcagcagcagaggcattggtgctgttgtgtcagaggcgtggccaggcagacagcgcggctaccagcccacacggctgttagttgctggcggtcacgatctgtcgtggcgaggcttgaaggcagtagagctgtacgacccgcgcagtgatagttggagcccaggacccacactgccagcagcactgccatttgcaggtaggatgggttgaactctcacatgcgttgtgtttgggatgctggttcgttgtgaaggtccgggccgcctgaatcaggtgtattgtgtctgcatggtcgattgcagacgggagggtgacttgcttgtgtgtggccttgtgtggggctttgattttcgcttgtctgttagtgtcactctgaaggcagttcagctgtgcagccagcgcagcgacagatggagcccaggacccactctgccagcagcattgacatttgcaggtaggatgggttctgtgcttacttgcttttgtttgcgatgctggtctggtggtcaagattcaagcgtatgatgtgtgttgcatggtcggttgcggacgagagacgcattgctggtgtgtgtcgccgtgtgtgggactttgttctttggatttttggtgcgtgtccatttgaaggcggttgagctgtatgacccgcgcagtgacagctggagcccgggacccactctgccagctgcgttgccatttgcaggtaggttgagttttatgcttacctgcttgagtatgagatgctgggatgcggacaaggtttcaggcgtatgatgtctgctgcatggccggtttcagacagagggggtgcgacttgcctatgtgtgttgctttgtgtggggcgttgtttcttgcttgtctgtttagtgtcgctctgaggcagtagagctgtaagacccatgcagtgacagctggatcccgggacccactctgccagcagcactgccgttcgcaggtgggacatgctctcaactaactcagttcgtttgcagaggagcagagagcctatagggagagctctctgttgtgtcaacaatttggttgtagaggagcagacaggcgtatcggatcctgcattgttgccactagtgtcgtattcgcctgcaggcgctgggctgctgcgacgcagtgaaacctgtgttgtgggttgcggcatgcacgttgcccaatggcatgtgcgcatcgtcatcaaaacgaagctgttgcttcctttcattcatttgcaagcgctgggctgttgtggcgtggcgagctgtacgttgtgggtatcggcatgtacagcgacaaatcttggcatatatgccacaacaccctctgacttgcaatcatacattgttttcatcggcttgcaggcgctgggctgctggggcgtggtcagcttcattgtgcgactggcggctggctcagctgattgctgtcacaggtgcagcagcatcaaccatctggcatgctgatgtatgtgtgtgtgtctgcaggcgctgggctgctgggtcgtggcgagctgtacgttgtgggtggcggcatgtacagcagcctgctggtcaagctggacgcagctggcggctgctggcacagctgcgaggggccacgcacgccgcggctgcacgctgctgttgcaggagcatcaggtgatgaccgtcggtacagctgcaacttgtcttatgctgtgtagctgcgatgagcacaatgtgtgactgttagtattgttcaggtgctttgtcaggtaagtgcctggacgttgaatttgcatgacagcttggttacagggtgaagatgcctccttgctgtctgggttcaggcgctttatggggcagctgcctgatccttgctgagttgcttggcttgctgggttgcaggcagcgtgcagcagattgtttgctcgcattgagcactggttgctgatccattgctgcttctgatgttgcatgcgcagggctattgtatgttgctggaggccgcagccaggtcaaccaagtcgtggcaacagcagaggtgagaggtgtcatctgcctgcacatgccgtactcttgcatgttgtccctgcagcagctgaagctggtctgctctgatagcctccttgcagcaacagcacacgcgtcgctgtacatcaccagtggacgtgtcagcgatgcgatgctgtgcaatgtcactgtgctgctgccgtacccgggtgctgcttgctcatgtgtgtggcaactgaacgaaccctcatcccgttgcgagcagctgctgcaaatacaagtaacacaccctgcagtcacaatcctcacgaacaacaacagtgtatgtactgcatttactgacagaactcgcctcattttctttggcgtcacgtcatttgccgccaggtgtacgacccctcagcctgctgctggcagtcgctgccagacatgcgacaacctcgctacgcgcatgcagtcgcgtcacttgctggacgagtttacgcgctgggaggccaagccagcaaggccatccacaggtggggcactgcgtcaggcattgttgtgttgtgcgagcttactttacatcctttcgcctcattgtcgttatggcgttgctggctggacgcgtctaggcgctgagaggccaagccagcaaggccatccattggttgggcgctgcgtcaggcattgccgtgttgtgtgcgtgctgtctttgcctccttgttgcctcgttaataagtgataatcacatgata

SEQ ID NO: 141 - DNA, 20648 bp, Tetradesmus sp.
  source 1..20648: mol_type = other DNA
tttatattcaagctgcccctcacttgctgctgcacagattcccatccaggatactgccacatcactgacagctgtgctaatgctgcaaccacccgactgccgccaccgctgcggatgctgctgctgctactgctgcggtctcacctgcccaaacagcgtgtgcttctcatccaagctgtccagtgcatctcccagcgtgatgtagaactgcgaggcattgagccctggcccagcactggccatacccactgcgccgcgcttggcatgtttgcgctttggggtgatttcatcatcaaagaagcgagcctgggagccatacatcagcctgcgatgtcatcaacagcaacattgagctataagtgcaagtaaaacagagatacacagggtccatgttaaaatgtcagtggctgcgacatggcgccccagtgtgagctacttgacacatgtgccagcagcagctgcagcataagagcaggagggcaagcagatgtgtatcacaggcagcagctgctgacacacagcgcctgctttgccgccaaaactccaggtatactccttgtgctcccgttgcatctgctgttcctgctgctgccaatcacgcactgcaggcggcagtatgccgctgcctgcaatgctgctgtttgctgctgcagctgctcacccgtagactgactctccccccttgccagtgcctgtggggtcgcccgtctgcgcaatgaagttgcgctgcacattgtggaatatgcagcagcagtagtacttgaccctgcaggacagcagtgcattgcaacaggtgaggtgcacagcggatgtgctagcaggatgacaaggatatcctggttttgaactgccatatgattgcaagcagtacacacaaaaaggtgcaataacaggcaacaacggataactactgctgctgggtgaagaggtttattgcagagaaggctggtgaagctgggactggtgtgcacgagctgctctgtttgcagaggatgtgggcggtgtgctgcggcctcacttgcatagcttcaagaagtttttgcaggtgctaggcgcttcatccacgtatagatctatcactatgtcgcctttgcttgtctccaacagcactgccatggctgcatcagctgctactgctgctgtattgcagttggtctgctgcggtgtgtgatgcagtgctgaaagcctgaccagcagtacgtgacggatatccacagcctcgaaaactgacggcgggctttcaaccaagcagcaggcaaagaacccttctttgtacctgctgtcagtgttatgttgacgtgacggcacgctctggggcattgaacaagcgcgatcgtggacacaccttagtacttttgctttgcttgcgggctaagagggcagggcggctcgaagcgcaataatttcaagccaacatcgtcgtattcctgcctcttggcactcgctccagactggtcaagatgagcctcttttaccacgcacaagcagtgatcatacggctgcttacatggctgtatgacctgctgcagcttggcgcagtttttgatgctctgctcaaagtagtcatgcgggtcacagagctagacgtagtgccggatttcattattagaaggggtatccggctgctgctgaagatcaggctgctgtctgtgagtgctagtgactgtgtgctggcagttggtagaactggcgggtggcagcagtgaatgtgtggtgacaggctgtgcaatcttccacttcacctgtgcaatcttccaagcaatatgctggcatgatctaacactgttacagcaataggtagggctttatcctaatgccttgcaagaacgccacacatcggtgcatcaccgttcctccctagatctggctccagcctgacatgcatatcacctgcttacacctcatcatctgctgccgtcatcatccttctgctggtgtgcagatgggtggcagcctagagcagcagctggagcgcaagttgacgtttgtgcaggagctcaagtgcctgccagtggcggtgcagacagcagcagcaaacgagcagcactacgaggttggtcctgctagtcctgcagcacacttgcagcagtagagaggacacgcagcagccacagcactggcatcgcagctggaaggtgttgcctggctgctcagaacatgctgaatgtagcttctactttctgaaataaagcgattgtgcgtacatcagcacgtgccatgcaaaggtagtcgtttgtgtgggaatggccacactagtaccttcagcattatgaagcagctgatgccagggttcacctgctgttggtgttgcgcccctgcaggtaccaacaaaatacttggcgctggtgcagctagcttgtgccctgcatatcacctggcaatgtgtgccactcgtcctgcgggtgccccttaggttttgctgatgctggggcttcaccttgcatttgcgttgcacctgtgaccagtgctaactgcttcctgctgtgccatgctgccactgcaggtaccgactgagtactttgtgctagtcctgggccgccacctcaagtacagctgctgcctgtacaacaacgctggcgagggtctcaatgaggcagagaggaacatgctgggtgggttaagagtcagtggttttggcatgcgttgagcctgagtgctgatgttgtgttgccgcagcttgcacggcacaagttgaagctgccgcagcattggtcgcagtgcacgttgtgtgaatttggtgtttgcttacaatgttccttgcaggtttaccaaattgcagctgtgcattgtgtagcatgactgccagcgtgcagagtctcccagtgcactcttctcacctctgctgccacgtgtgtttcctgcgtgccctgcgtttaccatcacctgcagcgctgtactgcgcacgtgccaagctagctgatggccaatcggtgcttgagctaggctgcggttggggcagcatgagcctgtttatggcacaagccttccccaacagcagcatcacagcagtcagcaacagcgcaacgcagcgcgagttcatccagcggcgtgcacgggacctggatgtgacaaacctgacggttataacagcagacatagtagactttcaggtagggtagtttgaagatatcgcgataagcattacttggcgttggtatcctcttctggcagcgcggctgaagtttgttttttgtgtgatgggcaattgacatggtactatgtcggtggatgcgcgtctgcagttcgtagtccagggtacaaacgcagtctgcataactggcaaagtgcacgacacgtgacttgactgccacctgcatgcactgttggcacccgccatattccgtgcacttctgctggcacataggcttcctgcagacgtgtgcacaccatgtactgcatgccgtcacaaactcaacaccaaccgcaagtatgtgctgctgtgtgcttgcaggcgcccggcacgtatgatcgcatcgtgtcgattgagatgtttgagcacatgaagaactacgcagtgagtgtgaagacagcctgaggctgtgtagcagcggcttttagcaagcagacacaggcagcagcgagtactgcaaggcaccgccaagaacgacaattgggagcttgtatcctcagtatgccatctgaggaagagtagatgcggcagctgctgtttaccccccacatgtcgaatggtggcatgagtggctgtgctgctggctgctcaacccagcccacttgtgggacagagtggcgctgtccagcgtgaatgaccaacagccatctgtggccctgttccctgttcacgaaaactgctggctgctgctgctgttgctgctgcaggagctgctgcgtcgcatcagcacctggctgaagcctggaggggcgctgtttgtgcacatcttctgtcacaagagcagcccataccacttcgaggtatgcacagctgcagctgccaacaccacctgctgcctccccgtttccttagcgactggcctcaggctgtggacacctcaggcttgtgtcaagaacctatagactggtgtcagtgctataggcaccataggtggcaagccattgtgcatcatgcacctgtctgcacccctgccgcctgcctcttgccatgatgcggcatgtgtgggagtgagtcgcgcttgatgtcttgctccctttgcagatcaactgccctgagggtgcaatgcccagccaggaccagctgctgctgcttccactggtgcatcctgtacacttctgcttgctgctgttggcctgcacaggtcaaggatgagtcggaccggatggctcgctacttcttcagtggaggcaccatgcccagcctggacctgctgctgctgctgctgcttacgctgatgcttcctgtacactgctgctctgtcctgttggcctgcacaggtcaaggatgagtcggactggatggcccgctacttcttcagcgggggcaccatgcccagcctggacctgctgctgctgctgcttacactgatgcttcctgtacactactgctcgctaccgttggcctgcacaggtcaaggatgagtcagactggatggctcgctacttcttcagccagaggcaccatgcccagcctcacttctcaagttgcggcagcatgcccagccagctgtaccatgcaattcattctgcaccactgcctgctgcctgctgcctttgcatcgtttatgtcatgcatatgttatttatttactaggtcaaggatgagtcggactggatggctcgctacttcttcagcggcggtaccatgcccagcctcgctctcaagttgcgacagcatgcctagccagctttaccatgaatcgttgcgcattactactacttcagtactcctgctgcctgctgtggtttgcaatcaataggtcaaggatgagtcagactggatggcccgctacttcttcagtggcggcaccatgcccagcctggacctgctgctgtacttccagcagcacctgacgctgcagcagcagtggtgggtcaacgggcagcactacagcaagacgtgcgaggcatggctggtcaaccaggacaagttcaggaaggccatcctacccatctttgcacaggtggggggggaaggggttcaagatgcaaccagtttggtatcatgcctttgtctactgtgtatgcttgcacactgcgtatcgctgtattcaagcatgcaagtggcgttggccgctggatggcaatcttgaagtgtggctcttgacccgcattgcagcaggggcgcatgggctcatgcagtacagtgcttgctcgcagagcctgagagcttcctggtttgccttgccgtttcccaaggctctgctggaagtacttttggggcatcagctgaaacttgcagcactgcagagctgttgtagccgaactttgctagtgtagtacgtcaacctaccccccacaccttgaccatgctgctgtgctgctgctgctgccgctgctgctgccgctgctgctgccgctgctgctgccgctgctgctgccgctgctgctgccgctgctgctgccgctgctgccgccgctgctgctgccgctgctgctgcagacgtacgggcgcgagtctgcgctgaagtggtttgtgtactggcggctgttctacctggcctgcagcgagctgttcaacttcaatgggggagaggagtggggcgtggggcactacctgtttgtgaagtcagcagcagccaacaagattgtgtgaccagtcgcagtacggctaggcaccgcgtttgctagcagttgctggtgcgctgtctgcgtgagacagaccatgcctcgtgacgttcaacagcaagttgttgctgttgttgccagcatgtattgtgcctgctgagctctcagaggccaaattacaccagcagtgtggtggtctgtgcatgctcactggcaggggtattcttggtacagagaggaggtgtggcttacaaggattgattattagagaggaggtgtgtgggaagcggcggggcaggttgtatgcagatgtgatgcgaacgttgccagatgcagcgccacagatgaaaggaagcgggaaggaaactggatggaagcgggaaccgtgtcagatagcatggcgagctgtgcaggcgagcagtgcagctccagcaactgcttgctgtgcctgcagtccctgcccctgctggtcatggacacacgccgacgacgcccggtgcatacataggcactctagtgctttactttgcgttgtttgcgcgtggttatgcgtcttcagcactgccgctgagccgggtgacatgccagtgttgctgatgtatccgccaaaactttttcgtggctggctgcagagcagtatatagtcgctgtgtgctcaaatctcaaccagaacaagcaacaagcaatcttcaccatcttgcaatacttctttcgcttcccggttatcagcaaaaacaagatgatgaaggtttcgcgcgtccagtgctccgtggcccagcaggcccatggctgcaccaagggcgcccacagcaaggccaaccacaagacggaccccataaagtccctcctcggcagccctgcctgggccctgctgaagtcccgcgcccgctacactcccgcgccgggccccgacttctccgtgtcactggagacggaggagcgtttcgtggtggctgtctgcaacatgctggtgtggtattccatcagggaagccaccagcaacatcatcagcgacaagtagttgtgcctccaggtaaggaaggcaagcctcacagcagcacttgcacagcctgtgtgatgtactgctagcatacagcacagccaatgcatggctcatgttccctacaaaatcattcacaccttcagcaagcttacgccttatctgcgctgcttctgcctctgcaggctcgcaagcggcaccgcaagcccagtgttgcggacttgattgcagcctggggacactgctacgtagatggtgtgtacacaacggccaccaccaccaccaccaccatggctctgacagccgcctctgcacctgccaccagcaccgtaccagccaccaccaccagcagcagcggcagcctggctgacgagccagcatcaacgacctgcactgctgctgacagcaagtccagcacagcagcactgctggcagcaccagctgcagctgctgtcagctcgccagtcttcatttacgttgagactggctgcggcagcagcagcagcagcctgctgagcaggcgcagcagtgttgacagcacagcagacacgcactgcgacccctgcatgcagcagcagcatgagatggctgatgcaatagcagcagaggaccacacatcgcacaacaacacacttgcagcagcaccattggcagcaggtgtgaaagccaaactgccactgcagcagcagcagctggatgtatgtgacacagctgcagcagaggctggcatggcagacaacatgcagcagcactcacagctgctgcagtgcctgccgattgctgaatcagcagcagcaacaacagtggctgcagcggtggctggtacggaggctgtcaaacagcctggctggctgtggcgagtatgcagcaggctgtttagttgtgtggctgacagccgcctgagctgggaggatggagtgttgacagttgaagtggctgtcagctgacgttgaacatggctggttggcgtttgttggcagttcttgttgttgttgatccttggttggttcggtgcagttcatggcattgtttgttgtggtcgtcgcatgcatccatatgcatcggggttgcatcatcccagcattgtagtactatcaatgtcaatagggtgaaatgcatcacttcaaggatgtgatgatgagatgccaccacgtgtacgtcactgtgacatgtcaccactgccaagatatgggtgtcatgtagctctggtgtgggtgttgtgtgtgagagaggaggtgagaggggtctgaagcagctggggacactttcttgcggtgatgcagcctggcaaaaaaagttttcatgtacccctctcacccctggcatacccacaacttgtccaaattctctgcttcactccaaatccaacgcacagctgatgggtgttgtctacaacgagcatggtctggcagcaacagtctggggagaggtagagcaggtggcctgggccaggtggcaggtggcctgggccaggtggcaggtggcaggtggccaaggcaaggtggcaagtggctaaagctaggtggcaggtggcctagacgaggtcgcctgccaaccactcgcctgacctggcatacccacaacttgtccaaaatctctgcttccctccaaatccaacgcacagctgatgggtgctgtctataatcaacaatgcttgattccagtgtaaaccctgaaacacaagagctgcgctgccgccaccatgcacagctcaacctcagacatgcatgctgctcagcacagccctactagtagtcagtgttaccacccccgcgtgcgatgcaaactgccttcctggcggcaatgctgttcatcaggttttggcacatggacagcggcatggaggcccaaatggcctgcgctgcttcccacattgcctccaggctagcatactgttgtgcatacaactgctgcttgagccaagcccatgcattctcaatggggttcaggtctggagagtatggcggccagtctgcaatgatgtatatggctttgaggctcatgaatgctgcagtgctcttagccctgtgcggactagcaccatcaagcaagtacacccactcatgcacacccgctgcactgaaaatcacctcagcatcaggctgcaactcctcccacagcacatcctggaactcctctgcacccacacctgtgtgctgcacaaacgccttcagcttcttgttgtaactgaagtatttcttggggtgcccagtgctgccagtgacgcggatgagacgggtgacgccatacttggttacaccaccatacacatgcaactgcttgcccttaataggcttgcaggcaactggcttggtgcccttcttgacccacttcttgcaccggcgcggggtggagctcagagtgaggatgatgctgtcgatggcaatgatgcggtcactgtcatgctgctgctggcagaatgcaacgcgtctcttcttagttgcgctggtcaagatgggctgctgctgcactggcgccaagtccaacgcattcttggctgccctgagcacggttttagtgcagatgctgctagctatggtgccttgctgcttgagtgctgctgatgcttttgctgctgactgatgctccagtactgttgttgctactgcttccacctggactgcattgagcgccttagggcggcctgaacgtggtaaagcagacacggatcctcgctcgttgtacttgtttagctgtgcctgcacgtatcgagtgggatgaccgagagctcgtgctgctgctgccacgttccacttcttggctttgaggtccgccagagtagtctggcgtttgatttcaagttcagcagcagtgcgtctcttagccattttgtcaatgtgcaacttctgagctagcttgctgctgtgtcaatcgacccagaagaacaacagcagcagcagctgaacaggcagtgtcacaaataaactaacctttgtcacgcatttgcgccaaacagcgaggtttaacatcatcatcatcatgttacccattaagccatagcatcaacgccatcgaggtttaacataaagaatacatcataacaagcacgttaacatagccggtgcgagctgtagtcaccgcttcacgatgtaccggcctcacattgtcccctggtgacaggtgctgcaggcagccaggctgaaacctgcattggagtcacccagagggcattgcctataaaatcaaaatgctgtatacctgagcacgtgacttgcaattataagactatgccatggagaagaagatgcatgcagcggctgtggagtttgtgactgaggtcaggcggcggctggggctgcctgatgcaggtgccaagctgacggagtcctatgccaagcgcaaccagcagcagatgccgttgtttctggcctggctgcagcgtcgcgtggaggcgttgggtggaaagggtgtccggctttgccctgtcttcagcgtgcggcgccagcatgtgcagctcgactgcaccacgctgctgcacatgctgagcggcatgcgcctggtgccagagcacctgatggtaaagcagagggcgaggcaacggactgggagggcgtgctggatctggtagccggcgtgtttgagccgccctgccctactaagcagaaggggaagctgcagtggtggggctccttgtcaacagatggcgtcgcagccagctttgtgtacgcagacacaaggccagtctcaaagaagggcaccaaaactgcaacagcagcagcagtcaccagcagcagcagaagcaaagggaccacgggcgctaccaccccagcactgcctcctccccacgacttggctgttgtgggcatcaaccctggcaggtgcacgatcgtgcacgccgcgacccaggtgcagggcacccgcacgctggagtggacgctgccccgcaagcgctaccacctaaagtccgggctggcacaggcgaggccaaggagcggcgttgggacacagccatgattggtggcgcctggaaacagatgaaccagcagggcggagcactgcgcagcagctctcttcagcagctgacccagcacattgcggcgtacgacagcgtggctgaggagtggtggacatccgccatgcagcgcaagcgggccaagctccgcttccgcacttatggcggccgcaagcgctgcttgggccgcttcttctcaggcttggagcgggacgtgtcggcagccgagcccaacaagcgcctggccattgcctatggtgccgccacgttcagcccctccggtactggcaagcccgccacgcccacaactgctgcttatagagcggcgttgcgcctgcggagctctggtgcaattgtggagaagcagaacgagtgccgcacctcaaagcagtgttgtcactgtcatggagatgtggaggcttgctggcagagcgtacggctgcagttgggaccagcaccagacacggacgttgctggtgctggcccctgcccatcacagctcagtgccagaattcaggtggagacatgtcacggacccacggtgccaaaggctggcgcctgcctgagggggttgctcttctgcccagagtgcagcaagttcctcaaccgtgaaaggtcagcagcgctcaacattcgcttcttgtttacacaaacacagctgctgggttgctctatgcccacacagtttgtggctcgtcgcaagcaaaagaagcagaagaagcgcaaccaggccagcagaaacaagctggtatacagagggccatgtccacttttgatccggccatgctgtagatgtgtgtgtaataataataatcattctgataagccctacctttcggcatcggcaccgcgcctcaccctctggggaggcggaaattgaacgactattattctctctactggtgtaagatgtggtgtagatgtgtgtgtgtgtgagaccacggccagagagaatgcattctctgcagctgccatcctatctgtcatcacagcacatgcactaaaagcatcctgacaccgctgctggcaatgatgatcatggctggccttccatctgactgtctacctgacatgcatacctaggtctctctcgctctcgtgctcacctgtccgatcatgatccgcatctcctgcggtgggtatgctgctgctgcagcactgctgccaggctgcacagggattgctgctgctgcagcgctgctgccaggctgtgcagggattgctaccactgcagcactgctaccaggctgtgcagggggtgctgctgctgcagtgctgctactgttgcgttgccgcttgggtgtgcgctcggcgtcggtgccctgcaggcaggtcacaagggggcatggcccggatgttgtttgacaatgtattcatcccatatgatgcaggtcactggcgcagttgcaggtgtctgtaaaggagctggcattcgcacactgctagcagcaaacgctgcaagtgacatgacaatcacacatgagccagttctacagctgccgctactgccccctgcagccaatgttgccttgtcacctacgtcatctaccttgcgcttgtgggcagccttgcgcctgatcttgttggtagccccgagcatggcatcaccctggacagagcagcagcacactatgagtacagcaacaggtaagaatgcaccacgtgacctggtgatgtgccagcacagtcagtaaagctgctctgcatatacatcccaagacacaaacacaggatgcaggtcactggcacggatgcaggtgctccagtacgtgtgctgtttgacaatggtgcagacactactgctttctgtcaaagacctggcatttgcacgctgccagagtttgctgaactcagttgcaaaataccatgaccggcaattgccattcctctctacttctgccgctgctctgtcgcacctgcagctggagctcgcgtgctagaccagtatttagcagctccctggccttgtcatcagccccaacgccagccagccacgcctcactggccaggtctgcagcagcagcgcagctacagaacatggcatagcggctgctacacagcaccacgctacaggcttggaagccgggctgttcgcacagcaggttacacagctgctgcgactccactggcaccctttgcagcggtttgtgcgtgcgcttgctgtagaacttcagcgagtcaggcaggggggcattgctgacatccagctgtgcgcgccgctgaaggccggagctatcgcgctcggcggcctcaatgctgcggatggtggcgttgaagaggccctgggtcaagtgagggtctgggccatcctggtacagcgcttgagggcattcaaggacaatgttgctgcctgcaccaagctggttgagtgccgtgcagctgctgcactcccagtcatcgtcagggatgcaggcaatccccaagcatgccatgtgaagtccttggaagcatccctggaggcagcagaactgcagtgacaagccagccatcacatgggagatcttccagagcaaactgaataatgataagaagagggccaggaatatctggaccaaatgccgcaacaagaaaactggcgcgtattattcagcatcctagacatgccaagtggcgcagcacggcgatggctggagctgtccagcacgccggtgatagcaaaggcgatagaagggcgatccatggcttctagcgaagataagggtgttatcagttatacagatgtgtttgcaaaagataaaacagccaaatcaagaagaaaacgacgtcaaggtgcccgtgttcacgtaacgtgtcattttgcagtgtaaacgggcttgttatttgaatcatacatgtgggtgggtttcctaccacatccaagtaacgaattcgtgtaacagtgtaaacaggccctaagggttgaatgcacgcacagaacctcttcagtgttccgtggcgccctgtcctgcacggcttacgatgttaggagcaacggttatgacccggttaccgcctcaattccaactcctgcactgcagcgcagtgccacactgtgaccttaggcagcctagcggccagcccgacacgaccaaaccaaagcaatcagcatgagcgcctgcatatgacacgcagcgacagcagatcatcaccatgctgatgcagaacctgctgctttcgtgcaatcacatcgccagcgcacagtacagcttagcagctgcctcaagcagcactcacgccctcctgcaagcctctagccaagcactgctgcatcacccatccatgtaaggcacatctgagcaatacttgtctgcttcatccagcgtcgctgtcatcctctgctgcctcagacatctgcaggcgccgcgcgccacacaaatctaaactgtccaaaaactgctgcgttgatgctatggcttaatgggtaacatgatgatgatgatggggcattcatcttgcaacctgacacatcctgtaacatagttggtgcacggctgctaggtaatgctgaaagtactcgactgttttagacactgcaggcaggcggctgcttagcagacaagggcagtaagcggcttgctgtcacaagggctactgccactcaaccaccttgtagtcatcagggccttctggaagcacaatccactgccacttgtcaaaggccctctcaagctgcgactgcatgatgatgatgttggagggatcatggagtgtgatgccaaccttggtctgcaagaagcagaggcagggcagtcacatatgatcacacaggtgaatgatgccaaaaacaaagccacctgcatggaatgcataatgctcctcaaacccggctccagtgtcaactgacaattgccacaatgctcagtcaacaagcgtttaagccttgcttgaacgccactgcgttgacccgtgtttgttggcaggaagttactcaccagccagctcttgggccactgctgcctgtaaatgtgccctgccaccaactcccccacactgcactccatgcctgtaaccatgcatgtgtatgctgcgtcggagctggagccatagtaaaacactaaggccctgtcacggtagcgtttaagctccttgctgctggcaatagacgacgttgggtgaaataggtccaaaataagcccttggtagttctgctgctgctcagttagcagctgctgctgcccagtttgcagctgctgctgcccagtttgcagctgctgctgctcagtttgcagctgttgctgctgctccttgaggagctccaactgcttgaggacctccgaaagcccaactgcatcacctgcatgatgcatcaaagacacatctgcaaggagtaagtgtctctaaatgcatgtggggtgtagagcaaagctgcgccagaaacacttttcaagtacggctgcttggaaaggcttgatcgcaacagatcacgcaaggcagcacacaaacagggtcaggcatggccgacgctcgctgtcggccccatcggaggcttcctgtggatgtcaacaagtgtgacgaccagcaagagtgagggtttcgcagcgcgcgggcgattgcagcccatggttgtgatgtgctaaattaggggcatcgttcgttcaggggcctgcgcccggatggtggcccctgccgggagaacaggcagcagcagacccttccaatggctttttctcgcaaacggccgaacttcacccttaatggacattgacccaaaacgatgctcatcgcataatctatcatctcagcgagcgtcgacggcatcggagggcgcctgtggatgtcacgctgctgttgtcacacgtcagcaacacgtgtgaacaccagcaagagtgagggtggttggacaggcatagaaacagtatgtctttcgatccaatgtcaatatgtcatcgaaatcgttggcatggacctcacccctgccagcgctctgcaacaaaacgatgatcgaaaccggcagagacgagcagcctcagaagcggccttatcgcctctgcctgttgctgaagaacatggacgaaacgcgtctgcagcagcaggaggtcttagcttgcagcagcgcttctgcaaggaggccagatgtcagtgctgcaggcacaacagatccatgcagggcagcgacagcgcagggctacatcaaacaccctgactgagtgccaaagtccattgccgtggcatcatgccacgggttccacactagtggtgtatattgtacttttcaaatcattagcagcaaccagtagaccctctactagagttacaataagcactatctggcgcacaccaagtgaaatgcgactgcactgcgacagccaagatcccagaacgtcaacaacggtgttgtatacattaaacacaagctactgctgcctttgtgaacgcagaatgctcataaacatcaaccttcgcccagcaaatgtagtgcatgcagcattccggactggcagatggtggcacatgcgatgtgcctgacaaccgggactcctgttgcatggggttgcacggctgctccacacacagcgcaagcaatgctggtttggcaggcttgccacgagcaccagtgtaagcacatgcacaactcacctgctgctgctgtggggacgagagaagaagccaggtaggaagccgtgacgagaacatgcgaggacacgcgggcagggcttcgttcagcgaaaggtcaaacaaggactatcgcagtatgaaagcacagtggcacgcagcacacatgagcacacagaatggtgatgatgacagaatggtgtcgcagggactgcctggtattgtgaaagtgttcaaacatgcgcacgacactgctttacaagcacattgtaaactatgctttagcagagtgctgcttggtgggcacgcacaacatgtgataacccagcttgcataatcaaaagattcataaactactctgtgctctgatgatgatgataaactactctgtgctgctgcggcagttcagactgcagaaacccttttcatgggaccagcaagtagtcctgcagaagaagggtttgcagcaactgctggcatgcgccacaggcggcaacttcatgctaacatgccaccgatgcatgccactccaacgctcacctggtgctggcacgggccaccaaggaatggcagatgatggtagctaccatgcgccaggtggtgctgcatgcggtgatggtaatcagcaggactgctggggcatgggttttggcggctgctccacacacagtggcaggccatgcatgtttggccgccctgcaagcacatgcatgactcacctgctgctgctgtggggacgagacagaagccaggtggggtgccatgaagagaacatgcaagggacacacgggcagggtgatattcagcaaaaggttaacaaagaagcttgcaaagtgaaagcacaggggcatgcattacacatgagcacgcaggattctgttgcaggggctgcatggtactgtggaagtgttcaagcatgcctcatgacacggctttacaagcacatcataaattacgccctagcaaagggctgcttggtgggcacgtgcagcatgtgataacccagcttgcatattcaatagattcatagactaatccatgctgctgtggcagctcaagctgctgaaaccccttccatgggaccagcaaatattcttgcagaagggtttgcagcaactgctggcatgcaccacaggcggccgctgcatgctaacatgccaccaatgcatgcgactccaacgctcacctggtgctgttgtggtgaagcaggggccgccaaggaatggcagatgatggcgcatgcacgggagcagggcaaggcagcatgtgcagcacaggtcaaacatcagtggccaatgcaatcagcattatgcatgcagcattcagcaatgcaggatggtaatgtggcatttgggagtgcagaggtgggtgatacgggcttgcagcacaagaccatgcatgaatcgcctgctgctggtgtgggatgatggattcaagggtgcttgacaagcgaacctacacattcacccacctgttggctgctgcagcttgtgtgacaagctgcagcagccatgaggcggtcgccgccgctgctggtaatgctgagcatgcagcaaaccaaccatcaccaaccaccggattgcacagcacacctggaacatcatacaacttgtaggtgcctgcctccaagacgtcgccatcagccaacaccactccatctttggttttcagctggcccaccacgagcagttgctggagtaccacttctgcacgttttggagcatagaaacgagcgatctctgtgttgtcagccgctttatgtactaggatgagctcacttggcgaggccattggaattcctgcataacagacagccaattgacagccatcaagcaaaaaaagaacaagcaagcttgcgaccatgtgcacagtcgactatgctgcacggcgatacaagtcaaatactgagacagcggcagatgcacactgctcacggcagcattccatgacacaaaacccactgccacctagcaggttgcgacaggctgctggacgaagccacctccaagccttactgatatgcaggtgcgcctgcagggccacctagctgcctgcagctagtgcgaagcctgcttgctgctggcttgttcccaactgcatgtagcacctgctatgctggtcgttgcatgtaaggccttgacaagtgatcaaaaggacgatttgactgtatctctgcgcagaaagggttgaaaaagccagcgccaaaggcaacgagtggaaggcaggcttgaaggccgtttcagtcgtgctaatggctgtgcaaagcttatgcgtctcagtaaagctgcagcatcaacgtaggctcactaaacgacaagcaaaacataggttcacagcatagcagttgctcaacacactgcgttacttgctctcagagcagtgctccatttcaactccttgaaccatgcatgttgttgctgcacatgggagaacacaagattgcagtgcatacagtgcatgcaatgttgttgaagaatacaggatgtctcaaaagttttgaaaacggaatgagagctgtgccactagatgatgatagaggggttacacggtgtgttcatgcggcatacgccaccacagacatctggtaaaataggaagctgcaagcagctcagctcgggctgtcactctgaggtcttaagaggttaagacataaccccagaaaaacctctgtgcgtagggtatgacattggttatgctagcataaccgtcttccttacgacacgtaatttggctgcactctgagaatcttcgggcatgaatgcagtattctaatcagtgttggtgacagcagtctatacatcttccagtgtagagggcaggctgaacatgcttcgctgactcagcaaaatgctgtgccacgtagtagagagtgaccgttaatcgatgctgcccacatacgagatacatgtgctgagcagcatctgatcatgtgctgttttggctaagtgggaacgtgccagcgtggtgtccgggaggtcgctgattcaagtcggggtgtggtcaaatacagttccgctcgcgcgtgtgaatagccttagccttagccgcatgacgcatgacgccaaaaagcacttgattgggctctgttcttgttttgcaggggtgctgctgtgctgccagggctgtattgtggtccgtgcatgccctggcatgccttcctggtgcctgctggtcaacagatgctgcctgtatcacagcagtgccttctgaagctgttcatgtgtgctgctgtggtctggtctggcatgcaaagctacaggtgtgggccttggtgtcatcttcctcccacactggcaaaggcaaatttattttcacctgcggggatcgggtcctacaggtgcctaaacgttagacattaatgttcttataatacatatcggtgctgtacccccatcgctgcgacgtaacctagcccagactgcctcacatactcgccactcaacaaccgcggaacgcctctgccactgcttagacaaaccccagctgccgataaatcaacaaaatggacgttttaagcggcttagatgacgctattgaagatgtgttggcagcagcagagacagcttgcgatgaggaggacaggccggatgcgcaggctgtgcagaactacctgttcaagctctcacaagacaacctgccaaacaagggcaagaggggctgcatcgatcagttcggctgcagctgctttgtagtgccttgccccatccagcagcagcatgacatggcacgccaggggaacacctctgccaatgaccctgtctttgcatactgccaatgcaactcgccacaacccagcgcaacaggcgtctccactctgctgccaaatgcttgtgaaacccgctgtagcaggcgtctccactctgccaccaaatgcttatgcaaaccgtagcagcaggcgtctccactctgccaccaaatgctgatgcaagccgctgtagcaggcgtctccactctgccaccaaatgctatcaaaaaccactgaatctggctgtgcgcttgctgcgccacgcagctgcgcgtgtcaacccatgccgcggcatgcaaggccctggcgaatgcgttgacagggcttattgcccaacagcacgagtagtctgcggctgcagcaaaacgttttttcaacatactgcagctgcgctcatcgcttatgcgtattcagtcgtcacctgctggagcagctgcagctgcgcgcatgcactgcgccatcttttgcatcattgctgcaaagacacggctgtcgagagcataaagacggatgctgttgcgaagctctgactggctacgcagctggtggaacagcgcctggtgcctgtcgaataaatggacgatggtgcgcctatccagagcgaccgctgggttgatagcctgcacatcctcgagcaggctgcggtactccgcagtgaagtagtcagcgtccatgatgccctgcatcatcatcatcatcatgttacccattaagccatagca

SEQ ID NO: 142 - DNA, 15421 bp, Tetradesmus sp.
  source 1..15421: mol_type = other DNA
atgatgatgatgacgacgatgatgatgatgatgatgatgatgatgatgatgataatgatgatgatgatgatgatgatgatgatgatgatgatgggtgttgctgaaaagtgcacagattatgtccaaggacaatccaagagcatcttgatccttggctgcgctcgactatttcctcgcctgtccggccctctcgactgtttccaccatcagtgcacgttcgcagtagacgacacacacggtaaaacaaccagtctccggtgctgcagcgaaacaacccaccattctggccttccgcctcctaccatattgctctggcaacgaggcaagttcattcggatgcggataaacattcggagttgtgggagtgcgggcgtcggctggctgcttcagccattcggacagttttgtttgtcgtttgccccagcagccatgcaatgcactagcctctacagcagggcccagcattttgtggacagtccacctcatgcccttctacgccctgtttgtatacagtgtggtcccccaaggtcccgtgacgaccttggtcccactgccaggtggtttgttgtggaatacgttgttaacgtattgattaccacttccccgggctatggggacacagtccctcgtttagccagcggctgccgggcgctggggtggttgtccaccaatattgctgcaccgccattgccttaagtgatgatgcttgtccacattcgcatggcacagggtgtcatggtgcaatgcttgcctgccctagctggtagcgtgagactgttgcagcagcagcagcagcagcagcagactccaggcactgccattcctggcacgcacacatgtgcaatgttccacacgctcatggaatgcaagattcactcaactgtgcaacatgccagcttgtcatcaaggcatcagacgtgtctgcagtgcctgagctagcaactctgtgacagctatgctttgcaagcggcgcagcttcgctgcagcagcgacccatcaaccagtgttctcaccacaccacctgctgctgctgtactgctgcaacccagcctgcacaacagctgctccaccaccaaccggtgtaatttgctactgctggctatcattgcagtgctatggaaagccgagagggaactgtaggggagcctattgaacccaacacaagctgcacagcatgcggcagtcaggacagccctgaaaccatgctgatatgtgagggatgcttccaaggacttcacatggcatgcttggggattgcctgcatccctgacgatgactgggagtgcagcagctgcacggcactcaaccagcttggtgcaggcagcaacattgtcctcgaatgccctcaagcgctgtaccaggatggcccagaccctcacttgacccagggcctcttcaacaccaccatccgcagcattgaggccgccgagcgcgatagctccggccttcagcggcgcgcacagctggatgtcagcaatgccccactgcctgactcgctgaagttctacagcaagcgcacgcacaaaccactgcaaagggtgccagtggagtcgcagcagctgtgtaacctgcgcgcgtggtatttgccgtatgagaatagcaggtattgaacgtgcgctcacatggatcacacgccaccacgctaccactatgccattggaacggctagcacgaattgccctgacatgtgtattatcgatacaaaacaccgagctctttgaagtaacactgagactttgacgttgacaccgttttttccgtcatgccagtcgttctctgcgcagagttcatgttattgggtgggggaagctgctttttgcctctttgaggctttttgtggtttactctcgtgtaccgcgctctgcggtcctaaaagtgtctgcgggcacacctggtaacttacttcaatcaatcaatcagacggcaaaaacggtattgcgtttacttttgtgtcaacctttcccccaaaaccctaaaacacaagagctgcgctgccgccaccatgcacagctcaacctcggacatgcatgctgctcagcacagccctactagtagtcagtgttaccacccccgcgtgcgatgcaaaccgccttcctggtggcaatgctgttcatcaggttttggcacatggacagcggcatggaggcccaaatggcctgcgctgcttcccacattgcctccatgatgatgatgatgatgattgcctccaggctagcatactgctgtgcatacaactgctgcttgagccaagcccatgcattctcaatggggttcaggtctggcgagtatggcggccagtctgcaatgatgcgtatgtctttgaggctcatgaatgctgcagtgctcttagccctgtgcggactagcaccatcaagcaagtacacccactcatgcacacccgctgcactgaaaatcacctcagcatcaggctgcaactcctcccacagcacatcctggaactcctctgcacccacacctgtgtgctgcacaaccgccttcagcttcttgttgtaactgaagtatttcttggggtgcccagtgctgccagtgacgcggatgagacgggtgacgccatacttggttacaccaccatacacatgcaactgcttgcccttaataggcttgcaggcaactggcttggtgcccttcttgacccacttcttgcaccggcgcggggtggagctcagagtggggatgatgctgtcgatggcaatgatgcggtcactgtcatgctgctgctggcagaacgcaacgcgcctcttcttagttgcgctggtcaagatgggctgctgctgcactggcgccaagtccaacgcattcttggctgccctgagcacggttttagtgcagatgctgctagctatggtgccttgctgcttgagtgctgctgttgcttttgctgctgactgatgctccagtactgttgttgctactgcgtccacctggactgcattgagcgccttagggcggcctgaacgtggtaacgcagacacggatcctcgctcgttgtacttgtttagctgtgcctgcacgtatcgagtgggataaccgagagctcgtgctgctgctgccacgttccacttcttggctttgagggcagcaagagtagtctggcgtttgatttcaagttcagcagcagtgcgtctcttagccattttgtcaatgtgcaacttctgagctagcttgctgctgtgtcaagcgacccagaagaacagcagcagcagctgaacaggcagtgtcacaaataaactaacctttgtcacgcatttgcgccaaatagcgaggtttaacataaagaatacatcataacaagcacgttaacgtagccggtgcgagctgtagtaaccgcttcacgatgtactggcctcacattgtcccctggtgacaggtgctgcaggcagccaggctgaaacctgcattggagtcactctgagggcattgcctgtaaaatcaaaatgctgtatacctgagcacgtgacttgcaattataagactttctcgtcgattttcagcgattttagcagcacagagcttacatccaagccatgtacagctgcagtgaagttgacatactgaaccggctgctttggcctaatcaggcctgctgctgctgccacactgcaggcaggcaagaactgagcactggctggcaaaacccacacactaggtgccaacatactcgaagactggaggcagattctttcagcaagggggtgaaagtagactggaaccacattgcatcatttcagcaccaacacagtggccatagtgcaagccctcaatttcctgcaaactgcagcagcagcattttgtgactaaacagccaaatgaatggtaggcacctctctgaggcagacaggtcaggccacatgttgcattgatgccacaattgcagctgcaccttgtcacattcagaagtcagccatctccaatgtttggttcaaagaggtgtagatggggcatgactcaaacagcgacagtcgaatgcagcctgaggggggccatactcctaccaggcgacacaaagcacgacctgctgcagcgcctggagtcactggtcttggctgtctccaagctgatgcggcgcggcagcctgctggcgctgcttcactacacgcggctgctgggcgacggccaggacagggctgcagacgctatcacgctgtggacagacaccgggtagcgccaggtcatgacgatcgggctgccaaccttcagcatcaggaaattggaggaccctgagatgcgcgtcacatacgagatgtacaagcacctgttccctgccgatgatgaccctgacctgagccacatgccaacaggtacagccaaaacgctgacccatgcagccacccaactgcgcacagcattcacaaacaacctgtgggtgccgcttgtaccccgcctcaagcgactgtgccgtgcctggcggcggaaacgtaagcaggaacaagtggccaggagcgatgatccgagcatcttggacctggtgcgggcgattgagacaggggcagactatgccatggagaagaagatgcatgcagcggctgtggagtttgtgactgaggtcaggcggcggctggggctgcctgatgcaggtgccaagctgacggagtcctatgccaagcgcaaccagcagcagatgctgttgtttctggcctggctgcagcgtcgcgtggaggcgttgggtggaaagggtgtccggctttgccctgtcttcagcgtgcggcgccagcatgtgcagctcgactgcaccacgctgctgcacatgctgagcggcatgcgcctggtgccagagcacctgatggtaaagcagagggcgaggcaacggactgggagggcgtgctggatctggtagccggcgtgtttgagccgccctgccctgctaagcagaaggggaagctgcagtggtggggctccttgtcaacagatggcgtcgcagccagctttgtgtacacagacacaaggccagtctcaaagaagggcaccaaaactgcaacagcagcagcagtcaccagcagcagcagaagcaaagggaccacgagcgctaccaccccagcactgcctcctccccacgacttggctgttgtgggcatcgaccctggcaggtgcacgatcgtgcacgccgcgacccaggtgcagggcacccgcacgctggagtggacactgccccgcaagcgctaccgcctggagtccgggctgccacaggcgcaggccaaggagcggcgttgggacacggccatgattggtggcgcctggaaacagatgaaccagcagggcggagcactgcgcagcagctctcttcagcagctgacccagcacattgcggcgtacaacagcgtggctgaggagtggtggacatccgccatgcagtgcaagcgggccaagctccgcttccgcacttatggcggccgcaagcgctgctaggaccgcttcttctcaggcttggagcgggacgtgtcggcagccgagcccaacaagcgcctggccattgcctatggtgccgccacgctcagcccctccggtactggcaagcccgccacgaccacaactgctgcctatagagcggcactgcgcctgcagagctctggtgcaattgtggagaagcagaacgagtgccgcacctcaaagcagtgttgtcactgtcatggagatgtggaggcttgctggcagagcgtacggctgcagttgggaccagcaccagacacggacgctgctggtgctggcccctgcccatcacagctcagtgccagaattcaggtggagacctgtcacggacccacggtgccaaaggctggcgcctacctgagggggttgctcttctgcccagagtgcagcaagttcctcaaccgtgacaggtcaacagcgctcaacattcgcttcttgtttacacaagcacagctgctgggttgctctatgcccacacagtttgtggctcgtcgcaagcaaaagaagcagaagaagcgcaaccaggcctgctgaaacaagctggtatacaaagggccatgtccacttttgatccggccatgctgtagatgtgtgtgtgtgtgtgtgtgagaccacggccagagagaatgcattctctgcagctgccatcctatctgtcatcacagcacatgcacaaaaagcatcctgacaccgctgctggcaatgatgatcatggctggccttccatctgactgtctacctgacatgcatacctaggtctctctcgctctcgtgctcacctgtccgatcatgatccgcatctcctgcggtgggtatgctgctgctgcagcactactgccaggctgcacagggattgctgctgcagcagcgctgctgccaggctgtgcagggattgctactactgcagcactgttgccaggctgtgcagggggtgctgctgctgcagtgctgctgctgttgcgttgccgcttgggtgtgcgctcggcgtcggtgccctgcaggcaggtcacaagggggcatggcacggatgttgtttgacaatgtatacatcccatatgatgcaggtcactggcgcagttgcaggtgtctgtaaaggagctggcattcgcacactgctagcagcaaacgctgcaggtgacatgacaatcacacatgagccggcgggacgttaaacacgtggcgcagtggtgatgacggacgaacagtggccgaaaggttgcaggttcgattctgagcctaagcagtatgtccctggactcagggatacagttggcaaaagccgaaggaaggatgctgctaatgtcctcgcgactctccgcaggactccgtcgattgctggctatatacacaccggccctgctaggtatgcagtccaccgtatggggtgattccacatgctgcctagtaaggggtgtaagggtctgggtggtctaccttacaccgaaaatagagagaataatcagtctgctttccgcctccccagtgggtgaggcgcggttgccgatgccgaaaggtatggcttacaaggattgattattattatgagccagttctacagctgccgcgactgccccctgcagccaatgttgccttgtcacctacgtcatctaccttgcgcttgtgggcagccttgcgcctgatcttgttggtagccccgcgcatggcatcaccctggacagagcagcagcacaccatgagtacagcaacaggtaagaaagcaccacgtgacctggtggtgtgccagcacagtcagtaaagctgctctgcatatacatcccaagacacaaacacacaggatgcaggtcactggcacggatgcaggtgctccagtacgtgtgctgtttgacaatggtgcagatactactgctttctgacctttcagacctggcatttgcacgctgccagagtttgctgaactcagttgcaaaataccatgaccggcaattgccattcctctctacttctgccgctgctctgtcgcacctgcagctggagctcgcgtgctagaccagtatttagcagctccctggccttatcatcagccccaacgccagccagccacgcctcgctggccaggtctgcagcagcagcgcagctaccgaacatggcatagcggctgctacacagcaccacgctgcaggcttggaagccgggctgttcgcacagcaggttacacagctgctgcgactccactggcaccctttgcagtggtttgtgcgtgcgcttgctgtagaacttcagcgagtcaggcagtggggcattgctgacatccagctgtgcgcgccgctgaaggccggagctatcgcgctcggcggcctcaatgctgcggatggtggtgttgaagaggccctgggtcaagtgagggtctgggccatcctggtacagcgcttgagggcattcgaggacaatgttgctgcctgcaccaagctggttgagtgccgtgcagctgctgcactcccagtcatcgtcagggatgcaggcaatccccaagcatgccatgtgaagtccttggaagcatccctcacatatcagcatggtttcagggctgtcctgactgccgcatgctgtgcagcttgtgttgggttcaataggctcccctacagttccctctcggctttccatagcactgcaatgatagccagcagtagcaaattacaccggttggtggtggagcagctgttgtgcaggctgggttgcagcagtacagcagcagcaggtggtgtggtgagaacactggttgatgggtcgctgctgcagcgaagctgcgccgcttgcaaagcatagctgtcacagagttgctagctcaggcactgcagacacgtctgatgccttgatgacaagctggcatgttgcacagttgagtgaatcttgcattccatgagcgtgtggaacattgcacatgtgtgcgtgccaggaatggcagtgcctggagtctgctgctgctgctgctgctgctgcaacagtctcacgctaccagctagggcaggcaagcattgcaccatgacaccctgtgccatgcgaatgtggacaagcatcatcacttaaggcaatggcggtgcagcaatattggtggacaaccaccccagcgcccggcagccgctggctaaacgagggactgtgtccccatagcccggggaagtggtaatcaatacgttaacaacgtattccacaacaaaccacctggcagtgggaccaaggtcgtcacgggaccttgggggaccacactgtatacaaacagggcgtagaagggcatgaggtggactgtccacaaaatgctgggccctgctgtagaggctagtgcattgcatggctgctggggcaaacgacaaacaaaactgtccgaatggctgaagcagccagccgacgcccgcactcccacaactattgcaactccgaatgtttatccgcatccgaatgaacttgcctcgttgccagagcaatatggtaggaggcggaaggccagaatggtgggttgtttcgctgcagcaccggagactggttgttttaccgtgtgtgtcgtctactgcgaacgtgcactgatggtggaaacagtcgagaggggcggacaggcgaggaaatagtcgagcgcagccaaggatcaagatgccaaggaccaaggatcttggattgtccttggacataatctgtgcacttttcagcaacacccaaacaacttgctggatccctactgaatgtgttcaaaaatagccaaaaccgtagtccgatgctctttagagagctttgcggcgaggcagccaaactagtgcacagcctctcgagagagagacttttctgggtctccaatctctaagggttaggtataggccgggatatgggctgtctgctgggtattgccctgctatatgaaggccctccacgtgctgctggtggtggtcggcatcaggagttaggcagctggttgttgacgatgcacagtgacagtcgtggtgttcatgctgctgatctgtactgcttttgggtactgcttttgggtactgcttcagcttcttgctcgcgggatacagacttgagctgcagaggtggcttgtggggtgctgcttgatcagctgctcgttatgtgcaggtacaacagtgctgcagcaggtgcagtacgctagcctggccccctcccctcagccaaaccagcaggcagcacgaacagcgccatcaatacgctggcgtgtagcaacgcatcagacattgagcatggctcaacagcggaagcctttgaatgtcagcaccacttgtgttcggggagcagcagtgccctcacccacatgacaatgatagtactggcaccagcgcagcacgtggagcgtaggcccattgtttgggattgggttcacgttgttctaaagcaactgctggcctattaacgtcgaccaccacccccatcggtcacatcagaatacttcgccgcaaaacaattgactttatgaatcagagctattatgtttgttgatcatagttgctagaaatcacatccgcagaacagcgccaccagggctagggcgagtgtggcttgcaaccaggcaggagcagcacctgaggcggtgtctggcatgcagtgccggacagtatcagcgttcaagtagcattgatatatgaaccggaccctgagcagcagctgcggtcacagccatgctgtcactactacaagggtcgctgcaggagccaggtactgacattcgcagcattgctgccccctagacattgttaattgatgtaattcaggtttggtaaggctgcagccgcgaatggggttgccagggtaggttaggttgccatgcaccttgacgctgtgctgctgctgttgcgtcggcactttgtgcaggttgggcagagaggctgcccactacagcagcaccaggacacctgctacagctgcatacagctacgtgtcatctgagggcctgctgagcagcagccagctgcaggtgggctgggacaccatacattgctagctgcacctgccatcagctgtgcctggcgcctctcatatcgctcgacagatgcactgctgcgctgaggggtgaatgcaacagaatgcttgcaggaaaccttcctgaaaacttgcttaggatcggtggctgcgtgctttcgttggcctgggtataaggtgatgaggtattcaggcaagcttacacctgcaggaatgcaggcagcacacgcacaggtgactgtgactgtgcacgccgccactattgacagtgctcctttagtttcaacatctgcatctcagcagggcacttctcatgttgtcgtctgctgcaaacttggtgttgttcccgcaggatgtggtgctgtcagggctggcagatccagcagcagaccttctgctagggtccaacggcagcagcagcagcaatatcaatggccattacaacagacggccacgccggcagctgcagcagcagcagcttcacgctgagcaggtgcctgcgtcaagcaacggcacggtgcctgcaagtttgccagaacaacaagtgcagctaaggcatgcaggacaaccacctctgcagcagcagcctctgcacctgcagcagcagcagcaggagcatccgttggagaagttgcagttgcagccgcagcgcatgcagcggcagtggagcagcatgcgcaactggcagtggctggcatcgcagctgcagttcaacagcagcaacggcagcagcaggagcagcacctcgttgcagacacttgtcagcatgctgacgcagctctcacaaccaggtgtgggcccatcgcagcatgataagcaacagcagcagcggttcagggcgtttctggcacagctgctgctggcagtgcagcagcagctgcaggcggcagcagtagcaggtgatgctgcagcggcagcagcacctgatgatgtgacagatctgctgtgggggttggcaaagctgagggtgcaacctcaatggagtgaatcccagccacagcagcagccacagcagcagcagcagcagttgctctccccaggtcgtcttcctgctgctcaggtgctgccgcggcgtgtggcagaagtggctgcagctgcagttcactgcttgacacagcacctgcagcagcagcagcagtggggcagcagcagaggtggtctgtactcccctaggcagctggcactgtgcggttgggcacttgcaaagatagattaccccatgcagcagcagcaggaacaaagcctgcagcaagacctgcagcaatggcagcagcaaggccccctccagcagcagcagcagcatcctttttgggacccttacctgtcagccgtgcagcagcagctgcatgagtgctgccctcaggacttggcgaacattgtctgggcactgtcacagctaggctgccaaccaggagcagcgtggatggatgcttacctggcagcagcacaccaagcattctgcagcagcagcagcagtggtcaggcgttggccgttgtcatgctaagcctagcgcagctgggtgaacagccgcccgctggctggatagatgcagtgttgacgtcattgctgcacccacagcagcagcagcagcagctaggccggcagcggcagcagcaacaccgacaccaacgctggcagcagcacccgcatgacgacagcagccagcacctgctgctgcatcagctgaatggccaggcgctgggttcaatgctgggtgcgctcgcgatctggcgtcaccggccgagtgacgcttggctggaggcagtacaaggtgcactgctgtactgcctggagcgctgcaacgggcaagatgtagcacacattgcctggaagctggcaacactgatgcagctgcccagcagcagcagcagcagcagcagcagtctgcatttgtcaggggatgaacaggagaccggcttagctctgctgcagcggcagtttgagagcaacagcagcagcctgttcagctggccagctgccagcaccgtaccccagcatcagcatcagcatcagcatcagcagcgttgtgtgcagcctgagctgctacaggagctggcccatcgtctggctgagacagcacacagcactgcaccgtgcatggtagcgcaaggcatgtggggcattgcaaagctgtaccagcaagcacaaccagcagcagagccttggcctagcatacacgccggaaagcaggagcagcattggcctagtcagcatgtggcaggtcgcaacagcagcagcagcagcagcagcaggcagcagtcgctgcatcaggagttgcagcagcactggcagccctgcagggctgcactgctgcactgtgcggcagcactgcagcagcggcaggcactgaatggtctagactgcaagcagttatcgctgatagcttggggcttggcactcgcaggtggcaacacgttgccatcccaacagcagcagcagcggcggcagcaggacagtagaaattgcagtctaggtggtagcagcagcacttctaggggcagcagcagagtgattagcagcaggtttactgtgccacatcagtttgctcaacagatcctggatgcttccagagctagcttagcagcagcagaaccgcattcccaagcgctgctgctgtgtgcagctgtgcacctgcagttgcagccgtcctggcagtggctgctggggttttacgaggccacagaaccccagctgaaccgctgcagtgctcaagacctgtccatgatagcggcagctcttgcacagctgcaggtgcggccgttagggtcttggctgggtaggtttctaggagccttccaaaccctagctgaggcacagcacagcagcgtcacacctggctgcttggtatctgtggttcaggcagtggcagcgccgtgcttgggtttagcagcgggtagtcaaaaccctagccagggccagctccagcagcagcagcagcagctggagctgctgtcgccagggtggacagcagctgtgcagcagcaggtgatgcagctgctgccgcagctgtcgctacatcaggttgtggtgctgctgagagcagcaagcaaacttggctgggcgaaagaggggccagccagcagcagcatcgatgggggtgtacctcgcggcacaacggctgtagctggcttgctggcagcagctgctgagcgcgtgcagcagcagcagcagcacacccagagcttacctagccagacagctgaggagcagttgcagcagctgctgcagctgtcagctgctgttgtggcgttgcctgctgctgctgtgcctgcagactggtggctctggctggcacagcagctgaatcagacactgactcagcagcagcagcagcagcaggaacatgtgctggctgactgtactgcctatgagctgtgcagtagcatgcgaacactgacagcagtcatacgcaaggtgcagcagcaccagcagctcttgccccacgaccagcagcagcagcagcacgctgctgcattgttatgctgcagcctggacgctgtcgtcgttgcagctgctcagcaggctcagcagctgccaattaaccagtccctgcagcttgttgcagcagcaacagacagcatgcagaggctggcacaagctagcgcagcacccaacagccacgccagtgtatcaactggagaagcagcaggttgtgcagctgcagtgcagaagttgcgtgggtcggtgcagctgcagctgcagcaacagctgcccagactgagcctacatgagcttgcgtgtgtgttgcagcaagccagtcagctcgggttgctgctggcatgcacagcagcgcctacagggcatgctgctgaagttgcgaagcagtttgcgcagccaggtgattgcttgatgcaggtgactgtgaccgcgttgcagcagctgctgcaggatcttgaggctcagcagcagcagcagcagcaggaggctatctcctggcatcaccagcaacaacagcagcagaaccagttgcacatgcaacctctgcagcagcagcagcagcagctcatgtacagaggcgcgtccttcaatgatagcagcagcaatcaggtgcatgtggtgacgcagctgcgcatgccagcagtaagtgctgctgccgcagggcagtttgctgacatcttggcagcttttgcacgcagcagttacaggccacccagcaagctgctgcggcggctggtagcggccatacagccgagtcttgaacagatggcacctgcacagctgtacagtgtagcagctgcaggggcagcgctgcagctcaggggcatggttggccagcagtttaggggccagtactggctggcactggcagctatgctgcggtcacagcagcagcagcagctcgttaggagacctggtggtgttgttacaagtggggcagcagcagcagcagcagccggcagtacagatgcgtctgccgggatgcgcagcaggcgtgggatgtcaccagcagcagctgcctcggcaacaagcatggccacaaccagcagcatgagcagcacacccggcagcgacagcagtcacagcacgcgggtgttgctgaccctcagggctctcaacacactggcggctggcacacccagcagcagcagcaagtggtccaacgcacctgttgctcttgatgtttacagtggctgtgcattaggtgcaccccctcccaggaggctcattgaactggccttctcagctgctgctggagtgctgccacagctaagcagtagccctgcccagcaggtgctgctgctgcagctgctggtacccctggcagcgcggctgtcagcaaagggcctcaggggcttctacctcagggtgcggcagcagctgcaactgcagctgatgcctgaattggagaggtgcaaggcgcgtgcggcgctgcagcagctggtggagtgctggagggctggcaagcagcgaagggagggggtggtgcagcggcagcggttgttgaagcggcagcgggagcagcggatgcagctgctggctgctagctgcgttgctggcgggccggatacggatccagctgctgaagatgccag

SEQ ID NO: 143 - DNA, 20645 bp, Tetradesmus sp.
  source 1..20645: mol_type = other DNA
tctcatctggcagtgcacgcttcataggcaggtggcgccactgcagatgacggtctacttcatggcaacgccgcagcaaatgatctgtgctgatctcatattcatctaacatatcatgcaagaccttagtgcgctgcactgcatctctgatgctagtgaagtatgcgtgctcttggtactctacatagttaggtggctgacaaatgtagcgcgtctgcatgtagccctcagccaagatcgcagcacacttgcgagcttgttcatccggcagctttggctcatgcccgccgccccagatggtgcgcagtgtaaaagaggtctgcagctttgtcatgttgtaccgcatgaaccggctgacatcccgaatgtgccccggctcgcatggtgtgaatctgctgctccactgctcctcaaacatggcaacagccgcggctggaacatgtggcagcacagcattgtgcatgaacatgcacttcactgcacaaaggcgtgcctgcagctgcacttctggggtgtcatgcatggcgcctgcaaaaatgcgcacgcgcacagcaacagagatggcaagggcgcagttgcagttagtaacagatgggcaacataacttttcactgtgaagttcatactgcaacatcctgcaaacttgttatttcctcactgccctcgtgattgttagcacgaaagctgatggtctgctgtttgcgaggaattaatcatatgcaaacagaatcagtttgagccacgcttgtgccacagcagagctaagaggagaaagtatgttacactcccattctggacgccccgccgcgcctaatacagacggtgtggggctctgcttgcacccccaaacactgatctgatatatatgtgttctatgtagaaagcatgaagcagctgcagaggccgtgtctgagagcacctcacagtgtacaactgttacaccaccagtaaccgctgagcactgctgctgcaggcgttctagaccacttcaagtagcacaaacttctgtgttgtccagctcctcctacctgctggtgctgctgctccctcgcagtgctgtccgtgatactgttgttgagctaggtgttggccaccagcacagtgtattcgtgtgctcctgtggaaagttcgcaagagaggagaaatcaagggccggttttagacattttgaggccaggtatgtgcgtgcagatgttgtgctgctagtaaaacagcagcagcaggcagtggtgtgtacaacattgctgtagcccccaggcagtgctggtttcaggaattggtatgaactgagcagaatcgatttgcatggtgtgctggctagcatagcatgccgtgctaacagtcacgagggcagtgcaagtgttacctgtcacatccttccaagcctcacacccacagaccctgtatcgtcagttcggacgcctagtaatgcaattgatgtgcatttgattttttggtgcgtttggccttccgtgaagcacattggcgttaatagagccctgggggtgggaaacatttccccccgatttgcgctcacacgcgccagggaccgcctgctagcaccatttcatgctgctgtaatggcgttcaactgggcacgaagcttcgtacattcggcttatggcccgttcggcctttgctggggactagtgcacgtcggcagctagctgtctcacgccataatagcaatcatcgtagccccatgcatgtcacaaaagatccattacacaacattgcaggcttcacccacgcctacgagaagcaatcaaagggcgagggctcacccttcacggtgcaccgtacactgtcagactacgccacaaaccaccagctgtgtgcagcagcaaataatgcctgcatgcaccagctggcccccacgctagcagcaacaaagctgctaaacacacatgccaagtctcagttgccagaagtgctgccagcctcccttgccattggtgctggcgcagttgaatgccactgctgttgtgaacactgtgttgacaaaggccagcatgaaacatcagtgcagcacacactggcccaccctacccttcggcattactcacaccgcgcctctacctccctctcaatgtcaatagggtgaaatgcatcacttcaaggatataatgatgagatgccaccacgtgtacgtcactgtgacatgtcaccactgccaagatatgggtgtcatgtagctctgatgtcggtgctgtgtgtgagagaggaggtgagaggggtctgacgcagctggggacactttcttgcggtgatgcagcttggcaaaaaaagtttggataaccccctctcacccctggcatacccacaacttgtccaaattctctgcttcactccaaatccaacgcacagctgatgggtgctgtctataatcaacatgttgaggcagcagcagtctggggagaggtagagcaggtggcctgggccaggtggcaggtggcctgggccaggcggcaagtgcgctaaagccaggtggcaagtggctgaagccaggtggcaggtggcctagacgaggtcgcctgccagccacccgcctgacctggcatacccacaacttgtccaaaatctctgcttcactccaaatccaacgcacagctgatgggtgctgtctataatcaacaatgcttgattccagtgtaaaccctaaaacacaagagctgcgctgccgccaccatgcacagctcaacctcggacatgcatgctgctcagcacagccctactagtagtcagtgttaccacccccgcgtgcgatgcaaactgccttcctggcggcaatgctgttcatcaggttttggcacatggacagcggcatggaggcccaaatggcctgcgctgcttcccacattgcctccaggctagcatactgttgtgcatacaactgctgcttgagccaagcccatgcattctcaatggggttcgggtctggagagtatggcggccaatctgcaatgatgtgtatgtctttgaggctcatgaatgctgcagtgctcttagccctgtgcggactagcaccatcaagcaagtacacccactcatgcacacccgctgcactgaaaatcacctcagcatcaggttgcaactcctcccacagcacatcttggaactcctctgcacccacacgtgtgtgctgcacaaccgccttcagctttttgttgtaactgccgtatttcttggggtgcccagtgctgccagtgacgcggatgagacgggtgacgccatacttggttgcaccaccatacacatgcaactgcttgcccttaataggcttgcaggcaactggcttggtgcccttcttgacccacttcttgcaccagcgcggggtggagctcagagtgaggatgatgctgtcgatggcaatgatgcggtcactgtcatgctgctgctagcagaacacaatgcgtctcttcttagttgcgctggtcaagatgggctgctgctgcactggcgccaagtccaacgcattcttggctgctctgagcacgcttttagtgcagatgctgctagctatggtgccttgctgcttgagtgctgctgatgcttttgctgctgactgatgctccagtactgttgttgctactgcttccacctggactgcattgagcgccttagggcggcctgaacgtggtaaagcagacacggatcctcgctcgttgtacttgtttagctgtgcctgcacgtatcgagtgggataaccgagagctcgtgctgctgctgccacgttccacttcttggctttgagggcagcaagagtagtctggcgtttgatgtcaagttcagcagcagtgcgtctcttagtcattttgtcaatgtgcaacttctgagctagcttgctgctgtgtcaagcgacccagaagaacaacagcagcagcagccgaacaggcaatgtcacaaataaactaacctttgtcacgcatttgcgccaaatagcgaggtttaacataaagaatacatcataacaagcacgttaacgtagccggtgcgagctgtagtcaccgcttcacgatgtactggcctcacattgtcccctggtgacaggtgctgcagtgtaggcagccaggctgaaacctgcattggagtcacccagagggcattgcctgtaaaatcaaaatgctgtatacctgagcacgtgacttgcaattataagactttctcgtcgattttcagcgattttagcagcacagagcttacatccaagccatgtactgctgcagtgaagttgacatactgaactggctgctttggcctaatcaggcctgctgctgctgccacactgcaggcaggcaagaactgagcactggctagcaaaacccacacactaggtgccaacatactcgaagactggaggcagattctttcagcaagggggtgaaaatagaatggaactgttgagatacagctggtttagcacctagttcagtccagctcaatgatgcagcatgatggttactgctcaacaagcagtcacctgttactctgtatgcactatctgtatgtgcatcaaccagagtactccacactgttctggatatgtgtggaggtgtgtagagtgtactagaatgcacactactagacagcactagtaagtgctggaccgatcaggattgttctggaaccttctgcaggtttccagtactgtactgcttagggtatttaatggaccacttctggtggacattggtaacagagtttgatcaaagctatcattcacaagcactcagtgcactacattctaataggttatgagcccatttacacgcaccactgtgctgtgaggaactctcgttcaggatttgccctgtacagtgctaactgcggaccatagcaggcgcagcaagtcagaggcaggaatctaagataaacttagacattgaaagttcttgtcctgtttggcagacaggcctacagagacttcggcgcacatcacagcaggaacttcattacaagttcggagatacgatggcgcctacagaacagtgcaaatttggttttgccaagctcggagatgataattactccacgtggaaagcccaaatgcggggcttgctggcaaccaaggactgtgactcggctctcacaaacgcagaggacgttcacagcaacaaagcaaaaggcctaatgattatgtgcgtagaggaacagcatcttcagaccatcgaaagtgctgctaacgcaatggaggcctggacagcactggaaaacctttatcagcagacaagtacagcaaatttactgcagctgaagcgacagctcaacactctggagaaaagaacctctgagaccatcacacagtatattgccagggcacgcaatattgccaatcagatacgtgcagctactggtcaggatgtgagtgcagcagacatggctttggcagtgctgggcggcctgccatcagagtacagcatggtcaagactgtcatcgataatatggcagatgtaccaactacagcagttattcaagcgaagctgctgttggtggagaagcagctgccagctttggatggtgacacagcatactacaccagggttgaccaagcaaggcgtccaaacaggcaaactgggcaaggcaggcagcagggtggaggtattaccaacaagacctgctaaaactgtcacaagaaaggacacttcaagcgggattgccgcaagcgcatggcagatgaaagggatggccggcgcagtggctgcaggcaagatgccccacccggtgacattgacctcatggctgtcagcaacagcagcaccaggttcaatacaactgactgggtactggactcaggagcaacacgacacctcacaggcaacaaggacctcctgatcaacgcgcaaggcccattgctgaagaacttacaatcacctttggcaacaacagtacaggcacagcaacagcagttggagatgtagtgctgctggacacatgctcagcagacaggaagctggttttgcgcaatgtactgtatgtacctgcagcaaagacagcaaacatgttgtccatcagcactgcacgcaaggcaggagctcgctttgtcattgacagtgatggatgcaagctgtattatggccaggagttgctggtgacagcgcaggagagggatggcctttacatcatcagcagcaagaacgccaaggcacagcatgagtcagcaatgcttgcacacaccaaggagacggcccaggaatggcaccagcgctacgcacatcttggatacagcaatatggccagactggtgaaggagaacatggtgaaaggcatcaacgtttctgctgaggagttcttggcagcaaacaaggaggcatgtgagacatgcgccaagtccaagcaggcccgccagcctttcaacagcagtgacacagagattgatgagccactggcgctggttcactcagacctgtgtgggcccatgaagcaacagtcattgggtggcaaactatatctggcgaccttcttggatgactactcaggcttgtcagtgatcaagctgctgaagcacaagtcaaagatggcagcagctatgaaggaggtcttcacaatgctggcgaaccaatctggcagcagggtcaaggcgctgcggactgacaacggcacagagtatgtcaatgctgctgtaagcgcctaccttaaaaccaaaggcatcatacatcagacaactatgacctacacgccacagcagaatggcaaggcagagcggttgaaccgcacgctcatggagaaggtcagagcaatgctgtctgagggaaagctgagcaacagcttgtggggcgaagcagcacacacagccaacaccatacgcaacagggcaccagttgctgggaaggacaagacaccgtgggagctgttctttggcatcaagccagatgtgtctttcttgcgtccatttggtaccaaggcgtttgtgctcattccaaaggagaagcgcagcagcaagctgtcgagcgtcagcacaactggcacacttgtgggttatgcaccaggactgaatggctacagggttctggtaaacaaaaacaaggtggtgagcagcagggatgtggtctttagtccacctgcacaggctggaagcagtacaccactgcaagcaactacagcaagtgatgacactggtgaagaaggcagtccacctccccttgaccaggccagcgatgataaggaagatgatggtgatgatggtggcaacagtgacaacgatggtggtgatgatgatgagccacctgcaccagtcctgcggcgcagcacaaggacaacagctggcaagccaccaggccgttatgctggcagtacagcaccaacaccacagaatgcagcacttgcaggaggcagcagcggcaccaacattgttgctatgatggctgcaatcaaggaacccttgacgtacgaggaggcactggcatcagagcatgcagaacaatggcagcaggctatggatgacgagattgcgtcactggcagccaaccagacatggtcacttgaagagactccaccatgtgtcaatcccatcccagtgaagtgggtcttcaaaatcaagcgtgacaacacattgacatcaagacagccttcctctatggcgagctgcaggagaacgtctacatacaacaacccaagggttatgcagagggcagctcaaacatggcctgtcacctacgcaaggcaatatacggtctaaagcaagctccaagggtctggcatgagagacttcaccgtgagctagagctgtatggcttcaaggcgtcaacagcagatcccagcctttacgtctgccatgacaaggagtcaacccacctacctgctcatctacgttgatgacattctgattgccagcaagtcaacagctgcagtcaacaatgtcaagaaatgtctaatgagcagctttgaggcaagggaccttaaagacgcacagcattaccttggcatcaagattacaagagaccgtgggagtggtacactgtggctgtcccaagagctgatggcaacagaactggttgctaagtatggcctggaggatggcaagacaaaagcagtaccactgagcccagctataaagctgaccaaggatgaaggtgaaactctggacaaggagaggtacccctacagtcagctggtaggaagcctgatgtacctgtcagtgagcacaaggccggacatcgcatacacagtgggagcactggcgcgctacatgagctgtccaacaactgtacactggatagcagcaaagggagtgctgcgctaattggcaggaaccacaaactatcgtttgaagtttgggggcagcagcatggagctagttggttactgtgatgccgacgatgctggagatctggacaccaggcgctctactactggttatgtgttcatcatgaacggagcagcaatctcttggcagagcaagcggcagccaactgtggcagcatctacaacagaagcagagtacatggctgcagcagcagcagtgaaggagggcttatggctaaggaagctcttggctgactttggtatcagcattaccacagttagcatactggcagacaaccagtcagcgatcaaattgctgcgcaacccgatttcatctctacgcagcaagcacattgatgttgtgcatcactttgcacgtgagagggtgatgcggcgagaagtggcgtttgtgtataccgccacagacaagatgattgctgatgttatgacgaaggccctgcccagggttcagcatatgtactgctgcagtggcatgggcgttgtttaggcacattgtactgcatattatctggactgcgtgggagtgttgagatacagctggtttagcacctagttcagtccagctcaatgatgcagcatgatggttactgctcaacaagcagtcacctgttactctgtatgcactatatgtatgtgcatcaaccagagtactccacactgttctggatatgtgtggaggtgtgtagagtgtactagaatgcacactactagacagcactagtaagtgctggaccgatcaggattgttctggaaccttctgcaggtttctagtactgtactgcttagggtatttaatggaccacttctggtggacattggtaacagagtttgatcaaagctatcattcacaagcactcagtgcactacattctaataggaaccacattgcatcatttcagcaccaacacagtggccatagtgcaagccctcaatttcctgcaaactgcagcagcagcattttgtgactaaacagccaaatgaatggcaggcacctctctgaggcagacaggtcaggccacatgttgcattgatgccacaattgcagctgcaccttgtcacattcagaaatcagccatctccaatgtttggttcaaagagatgtagatggggcatgactcaaacagcgacagtcgaatgcagcctgaggggggccatactcctaccacgcgacacaaagcacgacctgctgcagcgcctggagtcactggtcttggctgtctccaagctcatgcggcgcggcagcctgctggcgctacttcactacacgcggctgctgggcgacggccaggacagggctgcagacgctatcacgctgtggacagacaccgggtggcgccaggtcatgacgatcgggctgccaaccttcagcatcaggaaattggaggaccctgagatgcgcgtcacatacgagatgtacaagcacatgttccctgccgatgatgaccctgacctgagccacatgccaacaggtacagccaacacgctgacccatgcagccacccaactgcgcacaacattcacaaacctgtgggtgccgctcgtaccccgcctcaagcgactgtgccgtgcctggcggcggaaacgtaagcaggaacaagtggccaggagcgatgatccgagcatcttggacctggtgcgggcgattgagacaggggcagactatgccatggagaagaagatgcatgcagcggctgtggagtttgtgactgaggtcaggcggcggctggggctgcctgatgcaggtgccaagctgacggagtcctatgccaagcgcaaccagcagcagatgctgctgtttctggcctggctgcagcgtcgcgtggaggcgttgggtggaaagggtgtccggctttgccctgtcttcagcgtgcggcgccagcatgtgcagatcgactgcaccacgctgctgcacatgctgagcggcatgcgcctggtgccagagcacctggtaaagcagagggcgaggcaacggactgggagggcgtgctggatctggtagccggcgtgtttgagccgccctgccctgctaagcagaaggggaagctgcagtggtggggctccttgtcaacagatggcgtcgcagccagctttgtgtacgcagacacaaggccagtctcaaagaagggcaccaaaactgcaacagcagcagcagtcaccagcagcagcagaagcaaagggaccacgggcgctaccaccccagcactgcctcctccccacgacttggctgttgtgggcatcgaccctggcaggtgcacgatcgtgcacgccgcgacccaggtgcagggcacccgcacgctggagtggacgctgccccgcaagcgctaccgcctaaagtccgggctggcacaggcgaggccaaggagcggcgttgggacacggccatgattggtggctcctggaaacagatgaaccagcagggcggagcactgcgcagcagctctcttcagcagctgacccagcacattgcggcgtacaacagcgtggctgaggagtggtggacatccgccatgcagcgcaagcgggccaagctccgcttccgcacttatggcggccgcaagcgctgcttggaccgcttcttctcaggcttggagcgggacgtgtcggcagccgagcccaacaagcgcctggccattgcctatggtgccgccacgttcagcccctccgttactggcaagcccgccacgcccacaactgctgcctatagagcggcactgcgcctgcggagctctggtgcaattgtggaaaagcagaacgagtgccgcacctcaaagcagtgttgtcactgtcatggagatgtggaggcttgctggcagagcgtacggctgcagttgggaccagcaccagacacggacgctgctggtgctggcccctgcccatcacagctcagtgccagaattcaggtggagacctgtcacggacccacggtgccaaaggctggcgcctacctgagggggttgctcttctgcccacagtgcagcaagttcctcgaccgtgacaggtcagcagcgctcaacattcgcttcttgtttacacaaacacagctgctgggttgctctatgcccacacagtttgtggctcgtcgcaagcaaaagaagcagaagaagcgcaaccaggccagctgaaacaagctggtatacagagggccatgtccacttttgatccggccatgttgtagatgtgcgtgtgtgtgtgtgtgagaccacggccagagagaatgcattctctgcagctgccatcctatctgtcatcacagcacatgcacaaaaagcatcctgacactgctgctggcaatgatgatcatggctggccttccatctgactgtctacctgacatgcatacctaggtctctctcactctcctgctcacctgtccgatcatgatccgcatctcctgcggtgcacagggattgctaccactgcagcactgctgccaggctgtgcagggggtgctgctgctgcagtgctgctgctgttgcgttgccgcttgggtgtgcgctcggcgtcggtgccctgcaggcaggtcacaagggggcatggcacggatgttgtttgacaatgtatacatcccatatgatgcaggtcactggcgcagttgcaggtgtctgtaaaggagctagcattcgcacactgctagcagcaaacgctgcaagtgacatgacaatcacacatgagccagttctacagctgccgctactgccccctgcagccaatgttgccttgtcacctacgtcatctaccttgcgcttgtgggcagccttgcgcctgatcttgttggtagccccgcgcatggcatcaccctggacagagcagcagcacaccatgagtacagcaacaggtaagaaagcaccacgtgacctggtggtgtgccagcacagtcagtaaagctgctctgcatatacatcccaagacacaaacacacaggatgcaggtcactggcacggatgcaggtgctccagtacgtgtgctgtttgacaatggtgcagacactactgctttctgtcaaagacctggcattttcacgctgccagagtttgctgaactcagttgcaaaataccatgaccggcacttgccattcctctctacttttgccgctgctctgtcgcacctgcagctggagctcgcgtgctagaccagtatttagcagctccctggccttgtcatcagcaccaacgccagccagccacgcctcgctggccaggtctgcagcagcagcgcagctaccgaacatggcatagcggctgctacacagcaccacgctacaggcttggaagccgggctgttcgcacagcaggttacacagctgctgcgactccactggcaccctttgcagtggtttgtgcgtgcgcttgctgtagaacttcagcgagtcaggcaggggggcattgctgacatccagatgtgcgcgccgctgaaggccggagctatcgcgctcggcggcctcaatgctgcggatggtggtgttgaagaggccctgggtcaagtgacggtctgggccatcctggtacagcgcttgagggcattcgaggacaatgttgctgcctgcaacaagctggttgagtgccgtgcagctgctgcactcccagtcatcgtcagggatgcaggcaatccccaagcatgccatgtgaagtccttggaagcatccctcacatatcagcatggtttcagggctgtcctgactgccgcatgctgtgcagcttgtgttggggtcaataggctcccctacagttccctctcggttttccatagcactgcaatgatagccagcagtagcaaattacaccggttggtggtggagcagctgttgtgcaggctgggttgcagcagtacagcagcagcaggttgtgtggtgagaacactggttgatgggtcgctgctgcagcgaagctgcgccgcttgtaatctatcatgtagctgattgcaaagcatagctgtcacagagttgctaagaagcccaggcactgcagacacgtctgatgccttgatgacaagctggcatgttgcacagttgagtgaatcttgcattccatgagcgtgtggaacattgcgcatgtgtgcgtgccaggaatggcagtgcctggagtctgctgctgctgctgctgctgcaacagtctcgcgctatcagctagggcaggcaagcattgcaccattagggatgagcagatcattgcaagtgcattagaggctagtgcattgcatggctgctggggcaaacgacaaacaaaactgtccgaatggctgaagcagccagccgacgcccgcactcccacaactattgcaactccgaatgttcatccgcatccgaatgaacttgcctcattgccagagcagtatggtaggaggcggaaggccagaatggtgggttgtttcgctgcagcaccggagactggttgttttacagtgtgtgtcgtctactgcgaacgtgcactgatggtggaaacagtcgagaggggcggacaggcaaggaaataggcgagcgcagccaaggatcaagatgctcttggattgtccttggacataatctgtgcacttttcagcaacacccaaacaacttgctggatccctactgaatgtgttcaaaaatagccaaaaccgtagtccgatgctctttagagagctttgcggcgaggcagccaaactagtgcacagcctctttagagagacttttctgggtctccaatctctaagggttgctgttgtgcgccgcacctgcacgccatcgccctgcacagctgtcgcgtctggcggcggcagcagcagctctggccctgccccagccaccagcccgcgcttggccacgtcaagcgcttcgtgcatgaacacaaagccggtgcgcttgatcgagaaacgcacgttgaacttgcggcctggcacgaagcgtggaagcgcttgctgaatgcagcagcacctgcgtgagcattcatggtgcagcagtgtacgcagacacagcaagagacatacagagagttggccagaacatgtgcggggtggagaggggttgcagctcagccattcatgccaaacacaggcaggctctgctgcttgcttcctacactgcaggtggagcctgaggcacactgcttttcctggacactgtgttgtacacaaagatgacactgtcatgacactgttgttccagttgatagtatcagttccagccgtacctgctccttttggacctgccacacaaagccctggtactcctggctgctgctgccctgctccgacacatacagcgcatcgccacgcatgactgacagccgggcctctgcaagaccaggcaccagcaggcctagtagcttgccattgcctcctggtgtcagtgttgcgccttcgatgtcgtaggctcgcacatctgtctcctgctgcagctcttcaaggtgcagcagcaggtgcagctgcacccatacgcacaagaaaaagcaaggcgcaaggcaccaacagcagcaatatcttcactcactaacagcagcattggcagcgatttgtagtgttggttgtaacaaaatgagcagcatctgatgcagcagcacgtacacctgcagacaggcaagccgctgatgaaacagacactactgagagcattacccatgcatccacaacagccaagccacaccatgagcctaaggtaacctcactgaggcggcgcgtgacaacttagcaacacagcatttggccatgcgctcgtgaaagtgtctgtgcatttgcggctcagctcgcaccttgttgaggtggcttgtcacgtcgctcttgccctggtactgctgcagctgcagctccagctgctctgcattgccgtcagccaccagctgccgcagcctgcagcagcagaagaggcaagatcagcaaaacacgcaccagcagtagcaggaagaacagggctgcagctgactgcaccctatgggagttcttttcattgtagactgcagatctgcacacgctgtagtcccgccagacatgcatcatcacagtgcaagcgccgatccatgtcacccaactgcaggacgccagcaccagcagcaggctgctaagcacgtcaacagcgctccagcactagcaaggcggtcgtcgccacagcagcagcagcaccagcagcatgctgctaagcacgcttgggcacctgctccagcaaggcgctgctcatcaagagggcaccttgtggttcctagcaagacggtcgtcgcgacagcgcccgcagcacgtcacaaacacgactgggcactagcaacagcaagctgctcacctggagggcaccttgtggtcccttggtgacttctgccaagcgaccttgctgcgcgtctccttctcgcctggctcaattgctgctgctgggccccgcggcagccgccggtgcttcttggtgtatggcgcgctcgctgagatgtctggaatgctggtgtccccaaagaatgggtcgcactcaatgcgcagctcacgcgctatgacaaagcctgcagaacaagttgcaattcagaccagtgaacagtgtgtggccagcagatgtccatcactagatgtctacaagcgtggagcagatgactactgcagccctcccgtccacaaccatctcagagagatattggaaggcacgcaaccgatcgtctgatgttggttgtgccacaagcagcctgctgcacatatacttagtgcggctgctggtagtaacagtctcacacctctcacctgggaactcaaagatcagcagtgaccgccgtgctgcggcaccacctccacctgcaggttcagcgtctgcccggcatgtaggtgccaaccttccaacggcaagtccggcagcaccgccgcctcccgcagcggccgcagctgtgcagagcggcaaatgcacgtacgcagcagcacacaacgtggatctgtttaagctaagaaatgtttgttgttgaggccagacacacatttcatcttgcctagatctgccagctctgagaattgaagccgtggcagctgcatgcacaagtcagtggatgcctacgcctgaacgatgagcgctaaggcagatgagagggggcattctccctacagctgctggtcgcacctggtacaccctgctgagcagctgcatgctgctgccaatgttctccacactcatcggcagcttgatgggctgccctgcctgcaaaacagcggcagcaacagcaacgacaatcagccagcgcccctacaacactcaggtgtcccgtacgcggttgtgtcaacagcattgtccacgtgcatctgcgcaaggggtgcatacaatagtggcgtgcaccgccagccaattataccgcaggaagaaagctggtcactattatgtgatacagcaccttcacaatgtataatacacgcacctgggtcgccagcccttctggcagctctgacacacggactccctccttgttggcgtgcaggctgcctgatgaccgcagctgctgagcaagcagcgtcacgcggtgcctgctgccgcgcatgtggctttccagcgcattgacgtttgggaagctcaagttgcaggtagagcagtagaagtagccgccagcattgttggcggacgtggcagggagctgtgagccctgctgacaaatgcaaccattgtgttgggcacatgtttcgaatactgcgtacacaagaaggcacaggtcctgcagctagggctgctcagtgcttcaggttgagggtcatacataaacatatgtggtaaggtatgaagctgatgcactctagtttggattcagcacgtgacaaatttgcaacgctttaaagcactcacggagcagtacgcaaagcacaccaccatcaccagccttcttttgttgtccttgtacattgcatattctgcaggccggcttctgaccactgctttgattgttgcaaagctgcacttcagtgatgctctgattgtgtgaagtggaatgccatttggaaggcttgcacccagtagctcaaacagctgcagcagcttagctgcaagctcctcatctgaagaggctggcatgtctgatcacggctgttgaacgcctaggagaacgcagattctatgagtgtgggagctaatagcaccggacagcttcaagcacaccaatttcgagctcgagagtctagccagactctataggccgagcatcgtagctgtacaggcgtcttactgcattgtgctgggtgctatgttgatactggtgaatacattatatttgttcttggtgtatgccagtgacttgaaaatggtaaacagccaaccaccgtgcttatccgtgccagcagccgtgcccagaaggtgtaccgtcgaacccgcgctgtaactagcaccggccaaagggatgatacagtgcgatcatacaaaatccattctgttttatcgacaaacaccggattagagcaactcagcatgcctgcaccgtgccgatgtgtcgaaaatcgagttcctttgcaccggcaactgcagctcatgagctgatcatgcatgttcacgcagacatcatggccagggaggctatgctttcattcagcaaacaatacgcatatgagcgtggcgagcgcattctgcagctggtatggtaccaggcaccggtgccgcagagtctgaatgcatgggccaaacagcctgtgactggctagcctggtactctgtggcatggcgtgctgttccgtcacaagcgactatacacttgtacagaaatgccagcacacttgctacttcaactcataaacaagccagactggcaatagaaaagcagcagcactctagcaggaaagcaagcaggtcacccaatcccccaccggcccccaccgggacaaaatgcatgaggatcatcatcatcatactacccactcaagccatagcatcaccgccatcggccccacgcggtcacccaacccctgcatgcatggctgcacacgcaagccttgcagcagctgcggcactgcaggctgcagcgtaattttgtagcatgtgcatcatgcaatgcatggcctattccacaaagaacacagcagtgtggctggcgccgctgcagtggatgcacgccaagccatgcatgcgtcagcagttgacatttcgaaccattgccccccggctacgcatcctgaacgcatgcatcatgccaatcagcttggcgtgcatccactggagctgcatcatgatcatcatagtagatcgcatacactgtctgtggcaggtgggtgcagtcacaaagtgcctgggcagcaggtcaggcttggaacctaccatccaactgtcgtgtgacacaggtcatgaaacattactgtgcaaacagcagcgctaagcagcagtgctacaggtcaacctgtaacacaacacaaacgctcctgcataccacaccaacaggcatggtgcatcgtgcacagcagctgtgatagctgttcatcgactgcagcatgctgtcccaaccaactgaccgtcagggagtgtacagggagtggctccgccgaagcacccatctggcgcacatgcaagccgcacatagcgttgatccatgctgatcacatgcaatcctgcatccttgtcgtaagttatgcttagcacagcccgtacgctgctcagcagtaagcatgctcaaaacttgtgttggcatatgcagagcgtgcacaagttgctgctctcagggcaaccagcggcaccactgcaaagcaacatgctgcaaagcatgacacaccacacaacctgaccaacgcatgacgttgcaaagcagctgcagcaagctctaagccaagcctgctgtcactatgcttgtgtatgccacacactatcaacaaccagacaactagaacaccaccgacatggctagctacgatgctgctgcttacagcagcagcactgctgccagcagcaggggtgcaccaagcaatgaactcacagccaagctcattgcagagcttgttgcgttctttgcactggtgccgttcccgctgactgtctcattccctgctgcagtagcgttcccatctgtgccgttgtcagttgcgttcttgccgaacacctctgacacagttgcgttcttgcttttcttcttcccgctgtctgcagtgaagctatcgaggaactccagagttgactttggcactagcaccgcatcaatcttgtgcaggtagctgctgccagccaccacatctgcgctggtgattgttgcctcatcaccgtctgagttaggcttcaggataatgtgcattgagggatcaacgccgctgatgcgagctgcaatgactgcctgctcacgcatgatgcgctccgtcactttgcgtgcagccctgcaagagcagcagcagcgcatgagcagcaggcggtgagttggcactcataacctacttcacgcatgatgcagctgaagctgaattatctgctgaactgtctgctgatgccacctcaagctgcttttggtgagttgcggctgtcgaaagcccctctcatgcgtcagacctgccaaaaccctttctctactgacagcgcttagtgcaagtagtctactcacttctttgagacgtggatcatcacggtctctccgttgtacattgtcagcgtcatgttgtccctcagctggccggctcgcagcgctttgcctggcagcacgtggtacttgagcaggttggccagctgcttcttgttgccagtgatggcggtggcgttgccggcatagtagttcgacatggtatcgatggtgtaccaggcctgtgtgggtgaaagcagcaaacatgcggcgagtgggtgtgggtaatgtatgagctggaagggacatggtgagagggtaacgctgctgagcattgcactgaggcgcaacagcgaatgcgtacactgcaagtcatgagttctacactgtgcatcgagctgacaatgacatgcaagatacccttgcaatgcgtgcgagaagctgcttacaatccaactgtcatctcagatccaaccgctgctagcggatggttgctggccaagccgcacaactcacatcatctgagggtgcaaacagcgttgcaactgtcttggagttgctcaggtagctgctaagacctgcgtcaccaatggcactgtacagcgttgacatgtcctcaacgctgccaactgcctcctctaggctcttgaaaaacataaccttgtcagcctgctgcaggttgagctgcaagcaggaaacatagacacacgcaccacagcatgatcaatcaatggtatcccagtatgggagtgcggcatttagagttggtgctggcagtacttgtgagtcaccaatggtgacaggaagagaggatccagcagcacgcatgtaacttgaacaacatccaccatgcggcaactgcgcaacacacaactcacagactggcatgcatggtagcgctgctgctgtcacgttgttcgtgctgctgctgctgctgctgccatcaggtttt

SEQ ID NO: 144 - DNA, 20645 bp, Tetradesmus sp.
  source 1..20645: mol_type = other DNA
tgctgtgtgcggatctctggctgaggttcaggctgtggctgcaacagtttatgaatacagttgtaagtggcggttcaagctgaatagcttgaagtctgctgtcatgcatgtctcaccagctagacagcccagccagttggctgattctggcattgtttggaatggtgtgcctgtgcctgttgtatcagagtactgctaccttggcctgtggttcaacaatgcctgcaactggaatacgcactttgagaagatgttggcaaaagtgcatcgtgtgaagggtgggctcatgccagtttggaagggccggctcatcagcgtggaagtaaagcgtatcattctgcttacatgcgttcgcccgattgttgaatatggcagtgaggtctggtttccgtcaactgcaaggcaactgcaacagattgacaaagtgcagactgacatcatcaagtgctcaatgcgttgtggcaaggagcgcccttgcacttcacttgttctggctgaatggggtgtgaagccattgcacatgtggcttcatcagagggcgatggagtattactttagggttcagcgtatgcagaactgtcggttgccacatcaggtgttttcagctgagtggaagcgccctagtggtgctgttgcggtgacaccttggcataagtatgtgcagagtttgctttgcaagtatggtgtggatgttgaggcggcggctgatcgagctaatgcgtgcaagaatcacatcaaccgtcaggtcaggaagctgcatgcagacacaattgtttgtgaatcactgcagcactctactttgagccgttacatcacgcatgtgcacgcatgtgtggtctgggtggtctaccttacaccgaaaatagagagaataatcagtctgctttccgcctccccagtggctgaggcgcggttgccgatgccgaaagttatggcttacaaggattgattattattatcacgcatgtgcaccctacacatgctgatgccatgcgttttaaaagggctaggccctttttgtgttctggtgcgccaacgcgtgggattgagtgatgcgtgttcgaatgggctgtctttgcgtgcatgagcgtacccgtcgttatggcggcagcagagctgattccaacacagcatgtcctgcttgtggtcagggtgttgagtctttgtcacatctgatgtttgattgtcccgctacttctgctcagagggatactatgcttgatgaaattcggtctgttttgcgtgatgttgctggcggcgctgaaaaattgcgcaatgtgttgtcgttgactgatgcatccaccaagttgttgcgttttgtttctgatgatatttggggtagtaggggggtgtgccgagtgatatctaggagcattgctgagtatcttgtccaagcttgggatgtgcgtaataattgcaaacacaatggagcagtgctccctctttcttccgctcctgaggggcgcggggccgatggcgttgatgctatggcttaatgggtaacatgatgatgatgatgatgatgatgatgatgatgatgatgatgatgatgatgatgatgatgatgatgatgatgatgatgatgaattacatctgatgatgccatgcttatgaagatgatttaaggaaatgttgatcaatgctgtactacaggctgcagttgtatctttatcttttttgggtaacgagctcatgatgcatgtgcgtttgggttgctttctagtgataatgatcattgccagtatgccatagccattgggttgttttcagcgcgaggcacctgggatcacagctctttaccagggctgtcagctgagccgccaatctgggtgctgggtctcagcgggatgctggcgcagttccaggccacactaggcacaggcttcagtgccgtttactatcactgcaagggctatatggactttggcatgcctggagatgcagatggagatgagatgaaaagcaccagaagaggcagcagtgcacctacacgctgagggaagggcctacgataggaaacagcagccgaaccctacgagtgttacaatgtatgacgacaccgaacaacagacttggcagctggtatgtactgcgtggttgaatcgctctctgtaagcgttgcctcgttgctagcacatcgacagcagctatccatcaagcattgcctcgttgctagcacatatcgacagcagctgtccatcattagattgcatgcattcacgcctcggcgaagtttttgtagaaaagtgattgggaaacactcagtgctgcgcttgcgcatccgcagcttcagtccaaggagttcaggaggtgcgacgaggcttctaccattgctccttaattccacggagtagcaacacaataacacgttccaacatccattcatggatgttagtgcgccgtgcctcggccatacagcaggagccgagttggcaggggtgtccgccatgcagcaggagctggaaagcattcaagctgagctggcaggccataaggctcggttagaggaggtcagagctggcattcacgatgcgaaagcgtccaacaaccgcgacgagttggaaaagctgcaggcgctggagctggagttgctgggggtcatcagagagttgcaagccaaagagaacaggctgagcagccagtctggtgagtcatgagaatctcagggaggccttgtgtacagcagcaggaaccccagtttggttggtgcaggcagtgttgctggcagctctgcatgtcggtacgcagtaacacagagcatgctaggcgctcttgaagccaatgcacgctgaccgacaaggcgtttccactgttctaaatcagtcggatgactgggaagctgtagcattagacaagctttcaaatgcgccactgaaactagctgcagatgcgctgactcaatcagggtgtccatcaggctgtacacagggtcattatgcgctgcgtgcagcgtgggtgaagaatgtctattgtttgccaccagaaccatagaatttggcaacagctcagcaggtggttggatcttggagatgcgagcaatcctggggttgcacaccttgctcacaacaggcatgcttgccagtggaagaggattgctgctgcatttgaagcagctgtgaaaccaagcagaagcagtcttagccattacaagtgctgcatgcatcaccacatgcaacatgccagccatggttgctcaactttggtgctcactcaagggtgtgcagcagcacgctgcatggcccctggtggacaacccggtgttgctatgttttttcctatggtgctgtagcaagtgctttgctgcatgcatgcaaccccttcaatgcacacgatgcctgcttgtgtccgtgttgatgatgcatgctgcggtgtggaatgcatgccccctccacgctttgcttccccaccccaccccacccttttttgaccgacatcgtgcatcttgtgttgtattccttgtgaaactgcaacaccctcctgcatgctcctgtgtgctgcatgccactgtgctttcatgctgcaagcttctttgtttgaccttttgctgaacctggccctgcccgtgtgtttttgcatgtgctcttcacggctcccacctggctttttctttcaacccacagcagcagcaggtgagtcgtgcgtgtgcttgcaatggtgattgtggcaagcctgccaaaccagcattgcttgctgctgtgtgtggagcagccgtgcaaccccatgcaacagcatggctcattgtcaggagtacaacctgcacctcattatgcagcatgctagctgtcatgcatgtctgctaatcatcagcatcagccgtggaaccccatgcagtagcagccctggtggtcaggcgcacggaattcaccaccacctgcagcatgctcactaccaatatcatgcgtgcctgaccactgtgctgcgtgcttatcatcgctgtctttggcagggctcctctcagcaaaggagtacatcatgcagccgctgcctcgcatgctgcaccgcacctcagaccgcgcatcctcatccatgacacaaccacgccacgcccgcacgtttgacggcatagaggagatgcccggctttgtcaacaaagtgaatgagtttgtgcacaggctgcctgaaggccccaagaagtacaacaaactggtgattgcagaaaggcacatgttgtggttgggatggttggttcctggcttgattggctggctgctagtaaagcaatttgcttgtgaaagttgcatcaataacacacatcaaagcagaggttggtcctggtgatgctggcaacctgcaagcctcaaagtaatgttcttcttgggtgtgcgctgagagcacagccttaccaagtggtgtgtgtatgtgtgtgcacgcacaaaggtgtgcttgcttgcatgcgtgcgcgtgtgtgctcgtgtggtacaagacatcacatgtttgtgcggtatgcccatgcccttgacacttccctcccgcctcccatgtccgcctgcctcgcacccaggtctaccgggcgaccgcgacccaaggcgagccagaggtcatgttacatggtgctgcagacgagagctatgtgcgagcttgtctgattcgtgccgtggagggcgtgagcgaggtggcagctgacctgggcattggtgggtgggtttgcatggccaccagaggcagttgtttgccatgatgctgtgtaccatgctgtccggtcgtgtgccactgctggagcggcggctgctcatgctcgtgttcctgcttatatccttgctgtgagtcaattgttgaagagcgactcacgcatgcaaccaacacttatcccctgacctgctcactctgacctacaggcacagaatatgttgatggtggcagcggtcggtcagcctcattcagtgatatgctggtgcgcaagagtggcacatctgtgtatgcggatgcctcgaggctggtccttggtgtgtttgaagtcaaaggcagctggcagctgaagctggatggcaacatgtccctgcaggctgcactggctgatgagaacctggggccatctgtggccaaggtcatccagcaggtgagcgctggggcccgctggtatgtggcctttcactttccctcagtggtcaacgagggcaggaaggaggtgggagggagggggagaggacgcagggagcgatatgcacagatgttggtgtatggcggcttaccgctaggctgggtgtcgcctttccttgctgctcacatggtatgcgccgcatggtactgcatcacaacacctgctgcaggcttatggagatgcggtcatggatgaggccccactgctgctggtcagcaactggcacaccaccttcctgttcagccgccgccttgatgatgtgcgaaacaagacactgcaggtgtcgcagtgggcctgggacagcacagatgtgccccctttgggtgcattcctgtatgttttgcaccgagcgcaccagctgtggcacaatgacgccaagcagcagctgccaaggaccggtgttcctgtcacgccccgatctggatacgaggtgcagctgggcagcaggcaggtgcagctgggcactcactttggtgggtggcgaccagcaccttcacgcagccagccaccccgcaccagcatcacatggcagccctttcaggcaggtggtgagggtgacgctgctgaggagctccacagtgacaccagcagcttgctgttgccaatctacagcagtagcagcagcagcagccacaacagtagcagcgatgatggtgctggccagtttgatgcagtggcttgggcagaaggtgttgctagctggagttcagctgcagtggcagttgaagctctgccagttctatccagctgcacagactgcagcagcatgtgtttgagcagcagcagcagtcgccgtgtcttcaaggtaaatttacaggcagttcagggggcagggcatggcgccgacggggcggggaacaccaagcatgcatacatcatcatcatcatcatcatgttacattaagccatagcatcaacgccatcggcccaagcatgcatacaagcatatcagggagtggcagcaagcagttgcaacattgggttgtgtgtgcctgacattgcttcaggagcatctgagatgggatgggacgtgcctagctgggccactttgcctgttccagtttgtgtggcccggccatcaaggcttatgctgtctatttcacactgcattgcagggcttggtagatggatcgcctgccgcattcaagacattcaatgtcaaggaccaccacgccatgtcggcgtttgtggcagaggcttcagcctatgtgatgcttcaggcaaagtggggagtatgcatgcccaagctgctggcgctgggtcggctgccacacagcggcgtgcctgtgctggcactgagcttgggcgagcccttgagcacgcagctgctgaagcagcatggcactgctgctaaagcatgcctgaagggtcttcacaaagctgggtttgcacacggtgatgtgcgtgccagcaacttcctactgattgatggcaaagttgttgtgtgcgaccttgagacatgttgtgcagctgatgggcaggcttgtgatcaggacttgtaccggctggattgcttactgaatagcagcagttgagcagctgcaatagtagcaggggtggtagtggcgcgttgtgcttgtaactctctggctggaggcagttttgggatggcaaggcgggttcagcatcagggttcagcactctggcccacactgagtgcctctattgcatccctgtgtgcctctattgcattgcctctattgcatgactgtctgcctccattgcactaaatgtgcatctgttgcacacagctagcccctgatagcatctattgcattgagctagcatctaatgcatgagtttaagcagctttcgcattgagttgaggggctgaaactgccacatcttgtctcaatctgcacatgccctccgtgtcggaatcacgtctatgaaagtctgtgaagtgcaatgagaaatcacctactacaccacaaacagccttacaatataaccgaggggcgtggcacagcgctagtttctctgcatgctctatcctcgtcaccagcacccacatcattccgacggcccgctgtagcgcgatttgcccaccaggcgagcgttgaatctataaagtgaatgcatgccagtatgtttgtggtgacgcatgtgtagcatcgccactggaggtgcagcactacagctcttgggcaagctgccagtggatctcactcaaaccagcaaatgcaacatcagcagagcagcgccaataccttgcaaatgcagtctgtcccttttgacggggacagcctgcttaggctcacatccgccctgcaaggcgcagtgccgtatttcactagcatacaggcgcaaggcagagtggagcggtttgatctacacagcctgccggaagcacagtttgggctctacaacagcaagcagcgcttatacaccagcgcttatacactatcatgaatgcacgaatcgccactggaggtgcagcactgtgctaaagccaggtggcaagtggctaaagccaggtggcaggtggcctagacaaggtcgcctgccagccacctgcctgacctggcatacccacaacttgtccaaaatctctgcttccctccaaatccaacgcacagctgatgggtgctgtctataatcaacaatgcttgattccagtgtaaaccctaaaacacaagagctgcgctgccgccaccatgcacagctcaacctcggacatgcatgctgctcagcacagccctactagtagtcagtgttaccacccccgcgtgcgatgcaaactgccttcctggcggcaatgctgttcatcaggttttggcacatggacagcggcatggaggcccaaatggcctgcgctgcttcccacattgcctccaggctagcatactgctgtgcatacaactgctgcttgagccaagcccatgcattctcaatggggttcaggtctggagagtatggcggccagtctgcaatgatgcgtatgtctttgaggctcatgaatgctgcagtgctcttagccctgtgcggactagcaccatcaagcaagtacacccactcatgcgcatccgctgcactgaaaatcacctcagcatcaggctgcaactcctcccacagcacatcctggaactcctctgcacccacacctgtgtgctgcaccttcaccttcagcttcttgttgtaactgaagtatttcttggggtgcccagtgctgccagtgacgcggatgagacgggtgacgccatacttggttacaccaccatacacatgcaactgcttgcccttaataggcttgcaggcaactggcttggtgcccttcttgacccacttcttgcaccggcgcggggtggagctcagagtgaggatgatgctgttgatggcaatgatgcggtaactgtcatgctgctgctggcagaacgcaacgcgtctcttcttagttgcgctggtcaagatgggctgctgctgcactggcgccaagtccaacgcattcttggctgccctgagcacggttttagtgcagatgctgctagctatggtgccttgctgcttgagtgctgctgatgcttttgctgctgactgatgctccagtactgttgttgctactgcttccacctggactgcattgagcgccttagggcggcctgaacgtggtaaagcagacacggatcctcgctcgttgtacttgtttagctgtgcctgcacgtatcgagtgggataaccgagagctcgtgctgctgctgccacgttccacttcttggctttgagggcagcgagagtagtctggcgtttgatttcaagttcagcagcagtgcgtctcttagccattttgtcaatgtgcaacttctgagctagcttgctgctgtgtcaagcgacccagaagaacaacagcagcagcagctgaacaggcagtgtcacaaataaactaacctttgtcacgcatttgcgccaaatagcgaggtttaacataaagaatacatcataacaagcacgttaacgtagccggtgcgagctgtagtcaccgcttcacgatgtgctggcctcacattgtcccctggtgacaggtgctgcaggcagccaggctgaaacctgcattggagtcacccagagggcattgcctcatcatcatcatcatcatcatcatgttacccattaagccatagcatcaacgccatcggcccagcgggcattgcctgtaaaatcaaaatgctgtatacctgagcacgtgacttgcaattataagactttctcgtcgattgtcagcgattttagcagcacagagcttacatccaagccatgtactgctgcagtgaagttgacatactgaactggctgctttggcctaatcaggcctgctgctgctgccacactgcaggcaggcaagaactgagcactggctggcaaaacccacacactaggtgccaacatactcgaagactggaggcagattctttcagcaagggggtgaaagtagaatggaaccacattgcatcatttcagcaccaacacagtggccatagtgcaagccctcaatttcctgcaaactgcagcagcagcattttgtgactaaacagccaaatgaatggcaggcacctctctgaggcagacaggtcaggccacatgttgcattgatgccacaattgcagctgcaccttgtcacattcagaaatcagccatctccaatgtttggttcaaagagatgtagatggggcatgactcaaacagcgacagtcgaatgcagcctgaggggggccatactcctaccaggcgacacaaagcacgacgtgctgcagcgcctggagtcactggtcttggctgtctccaagctgatgcggcgcggcagcctgctaggggcagactatgccatggagaagtgtacaagaagaagatgcatgcagcggctgtggagtttgtgactgaggtcaggcggcggctggggctgcctgatgcaggtgccaagctgacggagtcctatgccaagcgcaaccagcagcagatgctgctgtttctggcctggctgcagcgtcgcgtggaggcgttgggtggaaagggtgtccggctttgccctgtcttcagcgtgcggcgccagcatgtgcagatcgactgcaccacgctgctgcacatgctgagcggcatgcgcctggtgccagagcacctggtaaagcagagggcgaggcaacggactgggagggcgtgctggatctggtagccggcgtgtttgagccgccctgccctgctaagcagaaggggaagctgcagtggtggggctccttgtcaacagatggcgtcgcagccagctttgtgtacgcagacacaaggccagtctcaaagaagggcaccaaaactgcaacagcagcagcagtcaccagcagcagcagaagcaaagggaccacgggcgctaccaccccagcactgcctcctccccacgacttggctgttgtgggcatcgaccctggcaggtgcacgatcgtgcacgccgcgacccaggtgcagggcacccgcacgctggagtggacgctgccccgcaagcgctaccgcctaaagtccgggctggcacaggcgaggccaaggagcggcgttgggacacggccatgattggtggcgcctggaaacagatgaaccagcagggcggagcactgcgcagcagctctcttcagcagctgacccagcacattgcggcgtacaacagcgtggctgaggagtggtgggcatccgccatgcagcgcaagcgggccaagctccgcttccgcacctatggcggccgcaagcgctgcttggaccgcttcttctcaggcttggagcgggacgtgtcggcagccgagcccaacaagcgcctggccattgcctatggtgccgccacgttcagcccctccggtactggcaagcccgccacgcccacaactgctgcctatagagcggcactgcgcctgcggagctctggtgcaattgtggagaagcagaacgagtgccgcacctcaaagcagtgttgtcactgtcatggagatgtggaggcttgctggcagagcgtacggctgcagttgggaccagcaccagacacggacgctgctggtgctggcccctgcccatcacagctcagtgccagaattcaggtggagaccagtcacggacccacggtgccaaaggctggcgcctacctgagggggttgctcttctgcccacagtgcagcaagttcctcaaccgtgacaggtcagcagcgctcaacattcgcttcttgtttacacaaacacagctgctgggttgctctatgcccacacagtttgtggctcgtcgcaagcaaaagaagcagaagaagcgcaaccaggccagctgaaacaagctggtatacagagggccatgtccacttttgatccggccatgctgtagatgtgtgtgtgtgtgagaccacggccagagagaatgcattctctgcagctgccatcctatctgtcatcacagcacatgcacaaaaagcatcctgacaccgctgctggcaatgatgatcatggctggccttccatctgactgtctacctgacatgcatacctaggtctctctcgctctcgtgctcacctgtccgatcatgatccgcatctcctgcggtgggtatgctgctgctgcagcactgctgccaggctgcacaaggattgctgctgctgcagtgctgctgccaggctgcacagggattgctgctgctgcagcgctgctgccaggctgtgaagggattgctactactgcagcactgctgccaggctgtgcagggggtgctgctgctgcagtgctgctgctgttgcgttgccgcttgggtgtgcgctcggcgtcggtgccctgcaggcaggtcacaagggggcatggcacggatgttgtttgacaatgtatacatcccatatgatgcatgtcactggcgcagttgcaggtgtctgtaaaggagctagcattcgcacactgctagcagcaaacgctgcaagtgacatgaaaatcacacatgagccagttctacagctgccgctactgccccctgcagcccatgttgccttgtcacctacgtcatctaccttgcgcttgtgggcagccttgcgcctgatcttgttggtagccccgcgcatggcatcaccctggacagagcagcagcacaccatgagtacagcaacaggtaagaaagcaccacgtgacctggtggtgtgccagcacagtcagtaaagctgctctgcatatacatcccaagacacaaacacacaggatgcaggtcactggcacggatgcaggtgctccagtacgtgtgctgtttgacaatggtgcagacactactgctttctgtcaaagacctggcatttgcacgctgccagagtttgctgaactcagttgcaaaataccatgaccggcaattgccattcctctctacttctgccgctgctctgtcgcacctgcagctggagctcgcgtgctagaccagtatttagcagctccctggccttgtcatcagcaccaacgccagccagccacgcctcgctggccaggtctgcagcagcagcgcagctaccgaacatggcatagcggctgctacacagcaccacgctacaggcttggaagccgggttgttcgcacagcaggttacacagctgctgcgactccactggcaccctttgcagtggtttgtgcgtgcgcttgctgtagaacttcagcgagtcaggcatgggggcattgctgacatccagatgtgcgcgccgctgaaggccggagctatcgcgctcggcggcctcaatgctgcggatggtggtgttgaagaggccctgggtcaagtgacggtctgggccatcctggtacagcgcttgagggcattcgaggacaatgttgctgcctgcaacaagctggttgagtgccgtgcagctgctgcactcccagtcatcgtcagggatgcaggcaatccccaagcatgccatgtgaagtccttggaagcatccctcacatatcagcatggtttcagggctgtcctgactgccgcatgctgtgcagcttgtgttggggtcaataggctcccctacagttccctctcggttttccatagcactgcaatgatagccagcagtagcaaattacaccggttggtggtggagcagctgttgtgcaggctgggttgcagcagtacagcagcagcaggtggtgtggtgagaacactcgttgatgggtcgctgctgcagcgaagctgcgccgcttgtaatctatcatgtagctgattgcaaagcatagctgtcacagagttgctaagcagcccaggcactgcagacacgtctgatgccttgatgacaagctggcatgttgcacagttgagtgaatcttgcattccatgagcgtgtggaacattgcgcatgtgtgcgtgccaggaatggcagtgcctggagtctgctgctgctgctgctgctgcaacagtctcacgctatcagctagggcaggcaagcattgcaccattagggatgagcagatcattgcaagtgcattagatgctagtgcattgcatggctgctggggcaaacgacaaacaaaactgtccgaatggctgaagcagccagccgacgcccgcactcccacaactattgcaactccgaatgtttatccgcatccgaatgaacttgcctcgttgccagagcaatatggcaggaggcggaaggccagaatggtgggttgtttcgctgcagcaccggagactggttgttttaccgtgtgtgtcgtctactgcgaacgtgcactgatggtggaaacagtcgagaggggcggacaggcgaggaaatagtcgagcgcagccaaggatcaagatgctcttggattgtccttggacataatctgtgcacttttcagcaacacccaaacaacttgctggatccctactgaatgtgttcaaaaatagccaaaaccgtagtccgatgctctttagagagctttgcggcgaggcagccaaactagtgcacagcctctttaaagagagacttttctgggtctccaatctctaagggttgacagcaggggctgaatggctgttctgatagtagcagcgacagcggcagcagcatgttatttttatgtccgctttattaaggtttaaaggacagattactatgggcagcagcagcagcagccatttttgcagcaatgaatgagtgcagcagtatcggtagttaatagcattagaactgtcagctagctaatgatagctaatgctagataacgctagataatgctagataatattatgcttttgagtgctgctctttggctgttcaattgcaattagtgacaggtgccacaccatgcaactggttggtgtggagtacagcagtacctgctgggaacgcgcatgtgcgtgtatcgtactgcaaaagtacgtgtcagtgcaagcagcagtggggattgtgggctcagcagaggtgtcaccagcacaggcaggctgacatcctgttacataccacgcagcattgacagcatacttgagcgacgatggagcaacgttgcagtagttgttatgggcctgatgatggctaccaagccgaaaccggtagtcctgtaatcaactcattgcgttcgtttgctccctggccagtgtggttgttgcaagcttcaaaccttatccgacaatcactgcacttgctggggttcaaccccaaccgcacacccaccacgtgtggaacactggacaccacatccgtgcagatctggccagcataccccagcaaactgccgttgaacacagcaactctgtgcatgtgcggcagcacacacgcaacggctcccagccaaaggcaccacatgcagcagcccacaccagccacgccagcactggacatgcaccaaacacgtcagtgtatgtgagcttgccatccatgataatacgatcactcattgtcccatcacggttttggtcaggccgagggttacggttgaacttggtgcgcagcccaaacacctgcactgacacaatcttgccgtcctcccaagccagatcacataaaccaaacggcaagatggggtggtttttccacctgctgtcataagcatctacacgatcccgcgtaaggcacataggcctccaacccaagtagttcagcatactgagcgtcatgcgtgcaaaggcaggccatgcagcattcttcaactggcaatgcccataagccgcccattgcagcaacagctgcaggcctgcatccaccaacacatcatcccacgcgcttttggtgttgcgcacagtgcggcactcaggaaagaagtcgcagtgcacatccaacacacgctggatgatatcacgctgagaggcatgcagtcgcagcaccatgccgacacctccaccaacagtgccaactgccatgaaaatcagcacatgcgacagcatcctcatgtaagactccaacgtgctatcagacacagcagtgcggcggccactgtacgtgtaaaagtgccatgcaatgtccgcccatactgctgcagtcagtgcaggatgcgtccaacgctggtcaaacatgcagtgcagcagcaggaagtcaaagaacatcctgatgacctgcaggtacttcatccagctcttcacattcgctccaggacgctcataccggtggcggtcaccgcgattgcggccgctatggcaggcagcaacaccgcgagcgatcaaatgagcctcccgctccgcaacagcaaagcgctccctgcaggagccacacgcagcaacagcagcagcagcagcaacagcagcagcagcagcagtcagcagcagacaaccaagcatctcaggcatgcacaaaaacttccatgccagacaacaaggcagggctgcacagccaaaacagcgcctgagcgcgcgctgtgtatctggtgagcaacaagctagccgcaccactgcatggtgtgcaacgcagggcacacatgtaaatgtacctcacagcatctcgcacctgcctatgcgtcgaccgtacttgggcaggtgcatgcttcctaactttgcaatgccctaaaggtctattggcaacagagcagcagcagcagcagcagcagcagcagcacacacgcacaaccttggcacaacaatctactgctacaagcaatgtgctacagtgcctcgcagcttgcattcccctcactgtgtgaactcatcaagtcacgcacatctgcagagcagcacccaggagtagcacgcaccaagcagagctggcagcgagctgtagcaaacgcgcaccactattgcagctggcaagtccctctgctaaactccagcaggcaccggcagccagcatgcatggacgccctgcacagcacaaatcagtgacacctcagagtcagacatctgcgcatgctgccttgtacatgcccaccagtggagttgctggcacaaagcacacgctggtaacagcacccacttgcacaccccactgcaggcactgctgcagcagcatgcattactagttcagccccgttgcaaacattgtgtacgggttcaagcacactgctgctgctgctcttgctgctgctgctcctgctgctgctggtgtacgtgctgtatgggctccatgggccaagcctgctgatctcaacacgacagatgaaacgatacagttcctctgtgttctgcatttgcacgcagtgctgctgctgctactgctgctgctgccggtgcgttacccgctgctgtggcaaccgcggatgctcgctgatgcatcagcagaaactaccgcttccgctgtacctcacagcccctcgcacctgcctatgcgtcgaccgtacttgggcaggcgcatgcttcctaactttgcaatgccctaaaggtctattggctgttgctcgcctgcgccaccaccagctgtcttttttgctgcatgcatgccacgtggcttgcaagtgctgctcagctggatgccctgaagcacgtgcttgatactcgctgctgctgctggcgctgctgcagccgctggctttgatgccttgctgctgcgtgctgccttgtgccgtggccgctttctgccagcaccaacaatcggcagctccttctgctgctgctcatcttcctcctcctcctccccctcctgtgctgctgccgctgctgctgccgcctgctccccctgcccatctaccaagccctctgcgtcttctgcctgctgctcttcaagcacctgctgcatcgctgccttgcccctgcgccgcttgcgtggagcagccgctgctgccgccgcctgcccatccaccaagccctctgcgtcttctgcctgctgctcttcaaatacctgctgcatcgctgcctggcccctgcgccgcttgttgttgggtggcgcagccgctgctgccgcagcagcagatgctgcgcagccagcagttacgcctgcagcagcggcagcagcagagacgcccagcactgcaacgtcctctgtgtgaccactcagcacgtgctccagtgtggtctgctttgcatactgctgttctagcatggcctgcagcgccgcagcctgctgtggatccgtgtgtgctatgaactcaaagcctgtccatttcagacaattgctgcttactgcctgaaggagggtagctgggtctgcatatggaaacattgtgcagaggcaggcgtgccagtcgctggcagctgctacgctgtactctccagtcaccccattcagctgcgcataccatttccactgcagagagtaatccgggttcatcactgcaagcagcagcaggttgcagggatttggttagggcaatgcagcaactgcttatgatgtacaaagttgcatatggtgccttccattcacctgaaggatccataggtgtagctgctgcaactgatgacagctgcagctagtgctgcatcaggtcgccagaatagcccgatcctacgcaggtgcaccgaccattggttagcaatttaaatacaagggggcacaggtgctatagagcgacgagaagcgagatattgcggactttgtgcatgttctgagaatagctaacagccgcggtgctgtcggtcagtttccgttaacggatggggatttgataccagccaaatttgacacacatgcatccacactggcctccgtcagccatttttgcctgacattgaggggcttaaggctgcccttatgatcaaaagccatcagtctactgacagtgacagtcttatggctgtggtgataagctatgcattaaactgtccgatagcgttaagcgttatgccttatcccttcttcttttctactcccggagaacgcgtttaagcacttgcgttgggtcccagcttgccacacttcaagtagcactcagtgctgcttgactgttttgatgcatgcggggtgctctgctttgtggctgttttgatgctctgctttgtgactgttttgatgctctgcttagtgactgttttgatgcatgcggggtgctctgcttttgcagttgtaatgcttatagatccttgatcaacagtgcgccatcaatggttgtgtttatcgttgtttaatactggtttgggttgcattctgccgtctcatcgtacataacatggtgcaccttgtataatcaaagtaactcgttgcccggtaacccggcccggattacccggtaatggcatctcgctgtggcactcgtactataggtgaaatgcttggtaacataattatttttgttctcctatgaggatactctcttcagtcggcactggcatggtaggctccagtgcatcgcacaccccagtaactgcccgattactgctgcgatcaggcaaccctgttaaagctgtcacgtgagcatgattcacagatcaagctcaagcgtgcgaacaaacactccagtcagcacgaggcggtaagagcgtaagaaagacccgacaaatcacaaaccacactacgccaattcagcacagtcagagccaagagcaagtgacagacagtaaacatcatgtttgaggcaaaggtcaaaagaggaaaacctgcagctagtctccggccccagcctcaacgtgtagcctgtacagcaacttgttcatgtgctgaccaggaccgtggctgctggtggtgtttggctgtcctgcaggaaccctgctgatgtgagagggcgcatgatgacgttcacatatgtcagcgccatcagtggcatctgcgcatggagcttcctggcggtgcagagagcatcttccagcgcatgtcggtgagtattataactgccttgcagtctttggtttttgctcatgcctggaggtgcctgtgccgaaagatgtgtggcagcttctggttaggctgtctccatggcgctgggtgtgcactttttatcactattctgctgacgtcaacagcatgcacctattagcccataaccagctcttcgcattgatcctccttgcatattttgccccctcctcgcgcccatttcttcatgcttgcaggtcagctacgcagtgttgaccttctacttcctgatgccgtttgttttcatgagcatcttcacgagtgacaagcgcttctttgcagcagacacagcagcgcgcctgtaccaccccgcgcagtactacctttccaaggtcactgtcacactgccgttcaacatcatcgtggccatcgtgttccacctggtgtgttacggcatggcagggatgcggcactctgcagttgcaatggcagcgagcggcctgatctgcgtgcttactggcctgatcggcatgcaggtgggtagctttgtctgttcctgcaggcccattgtgtgtccaatcgacattgtgccggtgtttagcttctgtgcttgcttctgtagctacattcatgtatactaacgcctgcctacttacagctggctgtttgatgctaaagatttcttactgcttctgttttgcctgcaggcggtctactgctgcgctatcatggccagcagccaagacttggcctttgtctacgccattggctggacagccctcaacctgctggtcaacccttacatgtcattgtttgaccagcacagtttgggctggggctggtcatggctgcactttttcagcccctgcagctttgcttggcagggtctggtgtacatcgagttcaacgggcgaggctttgacggcaacttgggagcaggaacggaggcgattggactcatcccatgtgagtacacacgcgtatctgatgtcatcttcacggtggtagatacgcgttatcatctttcacagtgctgttgatgtgctgctagatagctgtagcagcagtgtcgtgcatatggtatgacagcaacatcagcagcttccaaggcaccctgttccagcatctacgcttgcaggaacccagccagcactgtgtttgccgtcctgtaggctctgtggaatgagcctaccagtatgcagcaatctgtaaacacaaccgcactgacccgctgctacgtctgctgctgccttcctctgcgctgttacctgtttgtatctgcagcgctgattcccagtaccagctcattcaacgtgctgcgtaccaacctgaacaacctcggccgcctctcaacgggcggccagtgtgtggccagtggcaacgccattgttgagatgtatacgatgggcctgggctattggccgcttgtcggcatcttgattggctttta

SEQ ID NO: 145 - DNA, 15671 bp, unidentified
  source 1..15671: mol_type = other DNA
  variation 11855: note = n is any nucleotide
  variation 13430: note = n is any nucleotide
  variation 13033: note = n is any nucleotide
  variation 6249: note = n is any nucleotide
  variation 10050: note = n is any nucleotide
  misc_feature 1..15671: note = Fanzor polypeptide
cagagttccccgttggttcttcatcagcatcgtgttcatgttcaggttcctatacagcaacattttttaaaaattgcagctgtttaaagaagatgtattcacttttacgtgatccaccgccagatccagacttaacatttttttggcggccaatttcccttgtgaagcagccgcggatactcttccactttctttgtaatgcaacagctgaaagtaaattttaagttagattttttttttgcaggtatcttgcaacaggttgtacatttatggaactatattacaactacagactcggttatacaacaatatgtacaatagtaagagaagtgtgtgacgctatatgcaaacatcaaggacaatttataatattacccacaacaggaaatgactgggaaagcattgcaagaggatttaaaaaaaacaccaatttcccgcatggcattggtgccattgacggaaaacacatcagaataatccagccagtaaattccggatcactatactacaactataaacattacttttcaattgttttactcgcaatatgtgatgctaattataatttcacgtatatagatattggaatttttaaggaaagctcattttacactaacctcataagcaattctttaagtatccctgaggccaaaccactgatagaaaatggtgagaatattccatatacaattgtaggagatgaagctttcggactacatgaaaacctcatgagaccttacggaggacaaagtcaaagtcaaagtcaaaacgtttatttcaattaggccattaaacggcacttttgaacgtcatcgttaacagttcagtaaaataataatgtaacattaataaagtgactctactgtccattcggaaaagtagattcttatggagaagaacggacaagaaactccatagttactctttttaaataatgattttacaaaatttggtatacaacaattaatttaatactatgtgaggacgatgcacccagagaactaaactaactaaacaaagtatcaccagcagaggtaaacttattaatttcctaaagaaatttaggtaaattgtactcacatatttacaaacattggaaccattaattaaacaagtgtgtgagtcaacggaaaaataaaaacacaaaaaaagaaacagtatatctataaagttaatacattaatcaaccagtttgaccttcacccttgattgtcctatggagcaggaccagcatgtttccaagcattcttatcctgaatgtaatcttctaatttgtaatatgcttgttcacaaagtgtacttttaacatgagatttaaattttctttcatttagttctaatatgtcagaaggtattttgttgtaacatttaacacaataccccatgaaagaagtgtggactttagctaatctaaaaaatggttgatctaatttgtctttcaatctcagttacaagcaaagaatttttaactatcgtttatctagagcacgccgttatatcgagtgcacatttggtatattatccaataagtggaggatattccacaggccactgaatgttaatatagatttagcaaagaagattgttaagacaagttgtattttgcataattttgtacgttctagagatggctattcatatgacgatactttggtagtaacggggttcgaacctgctacagatcagaatcgtaatagaggagggagaacagctttaacagttcgagacaaacttgcagactattttgttaatcataacccactaccatggcaagatagaaatgtataagtttaacaaaatataaacaaaacattgcacttacatagttcctttttttctgcatttgtcatgtcttctttttctttaaaaatgttcaccatttcatcccaacatttaattttcaagttgcggtcagaatactctttcaatccgttgttccataaacacggccgattttcaatttctatgataaatctctcagtatcgaacgacattttgctctcagtacgacgtgcgttcaacgcggcgactggctggcgactgagtgagtgacggagcatacaaacacgtgcaaacaactggcggcgttgccaggtagccagcgtcaccagtcgccgcatgcggagcggtcgactctggctactctggctacttggcaacgccgccagtcggtcgccaagtgaattagccgtcatacatctcagtatgaactacacttgcgagcaaaagtatggaatcacttacttggaattgattccgcgcgatcttgagtacttaataactagttaagaataataaaaatggtaccattttaaaggttaaactgttaactttaaattgataccaaattcatttaaatcccaccggtattcaaggagctatcccagattaagtgaaggagttaggaaaacataaggataatggaaaaattataaaagaagaaaacaacaaaaattaattaataaaaaatttatttggccttaaaattgagtttcaatattttgtgttccctcccctcgccctaataactgctcgaagacggttcttcattgacctaatcagcttctgaatcgattcttgcgggataccctcccactcctcaatcaataccgatttcagctcattcacacttgaaggagcaggatttctggaacgaaccctcctcttcagttcatcccacacgtgctcaatgggattcaagtccgggctgagcgctggccagtccaatgtggcgataccgacttcttcgaggtattcagttgtggcacgggaagtgtgacaacgagcgttatcgtgcataaggaggaagtcagcaccgatatatcccgcataaggaacgacatgttccagcagaatatcggaaatgtagcggtctgaagttagaccacctcctcgtcccccgccaggcacgaaaacaagctccgttttaccgtcgaaagaaatgccggcccacatcatacaagaaccgcccccataagccactgtctcagcgaaacagcactgcgcatatcgctccccaggccgtctgtagacccgaccccttcggtcgctgccgtgtaaacacattctgcactcgtcggagaacaggactcgcctccattgctcaacctcccaatcaagatgggagcgagcaaattgaaggcgtgcttgtcgatgacctgccgtcaatttcgggcctgtggcaggcctttttggagtcaaattagcttgcttcagtcttcgacgaactgtccactcgctggcagctaccccacgaacatttctgagctcctgttggacgtcgacaccagtcaaatgtcgatttcggagagaggttgacacgataaaacggtcatccctctccgatgtgcaccggcgccgtccagatcttggtctcgggataaagccaccagtctcccgaaagcgtttataaactttcgaaacacaggactggcttatgtggagctgacgtgcgacagcccgctggctgagcccttcttgcaatagggcaacgatttgtgctgcttctgtaggtgtagtatccattgtcgtccaagttcaagggtcacaagtagcggagatgtgtaccggtcaacgtgtgaaagccgactgataaagaaaatccgataacacgtgcttttatagggggtctataggccgcaagtcgtgacgtatcaaacaattaaaacatatctttttccttacttcggcacgtaatccgggatagcttcttaaatactagcgtgatttgaatgaatttggtatcaatttaaagttaacagttaaacctttaaaatggtgccatttttattattattaacaaattatttactactcaagatcgcgcggaaccaatttcaagtaagtgattccatacttttgctcgcgagtgtagttggcaacgtcgctggccacgtccccatggcatctcggtgaggtatggcccttacagatcctcctccataagcaacagtttcctcgatgcaacactgagaataactttctccagggcgaatcagtagtatcatcagaatcatcatctaatttgcaacacctcagacaaacaaagttacactcatcatcagagtcgaaattgacctggtgagattttggtacacatttttggtgataacgtccttcacataatgaacagtgttgaggacagcggacaaatccagtaatgaaaaggcacacgatcactactaagatttattatcagtatatccacagattaaaactattacatttactattattatcatttattacaactattattcactagtttcgggttaggataactacagttcaatattatttctatacaaacctagtgcactctttcgtgtctggaagcgaacagaacgttaccatagaaaatgtgggcggaaacaattcgctttaaaaccaacatccggttccagaagtttctagaatgttcgaacagtttcttatagtgctgccccgtagtgtcgagaggcgagtactacgacagtcattcataattattacaatacccattcacaaaatagcgcctccagtgtcgagaagcgggcatcagtcgatatttatgcgtaagccattcattgataccgggcgccctctagtgatgaatattacaaacaaagatgtctcaacctcctgctcccgctacgtgacaacagaggacgctacttgtatatcagtcacatttctcccgccgtgtacatacaataatgtacataatttataccactagtgactggtatacacttcacaatatcaataattgaatgcaattaacaattcaatgacttataaagataacaatttagtacatacatatacatctatagagttaagggtagccactccagaatccttgctctgctatatattagatcaaattgaaataaaaaattctcctcctggtagcagaatcctggagtgacgcccagaaaaagagacacatatataagaacttattctactttaaataagtgtctacaaatacaaaacatacatgataacgacttagtttctactggtatgacgacgagacgtttaacaggacggcgcattacaccactcttggtcttgacatcgacgactcttacgacaccatctgcacctggggacatgcgttcgactctcccctttggccatatgtttcttggtaagtttgggtccactacgataacaaaatcgcccaccttgaccgtgtcgccgcgtccacgcggctcccgccggttttgaagcgtaggcagtacttcgcgtacccatcgttgccaaaataagtccgctagtcgttgcgacgctctccaatgtgaacgacgtagttcatccggccttgtgaaaatccctggcaacgggactttagagggcgcgccgagcagaaagtggttaggcgtcaaagcttcttcgtcgtctgggttaaccgatacatgggtcaagggtcgggaattgaccgtgtgctctacctctgtcagaagtgtgtgaagcacgtcttcatacggatgccgatcgataagtgtagcattcaatgcggtctttaccgtgcgtaccaaccgttcccaggcgccgcccatgaacggcgctcctggtggaatgtagcgccaggcgatgtgacgtatttctgcttcatgttggagagattctagggcggccttacggagctcagcatctgccccgtggaaattggtgccgttatcactccagatgacttcaggacatccacgacgtgccatcatacgcctcaacgcaagtatagcggcatccgttgatagcgaggcggcaacttctaatggacagcacgcgtagttaggcatgtgaacaatgccacaaagcgcttctcgtgatgtctcgctactgtgacggagagtggcccgaagtagtccagtcctgtgtgtttgaatggacgttgatggtgtgccagtcgacagggtggtaagtcgcctgtcagtggctctggcggcacggctcgacgtagtctacagggttggcaaagcctgattactgcacggacggatggccttaaacgtagaatccaatagcgttgtcgtatttcgttcacaatgcattccacgccgctgtggtgtaacattcgatggatccagtgtatgtacaagcggcagtaacggtgatcgccgtctagtactgctggtgactgtgtttctcgtgatatctcagctgctgctgcgatgcgtgagcgtattctcattatcttgtgctcgtcgactgtcagagataatcgcttcaaccggctgtcagctagtaacgtcctcccgtcgntattctcattatcttgtgctcgtcgactgtcagagataatcgcttcaaccggctgtcagctagtaccgtcctcccgtcggtgagaagacgcaattcatttgcgaaactttcttcctgtatagcacgagtccacaggagctcggcccgacgtgtgtactgaatgccaaggggtatgtaaaccgtcggtgttacgctgaggttgcggctctgcactccaggtcgcttccttgtaccctcccgttgcttcaccgtccagttcgggtcgtctacactaacgcctttgttgcgtttgcggttggtagctgttgtggtgtgaactcgaagtcggccgatgaattgaagaacgcgggcggtggcccggatgagtcgtagccaggaagagaaacgtgtgacgtcaggtagtgcctctgttaagttcgaccgttcgtgagcagcagcattgcttacacgctcctcacccgtgtcgacgtaggggtgtgagtctgtttcctgcgaccaggtgttttcgttgtcatagagaaatgaagggccgatgtaccagcggtggcttgcagtgaagtgagtcggtgtatcgcgagtcgagtcgtcggcgacattgtgagcggtggggacccagcgccattctcttcgctcggtgttttcttctaattccgctactcggtgcgcgacgaacggtttgaaagtgcgtgcgccggcgcgcagccacgctagcaccgtgcgcgagtcggaccagaagactcgacggtcggcgcgacgatcgtgctcttcttccacgcagcgtgctagtcgcccgccgagtacagcagcctgtaattcaagtctaggtatagatgtgaccttaaggggcgctacgcgccctttcgctgccgcgagcgacacatttacttgccctatgtcgttcactgaacgccaatatgctgccgcggcataggctcgttcgctcgcgtccacgaatacatgcaattctagtctaatcgagtcattataacccaggtgacagcgtggaatacgaacgcctttcagtatctgtagagcaatcaaccagtcgtgccatttacgctctagacttttaggtaggcgctcatcccaaccgatttttaaacgccaagcgtcttgcaatatgcactttgcttgtgtcgtaaacggcgcggctagtcccagcgggtcatacaaggacattgtcgtttttaatagctgacgtttcgtaacctgcttgctcaaagaagaagggtctactttcctgaagttgaatcccaaagtatcatcctggtgtcgccagataagaccgagaattttctcctccttgttgagcacagtgttctcaaccacgggctcggtcgcaagaccagcgacagcggccggctcgttggatgcccatttctgcaacacgaagtttcctcgccgatgtaccacgtcgactgctttagacactcggttcgcttctactgcgttgtcgaagctctgtaaaaaatcatccatataatgattacgtacagagttcactgcctctgggtagtcagcctcatgaacatgtgcattatgatttttgacataaattgcagtgctcggtgaagaggtcgcaccaaacaataccgctttcattctatattcgatgggcgttaaagtcgtatcatcgcgccacagaaaatgaagtgcgtctctatctttcactcgcaccgttattcgtagaaacatatcttttatgtctgctgaaacggcgacaggtttttgtctgaatcgcattaacacgccaaggagtgattgtaggagatcagggcctgtcagaagataatcgttgaggcacactccatgcgtgcgtgccgctgcgtcatacacaattctgaccttacccggtttagatgaattaattactggaaaatgtggcaagtaccacttgtacccgttagatggcgtgggtgccagttctgcatacccatatgataccagtgccttcatttgctctgaatatttttgttttacaatttggtctttgcgtaaacgggattcagtgttttgtagtcgactgagcgcggaggtgtagttgtctggaaaacacctatcctcatttttccataataagcccgtctcgtaaccgccttcaggcagagcgcgtgtagtttcctctagtatttttaatgctctcacctctgggtctgcttgcgggcgacgtggctgcactcctagtgattccaggctaaaatgttcttgcatgagcttttcaatagattcgtttgtacttacatgactgcaacgttctccgatctgtggtaatacatgaacttttgtcaggctgcaggttttatcatgtaaaacccagccaagcggtgtgcgtgacgctactggttgatcttttgtacctattcgagcttcagaagcgagcagaagtgcccaattgtcctgtcaagacttttggtacgccagcgtcatatgctagctgttcgactataggtgtcaggtgctcgaagcctgccaggtcattaacgcgtatcgactgaccagataattcaagtctgtcgatggttctggcttcaatgtcaatgccttcggttgtgtattttgcgttgcgagttcgtagcgtcaatgcgcgcgcctgctacggcctcgatataaaatggctcatttagacctgcgcctatccgctgcgcgacgtctgtagtaagcagagttattgtcgatccatcgtccaacaaagcaaatgtgtctactttaccgtatggtcccgatagtgtcactggcactactttcagcaatacttggttgtacgtgcgtggcgcgctcgtgttattgatgacggcgtgcagcgcgatgtcaccgcatggcgctgagtcgtcccgcgacgatacgtgtccggtcgctgtgacacgaggatgctcttctgggtcgtttgcggtgctcgatccccgtctactgtcactgtgcagtagccggtgatgataatgctcgcagtcttgcacttcacactgcttgcttttgcatcgatgcttccacgtccgtcggtttaggcacctgaaacataatttatttttacgagcagcttcccatctatcagttatcaacatttttttaaatttagagcagatagccacgctactgcaatcaccgttgcatactatacacggtgttttatcgcttcctactattttaaatgtcttgtgagccggttgttgtggacggtctcgtttatattccacctgtgctgaggcatgacgcgcattgagatcggcctctctatcaagaaatcgtcccaacactactaagccaggctctgcgtcacccgcagccatctcataatcgtaccaccggcttcttagcgtaactgacaacttttctaagatagcggaaatcatctccgggctatataaatattcagttcttttcagagcttgcaccgcggcaacagcgtttgtgaccttcgatgcaaacacacatatatctgtagggttatctgatactttaggtaactgacgtaatttatttaattcgtaggttattaatgcgttgggacgtcctaatcgagattctaacctttgcataatttgaacggccgaggatcctaagaataggcatttaactgcctctaacgctgtctcagggattttctgagacgggccaaattccctgcctctgtgtgagttgacgcagattcattatacgctgctttaaaatgcagccagtcgccgggatgcccactatagataggtaaatcaagttcatacctgctggcagcgggtttgccccgtgctacctctaacaacgcctgagtcagtccttgcagcaggctcccctcgtcgccacgttgcncccgacgatttttcacggtcagttcttcttcaccatgtctttgacctgcaagacgtgtggtggttctgatcatacgagaaaaagttcaaaaaagtgcaaggaatatttaccaccgattcgaaagaggcatttgagtgatgccggagccgaacttgagatatacacggtcaagcgaggactcgtttcctctctctgcccactcttggaatctgagaaaaaactcaagcttttgacagagattcgtcgtgatgtgcgagatctgtctcgagtctacatcgaacttggcgtttggctcaatttctacatgaaaacagcgacccaactgccctcgaagccagatgtgctaaatttcatctacgcaatgaaaggaaaaggcccctatgccgacgcgtatcgtgttatgtttggtgatagaaaatatgacgatagacttcgttcgtttgtggtccaagagatggccaagcagtacgagacagtgttacatacgaatattagcacgcacgcatacgctagacttgctcgttatttcaacgtaaagcgaaacgatccagctctctatgctgcgtttttcaagaaagacttgcccgaggacaacgaagagatacgtcgcgtatgcactatcatcaacgtggacactgttgggggcgccaagtggtggtctacgatacacgaatggctcaagattcaggcgaaactagaagacttcaagctctttcctcagccctcgcatggactcaagcacctcacatacacgtctaggggttggcacgaattgctgcgtcgcgtagatccaaaatctattacgagctactggacgcgtatcgtagatcataggcgagaactctggtcgccgtggttagacgttcgggtgtagtcttcaaactgatggcatcagtgttagcttatccatgatcgaatcaaaaaaaattcaaatcctataaaacgcccgaagaaaacgtatgatcgcgtcatcgcagtggacccctctgaggaggcatattgttgatgcagcatttatcagttttgtcacaaaatggtgaaatatctggatataaacatacgatatcttcaactaatcagttatttgctgcttaagaaacccacatttgtaactgatattgttttaagctgaacataaagacaattgtacgcttatagcgctataagttaggtaaaacaaggagtttattttcaatcatgcagaagtcagctgtgtaaagaagaaaatatctaaaatattcagtatctgaataaattagtaccatttcgtacactatgcagcttaaagaaaatatttcatctaatattcagcgttttgctgtttaactgctttgcttaaatatgttatacaggaaaatgcaaaaacttcagctactgtgcagataatagctgtttcaattacttttattcgaatatcgcttgtttagcagattctacgtatgattactattcagcttaaaaaaataccgcgaactttatactgaatttagtaagcttacaacattattttaatttaagaactctcttattcaaaataaagccataacatcagctgaaacacaaaagtaataaagcttgacactgcttattgtggtatattttcgctactatctggcttatgtgttggctgggttgtatacttatttagttagattaaggttaagtacggtagattttgacttcaaattaacatgattattatagaatattaaaaaagagaaggggataatctacttctacccatatcatttttaaagtttcccatgtatctatgtaggtagaggtaccaatctatggtttaattngatgtctcaacctcctgctcccgctacgtgacaacagaggacgctacttgtatatcagtcacattataggttttttttttgttaattattaggtgtggaggagagatacaaaaggatcgtttgtttcacttgtgcatttttttttattgatgttttgatttatattgaatagaagattacttttggaccactcactatctccaaaattttatctatgatttgagatctaaactgttagaacttaaatcatatatgaaattttggaaatttaagttttacatctttaacgacatttattatgacttgtcttaagttttttttaggaaagttgatcgagcggatgagccgaagttaggttggaaagcccaaacataactattaaaaagctacttttatacaggatgaaaattatagattaccgtaaagtaaaatagtacgctcggtcagtgaaacggcttcccaaatgaacacccatgttccttggtaaaagtggttcagttaacggaattaggtatgatatcttatacctaattcctttaactatataattttcatcctgcaatctatttttttttcttttcttatctttatatgttttctttctttctattcacgggtaaaagaaaacttcccatggtactactggattgcttggtagttctacgggattttttttcacccgtggtactactggtagtaatactggtaataatgtgactaaattattaggtattgatttgactgatagttttaggtcgttttaatgtttatttaattaagtacaaataaatgagagataaaaatattttttctcagattgaatcatgttgaataatgaattaaatcaatatctccaatcattacacttgcaagtgtaatgattggagatattgatatataaatgcgaaagtaactttgtctgtttgtctgtctgttacgcaatcacgcctaaactactgaaccgattttaacgaaatttggtacagatatagtctagagcctgagaaaggacataggctactttttatcccgatatacccacgggatcagggtttacgcgggtgaaaccgcgggcaacagctagtacacaataataacttcagtaggtatatactcaataatgtttaagttcgttccaatgtaaaggcaagtaaacaaacgaaggtaaaaaacggtangggcaacagctagtacacaataataacttcagtaggtatatactcaataatgtttaagttcgttccaatgtaaaggcaagtaaacaaacgaaggtaaaaaaaaggttagtaacgggtaaaatcatacaactatagtcatgtaatataactatgggcataggtagtacttattatactttgacattttgtgttaaataatgggaaagtgactccatctagcaaatttcccccctaactcctcgaccaatgaatgaacctggtgaaaagagcgtagaatctccagctttttcccccctaactcctcgaccactgaattaacctggtgatagcagcatagaacctccagcttattcccccctcactcctcgaccactgaatgaacctggtgatagcagcnatgaacctggtgaaaagagcgtagaatctccagctttttcccccctaactcctcgaccactgaatgaacctggtgatagcagcatagaacctccagcttattcccccctcactcctcgaccactgaatgaacctggtgatagcagtatagaacctccagcttattcccccctaactcctcaaccactgaatgtacctggtgagagaagcatagtacctacagcttattcccccctaactcctcgaccaccgaatgtacttggtgaaaggagcatagaacctccaccttattcccctctaattcctcgaccaccaaatgtacttatgtctcctaaaccacattattcaaaaaaagaaaacatgccaaacagtaacccttcatcttcaccattgcaaccgatgtctccagagacaacagaattatttaatattctagctgaatctgataatgaagaattcaacattaatagcaatgaaaacgctgcactaggttcaccaatttcttcggacataacaaacatcatgaatagtgatgactccgtacaggacccagacttcgtttgtcatgatgaaaatgaaatatctagcaataaaagctctgaaaattctgtatcattgctagcgacaatagaagaaggccctcaaacagcgatagaaatactggatgaaactaatatgtcaaaccataacacaacaaatctaatttagcaagaagatattgaaactgagccatcatccaatggaagacccaaaagggatagaaaaagatcatatggtggagtcttaagagaagatagaaagaagagaaaatataataacctaagctatgtgaactctatgaagcaggtagtcgatagtaaggtattcattgactacagctgtaattgtccgaaacaatgtcaaaataatgtatcaactgaacaaaaactagaagaatttaataaattctattcgtttggttcatatgttgctcaaaatatgtatttaatagcttgcgttaaggaaaaacctaagaaacgagcatacgtcacgagtacgccacgtcatttaaaaagaaacagcaaaacatatactcgtgaatattatttaaaaaatatcctagtttgtaaacaaattttgttaaatacacttcaaacatcatctaaaagaataaacaaagctctttgtaaaatgcggaataattgcctaaaagatatgcgagggctacaagcgggtcatatatatttcttatacttatttaaagattattataaaatccttcataatagctgggcactatgttggaacgaagtaatactaacaaatcgtttttctttgaatcagaaatattcatttttgaatcataagctgcttttaaattaatttgtgatggttgttttctttttcgtcgtaccaatttaagcttagcctggacccattctccttcaaaagatgctttaagttcatagaagtcactatttttagtaaatttaatcattgttaactcgtcagttttattagatccccattagtgtctttctggtaattaatggcttgctcttcagtcagtgctttcaagtcataaaagttactgaaatgcatctcataaacaatgaaagggttctctctgtttttagcatctcgtatcaaattaacatattgatctggtacgtatatggtccagtctttttagctctttttattgatttttcaatcagagaatgggcattatcaccttcattttgactatggccgctgattaaaaacttatggcacacagaatttatagctaaattttcgacagcataataaaacatgctgaacacatatctaaaaataaaaacgtattcattagaaattattataaagttaataattatatcaaaatattcaccgtcaaaaatttgatacgtaccgatttttttgttggccacaacaattatcactgtagaaagtaacatcagagtttggatgctcttccgcaactttctctagaaacttgtagacgcaagttcctatttctgtagaacctttagaaaccaagccctcacgccaaaagtaataagtagttgaatccgttttaatatttgttatctgaaataaagttaatattatttatagtaggtaatattaaactcctaagtcccaatgtcctttgtaaaggacgtccgaaataaagaattttgaaccatattaacatttttttattctattcctcaacctcattttgagacctatgttctctatataaaagcccgacgat

SEQ ID NO: 146 - DNA, 13235 bp, Mamestra sp.
  variation 1025: note = n is any nucleotide
  source 1..13235: mol_type = other DNA
ctgcgatatgagctaccccttgtacgagtaaccctgtcaaaaggcttaagccttaagcggttaatcataatgttgttttaaccctttcactgggttttaagtatagaacccattcaatgggttatccatattaaagagataaccctttcaatgggttcaagcttaaaacccattcatggggtttcatcatgataaaggtaacctcataaacggcttaccctttcaaagtagttaattcttaaccggggttgtacggtccctgactgaaacaccacccagcaccaactgggcgctgtttccactccaagtttagatagttaagatgtatctagacataatacatcttaactatctaaacctattttataattagaattacggggcgacatcgtcattgttgaccgagtccccttaaataaagattaaaaaaaaaaaaaaaaagttacaaatctgtcaggcgttcaattgtcccagattttcttcaggaatattgctgtttttttattattgatttttttatgttgttttatagtatataatttggttacaaatattaattacttttttaatactaaattttgtttaagttagacaaaaactataagggttaatcgaaaaattaacagtctgattagctcctaacgtaacaaaatgcgctaaaatacgcactattttgcatagttagctataaaataatatgtttcttatgagtattttttgtatttacgcagttttttactgaataaatgcgattttgaggtataagtaatttgttttattctacttagtaaacttaataaaactctgtaacgtttgtgtaatgtaactgacagaaatttgagtttaattctcacaaaactagattgaaatgctattaaaataaattacaaacttattctattgtattttccttaaaatttaatacatatagaagcaaaaatagttaaaaaccccaataaattacacactttgaaaatgaaagcttatttccattattggtacactttttcgcaaaaatgcccatnataaattacaaacttattctattgtattttccttaaaatttaatacattatagaagcaaaaatagttaaaaaccccaataaattacacactttgaaaatgaaagcttatttccattattggtacctacactttttcgcaaaaatgcccagtggcaaatgcatctctccccccacacccctcagatctagggactaagacgagcgagccaaaatagtttcactacctcgtgttaccagtcatcatcatcgtccacaactcgactttactcacagctcgatgtggcctctattttacttgtgccaattttcccccgatcctgtgctagcctcattaaagttttcatgtaggttttttacccgcgatggaaatggatggctgaaatctacaaatttatattttgattgtttttttaaagccttgcctactcagggaagtagtcttggttgtaagtttattaaaaaaagtggtgtggtaacagctaggtctaagaaaaagccttacgtccataaacagttataaaattcttttaaacttttaattaggtacgtatttcgaccgacttttgtacctagtgtcatattcgcactaatgagaaagctcaaaaataaactaaactaacttgtaaactatctagttgaccgagatttgtacaacaggctagtgcccgggttaactatttggttagtctcagcaacgcggcaaaaacataaaaaaacaagtctatgatttttctaaaattgtgcttttctatttatcaccaaaaatgttcttgttcaaaacgcatttttatttatgtttccgcattttataaaaccggtagaagacttagttctgtactatcggagatttttataaatgtgtgatacgaagcatacctacgaacagctacctataacatttttgtgacccggtttaaaatgtggcagggtatacacaaattacatcgccacaagttaacaaagtcaaaatacttgattaaaagatgatatacctactttttgtccgtagcaataaagtaggttctatttagcatttcgtcaagtttttatcatactaacactctgtatcacatacctattgtgttactgagaaaataagtaaggaggctctgagatcttagaccataagaagttatgtcaatttgacataactgttttttaagggttcgtaaaggacgtccgaaataaagaattttgaacccatttttttaatctattcctcaacctcattttgagacctatgttctctatataaaagcccgacgatttttcacggtcagttcttcttcaccatgtctttgacctgcaagacgtgtggtggttctgatcatacgagaataagttcaaaaaagtgcaaggaatatttaccaccgattcgaaagaggcatttgagtgatgccggagccgaacttgagatatacacggtcaagcgaggattcgtttcctctctctgcccactcttggaatctgagaaaaaactcaagcttttgacagagattcgtcgtgatgtgcgagatctgtctcgagtctacatcgaacttggcgtttggctcaatttctacatgaaaacagcgacccaactgccctcgaagccagatgtgctaaatttcatctacgcaatgaaaggaaaaggcccctatgccgacgcgtatcgtgttatgtttggtgatagaaaatatgacgatagacttcgttcgtttgtggtccaagagatggccaagcagtacgagacagtgttacatacgaatattagcacgcacgcatacgctagacttgctcgttatttcaacgtaaagcgaaacgatccagctctctatgctgcgtttttcaagaaagacttgcccgaggacaacgaagagatgcgtcgcgtatgcactatcatcaacgtggacactgttgggggcgccaagtggtggtctacgatacacgaatggctcaagattcaggcgaaactagaagacttcaagctctttcctcagccctcgcatggactcaagcacctcacatacacgtctaggggttggcacgaattgctgcgtcgcgtagatccaaaatctattacgagctactggacgcgtatcgtagatcataggcgagaactctggtcgccgtggttagacgtagatatgaaaaagttcgggtgtagtcttcaaactgatggcatcagtgttagcctatccatgaatcgaataaaaaaaaatcaaatcctataaaacgcccgaagaaaacgtatgatcgcgtcatcgcagtggaccccggctctcggatcccagtcgccgcagtagaatctaaacgattacagtttaggcgcatcactaaaaagtatgtgaggtcacatactctcgagtggaagcgcgaacgaattcgaaacaaactgtgtcgagtcagcgaggaagctgaacaaaaggctcgagaaaaactaacctttccagtttcatcaaaaaacacgattcatgtcgtagagtataccgttttccgtatgacttggttcgacgtgcgtcaggagccctacgaaaaacacgcgaaacttactaggctcggactcgacaaatatctacgtaccgcgaaatgcgaagaaaaaataatcaaggaagtttttgatggaggtggcgtcgaatctacgttggtcttgtatggagctggaagtaaattcatgaatacggcgtcgttcagtggccgaaaattcaagcacgactcgctaatcaagagattgaggagcaagcgcaacatcgacgtcgaagtcgtggacgaaaagtacacttctcaagcttgctcttcgtgcaacgcaaaaactggagtttcagaagatcgtcatgaatcataggctacgctggggggtttgccgaaactgcaacagcgagtttgatcgagacgctaacgctgcaaaaaacatactgataaaccatacaaggtctgccatctgcaggccaggatgttccacgagtggagcatcgtaaccttctagatattgtaactcgacgtcaataaggttcaattttgtacttgagctttgttgaggttgggatttaggaggttaagggttctgaaatcatataggtactaattaatatgagactgaaatatcaaagggcctatattacgacctccgaatagattctaaaatggaaaatattgtacatggaattatctagtcaattaacgggaacttaatcgtaggtggtaaaacaggccataagaatgcttgttgccatggtagttacccagagccttggactagaccgttagcctagttttaagtcgcacaaactaaacaaagttaataaaaaaggatttcaccatcaactttaatgactttgattacaactcgaataatctataagttacaagaaagtcaggacattaactcttaaaaaaaatccgtacggaatcgttttcagtttcgtttaaacaaccctcaactccgcgccttcacacgccagggaagtataataaaagtgttctttttttaggaaatgtcacaaccaatgcacacagcagtaacagttggagagtcgttgaataatctcaatcgtcacaaaaaaacacaatttcacagttacaatattagtaagtatttattaactttaactgtacaaagtcaacaatattttctttgccttgttcagtgtaaaagataaagaagaaataaaataacattgtcccctaaataatttatcatgccatgcaagttctacaaacttgtctaatagtagaactctaataagtacactcactacttgcaaaagtggcttgtgctataacacccatccccgttttattttccgaaacgatagaattactcaccacagtgtagttaccatttattaagatacaacgcacaatctgataggtataattatttacaatacggctaattgggatgtatcaaacattatcgctaggtggttttatttagaaagagtaaaattgaatgttgtttttataatcatttctcctgatattacagaaaattatcgtctacgaataatgaaaatgttcaggtacccacctagcacctaaatagaaaatttttgatacgacgtatataatgacgaatcagaagaagtttggatagatttacacattgataagattaagtaaaataccgctgtttcagcaagtcaatgttcgattttgatacaatttacagattaagtactaaaatgtattgtgattattcgtttcaactatctatagtccacaatgagtaatattatattaacaacacatttttaagacaacttcataatatttgtcacactgataataatatgtaaaactaattaatttagtctagtaattttacgtcgtgttcattctacaatcatgttctactcggtttattgggattaatagttcacatttatctttacataataaattgaatcaagtataataagggaatgttcggagaacttgcttcgctgtttacccaatttcgtaaaattacaaattcatttgcatgcaatagtttgtcacactcgtgaattttctggacactacattaataatctcgctaaacacttatcaaattgtatcaacgacattaattatatcgttcatggaacttaaaacgcgcgaatgctacaatcacacttttcttatttgtctgtattcaattcacataaaattagttctgcgagcggttcgtgcggtatttatttttgtatgacctaccccggtattccggggcaggccgtgggtactgttaaatcctgtcttgtatgaaggggtgcgccaggcagtggttgacggaggcccgcttggcggggtcgagcatgagcatacgctcgagcaggtccttcaactgcgcgatcttcttagcctcgggggtggcgaggcggtggtgcggcggcgccagctctgcctgcaggtcccgcgtcggctttatacttgaaattactacaaccttttcctgtaatgagaaaacgaaaaatgattattatcgataagtatgaaaaaaatcgaaatacagaatacattttcaaagtgtgcttggatggccaaatccgaatctatgaggaatatcgaaaaacactgaaaggagtcttgagcccgattttgatgaaaactaaaagtcaggtacttaacagggaggtcaagaagctgattaggcgcgacactcggagcgcaaatacccgattcagtgagcaagccatagggcagaacaaaggctcgaaggtatttgccaagcccaatacctcccgttgtcacctgacgaaactcagaacgtcacagggcaccaccgtcacctcgaagccagagatactcgctgaagtcgaaaagtctacggagacttatatgctcagaaaacatcccaccgcagcccacggcgcggatgatccacgggccaggcttacacgccatctcacagacgagcttcccgacattgacatgggtgagattagaatagctctcggacaacttcataacaataaagctccaggggatgacgggataaccacagagctgctcaaggcaggtggaacacctgtcttgacagagcttgtaaagctcttcaattccgtcatccacactggcataacaccggaggcatggcgcaggagcgtggtggtattatttttcaaaaaaggtgataacacgctccttaagaactaccgccccatttcactcctgagccatgtctacaagctgttttcgagggttatttcgaatcgtctcgcccaaaagtttgatgacttccagccgccggagcaggctgggtttcgaaaaggctacagcaccgtggaccatatacacacccttaggcaaataatccaaaagaccgaggaatataatcagcctctgtgcctagcgtatgtggactacgagaaagccttcgacaccgttgagacctgggctgtcctggaggccatgcagagatgtctcatcgactgccgctatgtcgaggtgatgagatgtctgtataaggccgcaacaatgaccgtccaagtacaagaacagagcacaaaaccaatccaactgcgtcgaggtgtaagacagggagatgtcatctctccgaaactttttacgaacgcgttggaggacgttttcaagacgcttaattggaaaggacggggcataaatatcaacggtcagtacatctcgcacctccgatttgcggatgacattgtcatcatggcagaatctctgcaggagctggaagggatgctaaacagcctaagcgattcttcaaggcgggtgggtctcgggatgaatctggacaaaaccaaagttatgtacaatggtcatgtccccccgagacttgtaatcgtaaatggcgctaccctcgaggttgtgcaagaatacatatatctaggccaaattatacaactggggcggcacaactttgataaggaagcgaccagaagaatacgcttgggctgggcggccttcgggaagctacgtggtatctttgaatcgtcgatcccacaatcccttaagaccagggtctttaaccagtgcgtccttcccgtaatgacttacggagccgaaacgtggacactcaccataggcctggtccacaaattcaaggttgctcagcgtgcaatggagagagcaatgctcgggatttctctggtggatagaattcgcaacgaagtcattcgccagagaactaaagtcaccgacattgcgcgtagaatgagcatgctgaagtggaagtgggccggccatgtctgtagacggacagacggtcgatggagcagacatgtggtagagtggagaccgcgtatgggcaaacgtagtgtgggacgccctgcggcacgatggatcgatgatttgaagaaggtggctggcagcggatggatgcggaccgctcaggaccgggatggttggcgatctttgggggaggcttacgttcagcagtggacggcaattggctgatatgatgaaaagtgcgccattggatttttttaaatcggtatttcgagccaggaatcgaaccggttcattttgaaaaaaacaaacagcccgtgttattgcaccatccgaaagtggaaagtaaaagcaaaaaaaaaaaacacatggcaaacaaaaggaaggctcgcatttttatttattaaaaatgagagcctcagctctcatttttagtttcaactaattcgtttaaaataacagtttatgcccacttctttgacacaactcacaactaataacataacaattatacaatataattatctcactaaagtatacgcagtaacgaaaactcaccctttcagtaatcttgtccagttcatgatacatgaagttacaattcgaatcaaaatgctgctctttaaagaagcctttcttgataatcttattcggtatcttcccctttagatccataaaatattttaacatttcattatttgattttccactgaacatgatctttccagtggacagctcgaagatggtgcatgcagtggaccacatgtctattccgtggtcgtaggtgactcctaaaatgatttctggagatctgtagaaccttgacacgaggtagggggtgacttcgttatcgctcaagtggcctgccgcgccaaagtcgcagagtttgagcatcagtttgttttcatttacgagtatgttgtccggctttatgtctggaaagagagacgaaatattgatttgtgaaaaagccattaaaatatcggaacatgatatcagtattttatttagtttatttattggttaacaggccgaagcggccggagttgttgtgaagtcagatggtatgtacaatactagatggcaaagatactgcctgcgtttccaatatctaaatacatagtataaaacaaaataatcgcttagtgttaaaaaagcgacaaatgaagaagtttagaaggtttgtattacttgcacccgtgcgaagagaaatgtatcaacttcctatatcactaataaacccggctcttcaaaccggagcacagcaacactgctgacggaaaatatatagtaaaatactttcctggacaagctcctttacaaaatggacccactattaccaatcaaactcagtagatttcttacctgcatgcaaaatcccagtcttcttcagcagttttagagctaaaagcatctgctgcgtataacttctgacggctttgatatgtattccgctgttcttgccgtattttttgaggacctcgcgtaggttcatggaaagaggttccatgaccatgcacaagtgtcttttgtggaagaaatgacggaacaggcgcagacaatggaacttatcttcgggatcagcgtcgttcaggcgtttcaggatctccaattcacgaagacctgtcttgtgcctgtggaaagagaaaaaggttattctcgtcgttagaatattgtatagattaaatgttagcgtaattcttataggttagagagcagtcactataagctggtactagtttatgtagtctggtaggagggtctgtattggaggtttcacgattgcaaaacaatatcatttttcattcaacaacaatatactttggtttggtaccaaaccaaagctctctactttttagctttggtaggtcgcaaacggctgacgaaagcaggaaacgactctacgaagagcaggctgagaaggtgggtacctatgtctgcacgcgaaaatatcatagttcgtggtgctgggtgtccccgaggactaaaaaccctgatgactcccgagcgccaagtcttaattggtctggaaccggagtcaggcaaattccagggtcataatggcagattctttgatgccattcaatggatccaagacacgagcaatacccgaggcaacgttgcagtgaggttcgagtatggcaacgttaggacctgaacccattgggccactccccattggatatctatgcaacctggtgaataaacacaccagagaccaacaaacactacaaagtaagggttgactgtggcaagtgtagccaggccacgacagaggcccttcgactacttaactagggttgcgtacacgtcacaacagttacaactggccgcaagttcctctgggtattactggtacaatccgtcggatagtcaggacgcagctggcctttctggatgagcaggagtggatcttatgaccaacctatgccacctgtacactgaagctatgcatggagttgcggaaaccaggaaatactagtaatcagctgaatccggttagtctggaagaccccaatatagtcgggaaaaggctaggcagatgatgatgatgacatggagttgcgaacaccaggccgtcatgctattgcatgtagtcttgtgtagttcgcgaacgaactacactggacagcaaataaaccgagccacccgctacctaggcactaattcgattttctcaaaaactaaaaaacctacaattatcaaagttgtacctacagaaagtgcgtttcatggtgattaaaatgaaagaaaactcattgggtttaatcaatatttcagtgtttattaaggattttacaaagaagagtcgttttccagtcgtgacaatcgttagtaatgataaagtgaaaaaaaaattaaagccaaaaacaaagataaaatcaaaaaaaaaagtttttgatcaatattccgtatgtccccttgctcggataactgccagcatccttgtattcatcgaccttaccagcctgacgataaaatcttgaggaattgtattccactcctcttaaattgcgattcgcagctctggaagccttgttggagcaggtacccgggctcgaacccgacgtttcagctcatcccataagtgttctatcggattcaagtccgggcttcgagctggccagtccatcgtacgaatgctgacgtcgcgtagatactgggtcaccacatgagcaacatgaggccgtgcattatcatgcatcaattgcatatcctgtccgatatatcctgcgtaaggtaccacatggtctgcgaggatttcagtaatgtagcgatgagaagtcagtccacgtgtacggcccgtcggttcgatgaaaactaacgctgtatgtgctgttaacgagatgccgccccagaccattacagatcctcctccataagcaacagtttcctcgatgcaacactgagaataacgttctccagggcgacgatatactctctgacgtcgatcacttccatgtagactcaccctggtctcatcagtgaagagtacattactccactgctctaatgtccaatccctatgctctcgagcaaattcaagtcgtgctcgacggtgtgctaccgttaatgctgggcctgttgcagctctttttggggtcaggttccgttcagcaagtctccttctgacggtatctgaacttatgaccacttggcgttcgtcacgcagactttgttggacttgaactgcgttgaggtggcgatttcgcagaacagtaaggtggatataacgatcatctgctgctgatgtagccctaggtctgcccgtacctggacggcgatcgaatgctccagtctctaggtatcgtctgtaaactcgttgcaccgaagatctgctgattcgaagccttcgagcgacttcacgttgcgcaatgcctgcttgaagtaatgctacagcttgagctgcttcccctcaggaagcagctcaagttgtatccattattaatcgaaaaaagtagcaaaaacacacgcgtctgagcaaacgatggacaaaaactaaagaaatgataagaaatatccgactatcctcattgtagagaaaaagaacgctaatttcaaactctggtgaaaacagagcaaatcgttagcattgtgtttgttgcttgattacaatgtgagttgacggtactttcgaattaatttgtagtcattttaatcaccatgaaacgcacttttgtaggtataactttgatagttgtaagttttatactttttgagaaaatcgaatcagagttcctaggtagcgggtggctcggtttatttgctgaccagtgtagttcgtaagagcgctccaacaggcgaactacgcgaactaggtctcagattcgccgctctttagttcgttagttcctttgaaattaccgaccttatagtattgcgagagtgagtgcgacctgtccaaactagttgcgtcgccgctcacttactcaataactacaagctactatttacaaatttagaataaaaacgtcatttagtattttattttataagcaattttctacattgaattaataaaacaattgaaataataagagtgcaacgtatgtaaagtaaaaataacggcaaaatagcgactttacaaacagaagaacgcgcgcagcagcaaactgcaaagagcgaacgatctgcctatctctcagctcactagctcagtcaacccccgtctcgaaacattgaattgggagttggtggtgcactaaaagagcgaaccagtttgccaaggagctgcgaactaaaatgagtgctcccggtcgcgaactactatgtgcaagtctaattgcctgggtatgtagggtatccagtgatgatttatacatggaagaatggagtaagtagtgtcacagattattagttactacggtagtatactgtgtgtataattttgtcactatatttttttgactatgtagattttttttctactcacattatctcattattccttatgatcttgacggccacgtcgctgttgttgcgcgcctggtcccgggctcggacgacgttcgagaacacgccctgccccgtgtacccgtacactgtgtaccggttgtccagcatctcgccgatacgtactctgtggaatgtgaacattacggttacacacatttctctgtatgtttatgaatccatataaataattatttccggatgaaacttggtacactggtagatcatgtccgggatagggtaagtataggatacttttcattacggattgttctcttgggataatattcgactctcacgtgtgcgaaatcgcttagtttctaataaagctatcttgttttctcaacacaatattagaagtgttcgtcaacagcgtcgtcctgacgatatcattctagccctaaaggatccttgttctgcgtgactttttacactacatacaatttttcgactttcgacttttatcgtaacaaaacttttaaaagcaattacaatagtattgtagcaaagacaagatgtacacgtctattagcagtaaacggtgtgtggactagttaaattcaatcgcacttaaagcaacttttttgtgataccgattgg

SEQ ID NO: 147 - DNA, 20975 bp, Mamestra sp.
  source 1..20975: mol_type = other DNA
  variation 1..90: note = n is any nucleotide
  variation 16063: note = n is any nucleotide
nnnnnnnnnnnnnnnnnnnnnnnnnnnnnnnnnnnnnnnnnnnnnnnnnnnnnnnnnnnnnnnnnnnnnnnnnnnnnnnnnnnnnnnnnnccctgcgcacacagcgggcagtgagcgaagcgcggcgggtggtgcgggtggtgcgggcggcgggtggtgcgggtggtgcgggcggcagatgctcacgtgcgacgctgcacgaggcgcgcgtccctgcgctggcgcgcctgcagacggttcctctcgatgcgcgcgcgctgcgcggccgacagaggctgcgctgtgtcgtccgccgcctctggcgctaagtgacgctcgtcattagtctcgactgacgccatagtatgttggcccttaataataaaaaaacattggtcagtaaatatcctcatggacaagcattattagaaaatataaaaacaggctaacgccatttcaagtctactaaataaatgcattttctcaagacctttgttgttcctaaagtcaggaactcgtaacggttctgtgaggagtggttctttggagcgagtccaaaataatttcatttttaataaaattgctggttaatgagtttatgacatattaatttagaagcaccttaatattgtggtatgtacatactatttgcatttcaaaagtcaaatgttaaaagaataattaatatataccattacattccagcaatattaataaataatcttccattttctggtattgcacaagaggatatggagtgtttagtatgagtgtaaaacatacatgtgtttacagaacacaggctatgagtataaacaattttcaatttggggacataactgtataaaaaccaaaagttcgatattggcacaacattttcttgtttttattataattcgtggagtgaaagtttaactatttaaataatttatactttaataggtttatgtagttgccagcgtatacaggccattgtagaatagggtctctgttatccgaaactctcattcagtccgttttttggtttgatttctaactgaaatgtttcaccggttatttaaattaatttgccatttatagatatccttaaaattaaattttcttaataagaaggcacctttattatcctatacacaacacaatgattaaattatctgagcacaaagttgaaagtttaaacttagcgctaagttacttatccaccacaaaacactttattgtactgtgaactgttctcatccaccactttttcaatcctgatgatttaagcttgtctataaaatgtatagattaagcactatattctttttatttgtacttaattgattattggagccgatttcaccacaacgcaattttatttaactttactgacagcacacttctaacactgtctgtcactgacatgtgccgacaagtttgtttttttttaattttgttcctgatcatggatactgagtctttaagtagcagtcttgaattttgacacaatttgttttgcatttaaaatgcggatgtaacaaattattatggtttttggagtatctggttgcaaatatatcgattcggccttctaagcaagtttcggcttaggtagtcaatactacaatcaaattcttagctccgagatcgcacctgtttcaattattccacactgtaccaatttacatcacaatatccactaggaatttccttttcaatcatatagtctaatctcttcttctccctatcctggactatgctgatgccagctatcttgatctcacccaagaccaattggacaagcttgagcgacttcaaaatctctgtatcaggtttatatttggcttgcgcaagtatgaccacgtatctgaatttcgtactaagctcaaatggcttcctattcgccttcgtcggaatgcccacatactttctctactttataatgtacctactctttaatccttctactcctttctatcttaaagaacgctttcagttcctctgtgacacacattctaggtctttgagatcatcggagaatctaaaactaagtattcgtatgcattccacttccttctttgacaaatctttcagtatacaagcggctcgtttgtggaatgcattacccttagaagtgaggcgtgcccaaacgctaccagagtttaaaagaacggtgaaggagcattacctttcactttaatttttccgctcctgtctcaattatatatttgatatttattagtatacaaattggtattgtatttatgtattttatattattatatctaattagtattgtttaaaacgtttgtacactgacagccctaaatctatctcccttcgttcaatccatccaaaggttgtctggaagagattgccttgtgcgataagaccgcccattgtgcacttattttatgtatgattgtcctgttcttattatgaggtgtacaataaagtatataataaataaataaatagtggtcgagaggtatcaacatctcgactagcaatcaaatgatcaaatcaatatgaacggctctgatgatggtaaaatatgccctttttggaaatctgaaagatcaaatcaatatgaacggctctgatgatagtaaaatatgccctttttggaaatctgaaagtccacacggctcttctgagcccgtactgagctataaacttttcgccctcaatatggttgcccaaaaaccgtgccgtctccccctctatcatttgtcacgccccgcggggtccttaagaagcgcctgagcacataaattttgccgcttagatttcatacggtatgatcgcttgaatggaaagatagaaaaagagtttacgtacgcgaagtaagaccataaaaataaataaaattagaggcttaggtatacagtttggggaaatatgcgtcatagccgcgctaaaacggctatcgcagagtatggcaggacttaggactcgcgtgtgagacagagccatcatgatgctggttttttagcgaaatgttcttgtaagcgcggggccccccaatgcgcggggcccgtagcatgtgctactcttgctatatggctaatccggcactgatgccagtctacttgaactgttatattgccttatatgaaaaaccgcccaagaagtggcaacttaaatgaaagccacaataatacaacaaacagttcaatggaagctggtaatgcaaatgaaagccaggattgatgaatctatacctaggtatcatctacatctcacagcttatcgtctgaacaaaggcaaataaagagaaagactaacgttgaatcgttagttgataaactggaagacattgatgcagattatgaagagcgtgcgcgtagaacacaacgcgccatcgacccgggcctggtggtgatcggacagcaagccacccaaagctcgccgtccccaggtgatcccagcgatccccggccaccgtaggcgcgggcctccggtggctggggatcgctttgcgactcccgacgcccggggcgtcttcttctgtagcggcggttgggacgaaaaccttgtctttccctcgctccggaccatggatttaacaacggtcggacgcgagaagccgccgccgatcgcctcgacgaggacacggcggtgctccgcccaagcagggcagacctccaccgtgtcctccgggcgatccactacctacctaagtacttgcgagttggacggggtctcgtcgccgacaatattaatacctacgtcgctgctaggttgtctgccgccgtcaccccgcgccgcaccctcgtctcctactcttcccggcgggcgtattcaagtacaatacctatacctacctaagtttttaaagattaagaaccaaaaaaggtttcgtgaatgaaacggatgaaataggataggtaggtacttagttgttttgttatctagagcacatgagtagtcatgtgatctagagcacatgcatactacttaggtactataagtagttgtgtaggtatctatataaacttaccagccagacttcacacgaactccttcaagataagtctcaaatattagaagattcatttatttctcaagattaggtaggtaagtattatgttcttcaactatgttcacacacaccaatttcttgttttaagtaggtaggtaggtaaggtgagtgggggtaagtcggaatggatttttgatgagataaacagtgttgatttgaaactgttgtgaaacaaagggatttaagtcaaatgcataaaatgatgttttgggtaaaaaagtatagtcaacttgtttctataatattgacagcaatctttttgaaacaatattttatgaaaaaaacgttagtaaaattggtcttaagaaaaaaaatatgtaggggaaagatgaaacgctgaaggggtaagattgaaatagtgactaaaatcgtattcatggtcattatgcttgtgtggtgatcaataaaccttctgcttcaataacctaaataacttgaaaatcagtaacattcaaaaatcgcattctaaatgcaagaaaaaataatttatcaaataaaatatatcgatcttaccccgttgaaacggctggcagtcaggggttctcaacatgttatggatattaaaagaattaaataatcatgctcatgcatgactgtcaagtctaactcggatcgataaataaaacacacgttttcatttagtaccacgtagcgtacattataattatttttataaaataaacaacgacagcagaatacaattaaacattattaaaaatattatttcaaaggatagaggtaatacctaaacatcacagttaaataaaatcagtcggtaataagtactacttttaaaactaaaaataacctcttatcaaaaatatatttggctttatcagatcagttggttattccgcaaagcagaagtaagcaactacaatttaaaaaatcacgtactcgtatttttgcgtcccttaataattaataaaaaaaaaaaaacaaaaccaggcacttttgcctttataaacgttactaaacagtactattataatcactgccaaattgacattaaaattctagataattgtaaaaaacaccgttcatcagaacgcgagaaatcactgcatgttgatcctaaaacaaaaataaaaagttatctatattattatacaagttgaaattgcatatttagtgttccataccgtggatgatttacagatcgcaaatcaaggtctctttgatatttatgtataaaaacagaaatatgaaagaagcatacctacctaagtacagatacattaacacagttatcagcataaaatgcctgtattccccggagggtaaggcagggtgtatcttcttatcgtgttgatcaatggcattatattttttctagacactggtctataaaaaaaatcttccggtttgtgaggcaaagtactgacttcaccacacaaaccagaggtgtatagtacgctaatattttgccagctatgtttaagttgtttaaattaaaaaaatatttaaaactttaaccatggattcagttggtacataattctagacaccttaacgtagaatttattcatccgcctaaaaatcagctgtatacattggtacattttaatcgtgtaggtattgcacttatgtacagagcatctgactttttttaagccgtcaagcggtttaacactagagagtttagaattatgtactaatttcctgatacaagtttttgttacgatgttgtggaaggtataccacagtgtatttcaggttgaggacccctgaccttttgtaggagtttcgtaatcggggtaagatggaaagttttatattatcatcttaccccgtcaaattttgcaggggaaagtttgaaagccaccataactcttaaaatacgtgaaatataataatcaccacattatagagcatattacatttcaaatctaattacgaatatcaaaacaaaatgtttgttacttacctgtgtaaggagatacagcgagcggggaaagattgaaaaactcaattttacgcgggaaatgtaacgttcggagaaatgtcaaataacaccgcagactgcggggcggggcaagacaaaatggtgtccacaacgatattgccagcattaaaagaattccctggtattcggcgttattatactatttttatctttccccgttttttatcttacccccagtcaccttactatcatatgacctaatttgaattttactgacaaactttaaaaatggaagagtgatgaacaaatattttaaaatcatggttattttatgaagctgctgctagaatcttctccatatgagacaatgtgttaagtaggtacttcttttaacggctacttgtgtcgtcttgaaagtacctatgtgtgctatttgtatttatttcatagcaatatatgtaggtacctaaagctgttgctggaaagctgtggctcgcctccatgcgagagaactcttcaacggttacttgtatcgtcttgaaactctgtttgctatttgttgatatttcatagcaacacatagtaactgtgttatgtagctgctgctggaatcgtctcaatgtgaaacgattattcaacggttacttctaccgtcatgactgtcatgagtcatgacacattgtgtgctatttgttgtcattctataacaataggtatatacatctggacacatctattggcccaccttgtattttcagtttcgtttggtcctagctaaaattttatattaggtcgagcaaaaagtttttatgcagttttgaacggcacattcacaatttcattcaatagtcttttttttaatttcgaacacagaatttaaagaaacaaaagacaatttggagcctgtttgttgatttcaaacaatcgaatactaagaaaacttggttttattggtttacttggatttaattcttgaaaaagtgattgatatctttggttttgcaacaaacattacttattcttaacattaaggtgaggttctatcaataatctatggatacttcacctgaagtcgccgcccaagctgtggcacttattcaggccggacacagccaaagaaacgtgagtgctcaacttaatttaagtcgatctgcggtccgaaatgtttatcggaggtacctagagactggcggctttgttcgtcgccaaggaaggccacgatctcgggtcacaactgaaaggcaggatcgattcatcgtgacgaccagcttgagaaatcgtcaccttacctccattgagatacaaaaccaacttcgcgacttccacggagtatctgtgagcgctcgaactgttcggagaaggttaaaagaacgcgatatggtaccacacaagccagctaatgggcccaaactaacgcgagcccaccgaacagcgcgccttcatttcgcacgcagtcatttaaattggacacagcaagattggagccgtgtactcttttctgatgagtctaaaattgtgttacatggcaatgatggaaggaagaaggtctaccgacgtaagggagagcgtttcgcacaatgctgctttgaagagagggttgcttatggcggtggctcatggactgtctggggcggtatatccgcgagcggcaaaactcaacttgaggttgttacaggaccacggctgccaacattaaatgctgaaaggtacattcgtgagtgcttagaacctcacgtgataccatacgcggactatgtgggcccaaatttcctttttatgcatgataatgcaagagcccatgcggccggcatcgtcagggaatatcttcgggatgtgaacatcacagttatggactggccagccagaagcccagacatgaaccccattgagcacatgtgggacgagctaaaaagacgtgttagggctcgtcagccagttgcccagacgatgcaggagttgaaaactgccatagaagaggaatgggagatgatccctcaaaattgcatagagcggttgataaactctatgcctaatcgtatgagagctgtggtagatgcccatggaggcaacacgcgttattaaattaaacctttatttgataaaacatgttttttattcaaaaatcaattgcctttaacaaggcgcatatccgacttgttaggcgtagctccatgtcgtatggtattctgaattcaaatttaaaacaatacgatcgaaaaagatggtaaaatgtatcaggtttaaaactgcatcaacagtttttgttcaatctagcaatcatatttcggtaggggccatcgaaacctaaactctaaggtgggccaatagatgtgtccagaagtgtattataatcatggtgatatcacgagtatgaagctgttgctggaatcgtcttcatatgagacaatacttcaacgcttacttgtatcatcttgatgggaaattaatatttgctagtgcgagtggactgagatgtatgtgtatgtacatatgtgtcattcactttctgctgtctccgctcaatgcatctttgacggcattccaagcgttctcggttccagccgtggactgaaccacggtcggatagactaccctgcgacctcgctgagcattcctccagcgtatgctgcgcggtgtcctcggggtagtccacgcattggtgccaaacgggcttctgccaacccgacctatgcgacggaggtacctactttccaaagcatccgtccagtaagcacctgcgtcagccggaaactatgggcaccatgtcgcctatccagccatagatcaaccattagccatcgctttctgcgttcttggcaggacagcggcgttttgggctgttaggttttacgctcacactggcgccccacaactggcgggcggacggtccatggaccacacgatccttctgactgagatatccgcacatctgcccatcccgcgtaaatatacggacgtgctaaataaaccttcgcatagtaaaaaacttaaaaacgatttcaatatatttttaggcacgttggcggaggatagagctccagcgcgatcttatggcggtatggaaagagcaactgtcgcaacccagcgctgggcacgtcacaatcgtggcggaagaagtcccctttttgtagagaggttgaagaagcgccacagcgttctaaccttccgcctgacgcaggtcttcacatgacacggtagaacagaactcgcccggttgtcaccattgtgcggatcgtccggaggacacggtggagcatacggtgatattctgccccgcttgagcggagcaccgccgtgttcttgtaactgcgatcggcggcgacgacctctcgcgtccggtccggtccaatctatggcccgtagtgagagggcatgagaaccaatcaactcctgctgcaaagcactaatataagccgggaggaggcgagacgcgtgacagagaggcaatccttacgccccagccgtcgtaggtaggagacgccatgagcgtcggaagtagcagggcgatccggccacttaaggcggaagcgagacgcgtgacagagagatattcttaacgccccagccgtcgtaggagccgccttgggcgtcggaagtcgcagggcgatccgaccacctgagtcgcgggtctgcggacaacgaacgattcgacgggtcgacgacgcgtggcgttccacgcgcgcctcaaagatatgtcagcataatttagggggcccgttaaggccaatgccgggccaggattacgtattaagagttattttatgtatgattgtcctgttcttattatgaggtgtacaataaagtaggtatataataaataaataaataccgcggccctgaacgcaacgggcatttcagtacgggtctcacactccctcctgctccgcccagagcgggaatagtcatttgatgattacatatccaaaaaaaatgggtatggatctagagtataaaaacttcttgtctagtactgtgaatatgacgtattttagactcctaagtcccaatgtcctttgtaaaggttgccgaaataaaggattttgaaccatattaacaattttttattctattcctcaacctcattttgagacctatgttctctatataaaagcccgacgatttttcacggtcagttcttcttcaccatgtctttgacctgcaagacgtgtggtggttctgatcatacgagaaaaagttcaaaaaagtgcaaggaatatttaccaccgattcgaaagaggcatttgagtgatgccggagccgaacttgagatatacacggtcaagcgaggactcgtatcctctctctgcccactcttggaatctgagaaaaaactcaagcttttgacagagattcgtcgtgatgtgcgagatctgtctcgagtctacatcgaacatggcgtttggctcaatttctacatgaaaacagcgacccaactgccctcgaagccagatgtgctaaatttcatctacgcaatgaaaggaaaaggcccctttgccgacgcgtatcgtgttatgtttggtgatagaaaatatgacgatagacttcgttcgtttgtggtccaagagatggccaagcagtacgagacagtgttacatacgaatattagcacgcacgcatacgctagacttgctcgttatttcaacgtaaagcgaaacgatccagctctctatgctgcgtttttcaagaaagacttgcccgaggacaacgaagagatgcgtcgcgtatgcactatcatcaacgtggacactgttgggggcgccaagtggtggtctacgatacacgaatggctcaagattcaggcgaaactagaagacttcaagctctttcctcagccctcgcatggactcaagcacctcacatacacgtctaggggttggcacgaattgctgcgtcgcgtagatccaaaatctattacgagctactggacgcgtatcgtagatcataggcgagaactctggtcgccgtggttagacgtagatatgaaaaagttcgggtgtagtcttcaaactgatggcatcagtgttagcctatccatgaatcgaataaaaaaaaatcaaatcctataaaacgcccgaagaaaacgtatgatcgcgtcatcgcagtggaccccggctctcggatcccagtcgccgcagtagaatctaaacgattacagtttaggcgcatcactaaaaagtatgtgaggtcacatactctcgagtggaagcgcgaacgaattcgaaacaaactgtgtcgagtcagcgaggaagctgaacaaaaggctcgagaaaaactaacctttccagtttcatcaaaaaacacgattcatgtcgtagagtataccgttttccgtatgacttggttcgacgtgcgtcaggagccctacgaaaaacacgcgaaacttactaggctcggactcgacaaatatctacgtaccgcgaaatgcgaagaaaaaataatcaaggaagtttttgatggaggtggcgttggtctacgttggtcttgtatggagctggaagtaaattcatggcgtcgttcagtggccgaaaattcaagcacgactcgctaatcaagagattgaggagcaagcgcaacatcgacgtcgaagtcgtggacgaaaagtacacttctcaagcttgctcttcgtgcaaactgccgaaactgcaacagcgagtttgatcgagacgctaacgctgcaaaaaacatactgataaaccatacaaggtctgccatctgcaggccaggatgttccacgagtggagcatcgtaaccttctagatattgtaactcgacgtcaataaggttcaattttgtacttgagctttgttgagggtgggatttaggagttaagttagttctaggcctctgtagataaatcactcaagatagactgtgattttataaaaccagattaaaagccaagccaatacctacacatggaaatctatccgaatgaggacctgaatacacttgttcggaaaagctaccaatacgaggacttgtttacatactgtgtgggaaaaacttccatccggggacatacgtgtgaagattaacacacaagtcctcgcaaggtactaaaaacattagtgatgtgtaaatgtggtgttaaaatttaaattgacgtcacacggatcggggtgtgagcatgaattttcgcgaccaaacagaggtccaccaaggtcgaaatgtttttcttattaaatactagctaccggccgcggctccgctcgcatgaatgtcgaacatattcccgggataaaaagtatcctatgtgttattccagactataatctacgtctgtgccaaatttcatcaagatccgttcagtagtttttgcgtgaaagagtgacaaacatccatcaatactaacaaactttcgcgtttataatattagtaggatattagaaaggctaaaataaaatggagaatacgatgaattcgtatccgtcatccgaggacgtatgaaaaagtcctcgaatgggccctgtgtattcaggtgcatgtcctcgcatggcacttaaaactaaaacaagcaaacacacacacgatagacacgttaaacttataacaccccgtcgtttttgcgtcgggggttaaaaaataagagaaaaacgtattcttgcggaacattacctgctacttgtttgtttgactgttttattatttagcccgaaaatgtatggatgctgaataatgtcctttgagctagaagaggttgatggagtatatgttggtaggtggactactcaattagttgtttttaccattccccacatcttgacatgatacactggtgtgtgaatatgtaagtaatatatcctatcgtaattattcacatttcacaaaaaagctttgaagattcacctttttttaatagtgtaattgttttaccaatagtaaaatataaattattatatcaataaataaacctttcaggttaaagagctatcatacaaagacttatcaatataatatgctgtatattttcagccacaacacttttataggtaaataaatacttcaaaatgaaaatggtttgtataaaaaaccataaataccaaaatagaaaagtgaaatagaaacaacaatggtgtttttttttgtgtccacattctcttgctagaacagtgcatgaggcgcagtggactgacgctccttatacaacaactcccaacaatggagtacaacacaacatcagaaaaacatgctagttcaagtgctcattccatttagttcataaaaacatagcatcaaacataatgaaataaacaaatgcagtttcaattatgaagatattttacaattcttaaaagttaaataaacgttaattctacagcttgtgttagatagctttcaaatcttctggtaggtcattcttaggatgcttgttctcgaaatgctgtttgtaggtcttagggtcaggcatctgcgcctgaaaccaaattacataatattctgtttgagtaggtattatagttttcattatagccacaagtttatcttagttacctactgcaaggttactacactttacttcagtactgcaataatagtacattttgatgcgagtggggaaagcgagcccttatggagtcaagaaactgcattgacaaatgcccacgtgcagcagactatttctcgaaatcttatttaacactatttcgctaaaaatttaaaaaaaatcatatacctacataaaacaatcataaaatgtagtaacaaattattgcgaaccaactctagtaccacaaacacttcatttcgtgccttaggtatatatgtcaccggaaaatggcaaccttcgtaatcataatatatcttgagagattgtaaactctcgatacaattgtcaactgaacatttggaatacttacctttttatgcatcaaaatttgatagtcttattatctctcgaagtaattccgagaaattgtggactgacataaaatggcagagagcaagtctacaatttatccattttagtgtgatagcaaaactggaaacaagcctctcataggtctattcagagaataaaagaccaatgaggggccaagtttccaatttaactatcacgccaacacaaataaactgtagaccagaaagctgattggtcgccagtttgtcagtccacaatttcttcgaacgcagggagatattatacaatagaacattgtgatttgaataattgcagggcaaatttccatttgacaatttattgagagttaacaatctctcaatatattttgtaatcttaggtagtttgcaattatccggtgacatttacatataagtggggtaaaaggcacttttttgtggtttaaaaaacgaccgagtctatgtaagatctgatgtctcgccttagtataaagcaacattaacattaaaagtaccaactgacagcgaccactgcgcactcatattggtcaaatcgaatagggcgcgatcattggtcaaatcaaatagcacgcgcttcctcggcttcctgttacacacttccatcccatttcttttcattatatctcgcactccgccaatcgctagaatattgcattgtaacctggggtggatcagcaaaaactcacatgctgaaattggaacatgctcaaagggcactcctgaaggctttggtttggtaacgttggcggttaccttaccgctttcctaccatcgaactctataaaacgtgtacagtcctctgtgttcgcaaattgttcatccttaaaccttgttttatccacacaccctcaaactccatacgctccttgcaaatttgactcagcgacgtaagcatacggtaacgttggcggttaccttaccgctttcctaccatcgaactctataaaacatgtacagtcctctctgttcgcaaattgttcatccttaaaccttgttttatccacacaccctcaaactccatacgctccttgcaaatttgactcagcgacgtaagcatactgtctgtccatccgcacaaattgtcgttcagcccgacgtagcttccctttcctcagtttccaagatatgtcgataagaatgatcattaaatttttaaatatataagtaccctatgtgcagatcaaaatgtaaaaaaactgcattggattatgctgagactgaaaatatactaaatgtttaaaaataattttgattaccggtaatattcatctactcaactaatcttagatcacgtttcaccttctcaaccacacactctcaggcaagtgggtgctcatacccggtgccctacatgggtgttggggtgaggacttatattgtactcatggacacagcatttcaaagacacgcacttctcctttttgttttgtatcataaatctctccctctcagtacttttacaattttgtagtatagaagtgcaacctaatattttaattctaagggtgtgagcctggagatctgtcatacaggtcccgaacccagtatagactccagcctttgtgagaacaaaggtttgaatctgcctgtaacttagatactatgtaccaaattgtacctttttgagaatattattatttcaagaaatcactcccacagattgcaggaaagtgagaggatcaataatattatcaagcatgtcatgttttaattggagtgctagtatgggacctactttctttaagaggacctttcacacggtcatccgatcccaaactaggcagagcctgtgatatggcaaccagacaactgtatcagttgtctggttggttactgttggtttatcaacatacttatatatttctaaaaacatacatattatagacaaattacacccagacacagaacaaatgaatccttgtgaattaaattagcctagttgaaactgtttttgtgcatttcattgggtgttctcaccttcgaaccttgaaatccctgttcaccttgtttggcagttcatcacaataacctttaaaatttgctcacatgcatgtccagctcagtaaatgtaatctcaatgtttatctttcattattttctttgacaataaaaatttacaaaagaaaacagaagttttcaggatcaactttagaagctcaccttctcaccaaatattgactcaaaataaagttagaaaatggaattccaatcatggaatccaacaatacccttcatgttcaaatacaccttcaacccatattttatcaatatantccttgtgaattaaattagcctagttgaaactgtttttgtgcatttcattgggtgttctcaccttcgaaccttgaaatccctgttcaccttgtttggcagttcatcacaataacctttaaaatttgctcacatgcatgtccagctcagtaaatgtaatctcaatgtttatctttcattattttctttgacaataaaaatttacaaaagaaaacagaagttttcaggatcaactttagaagctcaccttctcaccaaatattgactcaaaataaagttagaaaatggaattccaatcatggaatccaacaatacccttcatgttcaaatacaccttcaacccatattttatcaatatagcaccaatagcttccggagtaaagttcatacaacaagtggtcaccttgcaaacaacacacacatggacgagggctttctgcgcagctttcttctggtcattggcactatggccttgctgtttcttcattttggactgtttctctgcagcttttgcctgtgattgaagtttctgctgcccgcgtgccatccttcaatcctgaataatataatgagaaaagatttgttttttatttgtacccgactcaaaaactacaggaccaattttaaaaaaatcactagtggaatgctacattatccataagtaaataggatatgttttattttcaaactagcttttcccagtgcctttgtacaattgtacatggcatattctgttttttcccattcctgtaaagcattctccatgaaagtggcaatcatatacaaaaagatttttccaaatttgactggtatttcaagagattagtgcattcaaacaatgtcttcagctttacttcattatattagtataatattgatgataatacaataataatgtactagtttagggagaacacttcgatatctacaaaaagtaagtacgaaatccaagttgcgtgcgaaaagctagtcctgaattaaaaaacaagttgttctgaaaacactacctctttacacaattactcgtaggtaatcattactcctgttcagattataatatatactttgaactgctcatacatctacagcagaatataaataaattgaaagaatgtgtgatttcgatattgtttactatcttcatgtttacgtcgacatgataaacattacggcaaaaagaggttacttctttcaacgtccacgtaaaaagaaagggaattgagcaagatgtaactggaaaacagctcgaaataggaaaaaaaatatagaagcagatagcgcagattatagtacctacgaagtccaatttaatatgtgaataattaacatatttgcagtatcaatgccttaaaacaccataatgaaagctgtcttacctttaactttccaacgattccactgattttaactgtcttcaccaaaacggtattgttccgtagttaacacctatgtcaacaaataccgcaaaccaataatctaaccgaaaaaaagataaaatgccaacagagatactgaatggatgactgaaatatggattggctgaaaattttaatggttgatgaaagtgtgagctgagaatattgagaaaatgaatcaagcaagtaaattgaacacagataactatttgtaagataccacacatacacttctaggaagagtggtaaataaagccggattcacatttactttagtttaggttcgagctagttagttgatttttaaggcgtgtgtaaataaagggaacgtgcacaacgaaggatctactatctggtgacgcaaatccgaattattaatgcaaattttacttcactttgacacttcacgttataaaataatcataaggtgaaaaaaaaaattaactaagtgaaaatgtattgttgcatttccacttcattgaaaagaaaaataactgatatggtgaaaaattccattactttcctacaaatagtactaattttacatggttatgtgacaaacgacaaaagtggataagtgcagtaaaaaaatatatacatgacataatttttgtggttttagcctacactgtcccacagttgggcaaaggcctcccccaagaccttcgaagtattcttttcctgcgccacctcgcatattataattatttatttatattacataattttaaaattacgtgtgtgtatgagtttcaaaaacatttacaaataaataataatgttatttgtttttaccagtaaattttcagccaatccatatttcatccatccatccagtccctatgtcggcattttatctttttttcggatagattattagtttggtgttgacatgaaacaatcgctaaaggtgcgctagaaaaggcttttaagtagtcttttatcaggcggaaataaggagcgtgtcttttacagttggctcatgtgggtattgatgtactctgtcgacatactcaaatggactcaaaccgaactcaacgccctggattggagggtccgtacactgctgaccgcaattaggatgccacccatgatcatcggtcatgcatgacttgatgagactgtacatcccgcggaagtatggaggtcgaggccttttaaaggctaagactccccgtctttgcctttgcaccaaaatatgatcgcagtggacaaggactgaacccgttgtccgggctacttatatataatacttactacagatattgcaaggagatatggaaaggaaaggagctttacgggtgcttctaccgggcgatgcagaattcccggagtccgtatcctggctacgttttggcgacctctttggagaaactgatggttttgtctttgcgattatggacgaagttatcctgacgaataactaccggaggcacattggcgatgcaaagaagacgcgcgaaaattcaaaaattcttcaatttggggacaaaaatctactgcaaatagcttcatttttttgaccgaccgaccttaacaattcaaaagtgcctgtaaatggttttgaattaatgccttgagttttgagttgagctgagttttttttgagttttactgattccccacaaaatctcctcaatttttttttaggaaatgaaaccaattacatcaaatttggtaagatttatattccttttaaacacctttaaatttctttttactctcccatatttttgtgaccaaccttgttgccattatcctatttttctgtaaaaagataaatttatatgggttccggcgatcgtcagtgtggccagaatatatcaaaaggccaaaaattcttcgatccgggcatgtcttaaaagtagaaggaatatgaaaatgcggttataacttgctaaattgtagctcaaacgaaggtttctaacgtttatagtgttaaaaacaattgctaagattttttttaactcatatttcacgtaaatatattgtctattatttatgttgactaaaactacataatttgaggtcattaaaatagtattactacatacaaaacttagcttcttttccatataacattttcaaaaaggtttttgaaacaacaacaaacaaccagggaaagcgagttctatttgaaggaaggttatagaattttacaccatttcagtttttctatgaagtgttcgagacgtttgagtatccagaaacgcaacaatacattttcagttagttcaatgttagttgtcaaacattgtttgcgtaaatgagctttcatcgtacacgttcaacatcaccaaagagtaatataatatatggagtgaacaccactttgatccaccaaatataaaatatgtcaaacataatataaagcacattatacgacatgcatcatctcgttagtcaccagtcgtgcacaatcacctgcaccatctaagattttagcaaggcaaaaactatggtgggcgccagataaattttcaataaagttcaatactcaatactttatttgcattccacttattatgtgttctaaggtggaaaatttaaaaaagaaattgtgtacattatggattcatggttcattgccctttccttaatgtctccgcgtaggtaccggacaatcaattatgaatcgcctttctttactagaaaaagtaacggattatgatagatgtcagttttcggaattagctatgtcaataaatgtatgagggtcaatgaccgttattgcacgtttatctggtgtcgaccatactatttgccagtttgaagcagctgttgagcaaactggtcgaacaacatataatttgagttaaccgtgaacaaaagatgagattatgatgaagtgttacgcaattggggtgcttaactgcactttgccgccgtatttcatttgagaaaagtcattgagatatatatatgatagtaatgaatatgtctatgtgaaaagtacaaaaatctcgtccattcattccagtaaataaatatttactaaatccgtgctcaaatagaatcatagacagattgtttctaactttctatattgccaccaaaagtcaaaatcacgaagctgtcaccctcctgtcactgtccaaaatatgtaaacaatttaaataacctcaaatcaaaataattcgtaggttttattattttagtaagctatattcatatatttttacgtaaggttctgggggcatatattgcgtaactgtatatcctcttgagtaagtataacatagacgaaaacagtttgttttgtcggttgccttatggccatcgtattactcgtccgttaatattatgggtttgcagcattgataaaattaaataatgttttgcacatgcactgaattagactaaaaatacgatttatattactgtggacgaaattatataggtaatctagatcaatgcagcgtatcactcgggttttctgtgccgtctgctcaccgcgggccttagcgaggacacgttcgaaggggtcacaagcaaacgg

SEQ ID NO: 148 - DNA, 20723 bp, unidentified
  variation 14267..15118: note = n is any nucleotide
  variation 858..1269: note = n is any nucleotide
  variation 2787..3411: note = n is any nucleotide
  misc_feature 1..20723: note = Fanzor polypeptide
  variation 16927: note = n is any nucleotide
  source 1..20723: mol_type = other DNA
ttcagttctgcttctgactaattattgaagaaagctttacccacatttctgagatttttcattgattactatttaatgaggcattgaaacattcaagtgttataacttatctttacttttcacagaggaattacgtgaccacttcagtgcatatggtgagattgaaagcatcaatgtcaagactgatccgaatactggccgatccagaggatttgccttcatcgttttcaaggcaccagattccatagacaaagtgatggccgccggagagcacacaattaacaacaaaaaagtggatcctaagaaggcaaaggcgagacatggaaaaatatttgttggcgggctcagcagtgaaatatcagatgatgaaatcaaaaacttcttcagtaattttggaaccgtaagttcaccttgaattgtttcaacagcttgattatttaaaataatgtgatgacaaatccggatttggtgagataatttcttcttgacatttactgaagaggaaaccgggccactgataataattataacatgaattagtgttgttgtgaagttgccaatttcagaaactaatctaacttcttcttgcagatcattgaagtcgagatgcctttcgacaaaactaagaaccagaggaagggattctgcttcataacattcgaatccgagcaggtggtcaatgagctgctcaagacacccaagcagacgatcgccggcaaggaggtcagtatggcatgtaggcagcagcaggaagccccagcggagcgggtgcagtgggcggctagtacatgaggtgtgttgcaggtggacgtgaagcgcgccactcccaagccggacgggcccggcggcctgggcggnnnnnnnnnnnnnnnnnnnnnnnnnnnnnnnnnnnnnnnnnnnnnnnnnnnnnnnnnnnnnnnnnnnnnnnnnnnnnnnnnnnnnnnnnnnnnnnnnnnnnnnnnnnnnnnnnnnnnnnnnnnnnnnnnnnnnnnnnnnnnnnnnnnnnnnnnnnnnnnnnnnnnnnnnnnnnnnnnnnnnnnnnnnnnnnnnnnnnnnnnnnnnnnnnnnnnnnnnnnnnnnnnnnnnnnnnnnnnnnnnnnnnnnnnnnnnnnnnnnnnnnnnnnnnnnnnnnnnnnnnnnnnnnnnnnnnnnnnnnnnnnnnnnnnnnnnnnnnnnnnnnnnnnnnnnnnnnnnnnnnnnnnnnnnnnnnnnnnnnnnnnnnnnnnnnnnnnnnnnnnnnnnnnnnnnnnnnnnnnnnnnnnnnnnnnngatacggctacggcggctacggatacgacggctacgggggctacggcggttacgattactccggatatcccaattacggtaaacgcggcaagcagtactagtatagtggcgagcccccgctagcccgctcaccgacacattacctcgactgatgttacctgatcctaggatacgaagtgcacgtagtagagtaaggcgctaggttagcgttgcgagcgaggcgcgactccgtcctcgagatatgcctatttacattatagtgaacgattatttaacgaggagaacgacatcacgcgaagcttaggtatttaatttagtgtgtaggaaaatatttatttttctatatatttaatgttctatcgagataatgtgtagtgaatgttgtcgaggcgacagtgtataatctgaatataatcgcagctctgtctaaattttgaaaaactaggattaatcatctcatataactttgctaaaatcatattaagttgcatattttgtttatttccacgaggagccgcttcgcgtattctcgtgcgtagatcgtagtgcagttgcccattcggctatcgctctttatcattgtttcaacgggtataaactatattctgtacatatgtatgttacctgccttatgtttataagcgttcgtttgtaataccacttttgacatatgtagcaatgttgctcgagtttctttaatttttttggtaataattttacctttcgacgctctcgccacatgctacatctgggaaatggggtaaatatggagagacattgtgaaagtgataaagatatgatgaagcttttgaataaagcactgttacaaaaattctcaatgtgtttccatatgtaaccctagtccacttccctgccctgtctgactcaccacacgcttcatactttacacttatcaagattttttactaattgcatgcatatatattgcataactacaaaattacatacgagtcttacactgtacctacataagaaagtttattaataaaaactttgaaagaacaccaagtataccatgagagaatgaattcccctcaggtaataaacattatatactagctaatatgaagttgcctatgaatggtttgcatcgcggtggttgtgcacgcgtcctcacaacgcgctcgcacctcgcagactcgtgtgctgcggcacctctgggtagatcctaaatcgtctcgtttatgtaggtaggtactcaaccaataccgttcgtaggtacgtcctggtaggaaacaggttgtcatctgtcagccatccctagatattgtaatcttggaacgctgctacggaccgctcagtagtgcccagtccctccccggcccacacgtagcgcgagacgatttacgagctacccctccgcccggccccctgcgggtcccgggcggccgaccgtacaataatgagtatacgtcgaccagtctccgcgacgtccaccgttccggccacgagcacgcgctgcggcgcgccggcgggcggagcggtggcggcggactnnnnnnnnnnnnnnnnnnnnnnnnnnnnnnnnnnnnnnnnnnnnnnnnnnnnnnnnnnnnnnnnnnnnnnnnnnnnnnnnnnnnnnnnnnnnnnnnnnnnnnnnnnnnnnnnnnnnnnnnnnnnnnnnnnnnnnnnnnnnnnnnnnnnnnnnnnnnnnnnnnnnnnnnnnnnnnnnnnnnnnnnnnnnnnnnnnnnnnnnnnnnnnnnnnnnnnnnnnnnnnnnnnnnnnnnnnnnnnnnnnnnnnnnnnnnnnnnnnnnnnnnnnnnnnnnnnnnnnnnnnnnnnnnnnnnnnnnnnnnnnnnnnnnnnnnnnnnnnnnnnnnnnnnnnnnnnnnnnnnnnnnnnnnnnnnnnnnnnnnnnnnnnnnnnnnnnnnnnnnnnnnnnnnnnnnnnnnnnnnnnnnnnnnnnnnnnnnnnnnnnnnnnnnnnnnnnnnnnnnnnnnnnnnnnnnnnnnnnnnnnnnnnnnnnnnnnnnnnnnnnnnnnnnnnnnnnnnnnnnnnnnnnnnnnnnnnnnnnnnnnnnnnnnnnnnnnnnnnnnnnnnnnnnnnnnnnnnnnnnnnnnnnnnnnnnnnnnnnnnnnnnnnnnnnnnnnnnnnnnnnnnnnnnnnnnnnnnnnnnnnnnncggtggcggcggactaatgtgtttgtgttgcgggcagactacggcgggtacggagggtacgagggcgggtacggcgcgcgcgcggctccgcgcggcaaaggtactgcactctgccaccttgcgctgcctccatgcttttgccgacttatgcccgtcgattcgagccgagtagcgggaaggggagagttaggccgctcgtacactacaatactttgcgttttgcaaatggtccgacggcactattttcaagcaaatatctcatcatccaacaaatgtatggatatttcacatctgaacagttacactcgtagtgcacgagcggccttaaatttcaattttggctaggctggcttcgacgaagcttgttcctgttcgatcggctgactgacattccatgttctcccacagtcatctcgtcatagtcgatctcgaagcttgtgtttgcgtcgattagtcaagtctcaactggtttttcttagtaaagcagagtttgtcgcggctagacaaaaggcatttgatatagtctgcaagagcatggagggagcatgactagctcgctgtagtgtagtgtgacgtctgtgtcgtgaggccgggggacgccggcgcggggactgcgctggcggctcgcatgacacttaactcgctatcttttgcttactaagtaccgtcgtaattgacatcaaaactgcggaaaaatacataattaataaccttattcatcactggcaaaattaactatttctaattttctaaaacgtttatggcctttttcaccacctccggacgagcgtcggttctccaattgtgttcatattaaaataaataaatttacataccccccggatactgaaataggccgttagtattatcgattggctatccagaggtgcatccgctcttatctgtcgtcacgtttgttctgaatatagacccgtgtaggtgtcgtgcgaccgagacgcctcacgtgtcttgcatccaagttagcattcgtgtaaatttatcaacttttaaccattcccaataaagtattgtcggcgtctgtgtatcattgcatgtgaggtttaattaaatagtgatagtaaataataacatttttttcctacccaacagcttgtgacaaataatctagaaccaaataaataagagtttagcgttacaaacaggtgacgttacagccgggtaccaaggcggcaagcaacgcggaggcggcggcggcggccgtgccaaccagaggcaccagccctattaactgtacctgccgatagtcatctcagtccaatagtgaggtgagcagtcttggacatcacgctagagctgatcatatatattttctaacactgatcacgtgccttagtcgaatgctatctaggagtccttttgatgcaacaaaatgtttctttctgtgatttttattggatctgtaactaatttagctgttatagtttaaagctagatgtgaaccctttgtaaaacgcagcttgttgtccgcaggttaagtcaccggtcatgagtgtcccctgcgcttctcgcctcgccgcgctgggggcacgtcatttcattccacataattaatttaaggaagtaattgataacattttaagaagattttttaagggtaaaatactgtcagttgcgatatagccgcgttcgtacggctctagcgtaaatttattataatatagtatggattatagattcactgagtattattgcagattgattagattcgtttctgaaatttgtctcgaaattttaccttacgaactgaacactagaaataatgagtaaatataattacagagcttataaaatttgtaacgatgtccctgtacgccggcgagtcgtgttggacgtgttgcgtgtgagtgatggtgtgtgtgtgtgtacgtgtcgtagagtcgccctcatctgtcacagttgttgatctggatctcattgcagaaatgtagttttgtactttaatttggtaaaggatcgagcaatcagaatcatgtattttatacaaattagatgtttcttccattgattagggatgaaattaaatttttagactaagtaatcggtcatgaacaaactggagatataccaagttgtgtatgtcagaataaaacaaatgtgtaaataaaatattgactttttgtctgtgtttatgtcactgagcgtttcatccgctatgtgcacactctcgcgtgcgagcagcagcacatctgatgtttagagaacatctaaatgttgatatttttagaagtacatgtaatgatataatttcttgtcatgtaatatacattaccatcaaataggtctaaaactcttgactggaattagttttattgttgtttcctattttacatcaccattatattttcgtaaaacaccaaatccatgaaggtatactgacacacaagcataccttaccttagtcttacttaccttacctagtgacctgctaaagaataattaattaaatgagtaggtacctactcagatatcttcataacaaaacaaagcagcgctgcaggcgcactgatgtcgtgtgcgattcattttcagttgcgtgcttagactgtttgtacgcattgtgacaaactgtgattttagtgtacattattacggtattaatgtaaccggaaaattgtaaacgccgtaacataaaattgctaactattttttcttaagacacgaagacattggaaactattgaatttggatgggattcattgtaaacaaaacgattttgcataatatatctagaaattaataacgatttattacaatcaaatcggcaattttccggtgacatatacaaaacgatttttctaaaatacactcgcgagcaaaagtatggaatcacttacttgaaattggttccgcgcgatcttgagtagtaaataatttgttaataataataaaaatggcaccattttaaaggtttaactgttaactttaaattgataccaaattcattcaaatcacgctagtatttaagaagctatcccggattacgtgccgaagtaaggaaaaagatatgttttaattgtttgatacgtcacgacttgcggcctatagaccccctataaaagcacgtgttatcggattttctttatcagtcggctttcacacgttgaccggtacacatctccgctacttgtgacccttgaacttggacgacaatggatactacacctacagaagcagcacaaatcgttgccctattgcaagaagggctcagccagcgggctgtcgcacgtcagctccacataagccagtcctgtgtttcgaaagtttataaacgctttcgggagactggtggctttatcccgagaccaagatctggacggcgccggtgcacatcggagagggatgaccgttttatcgtgtcaacctctctccgaaatcgacatttgactggtgtcgacgtccaacaggagctcagaaatgttcgtggggtagctgccagcgagtggacagttcgtcgaagactgaagcaagctaatttgactccaaaaaggcctgccacaggcccgaaattgacggcaggtcatcgacaagcacgccttcaatttgctcgctcccatcttgattgggaggttgagcaatggaggcgagtcctgttctccgacgagtgcagaatgtgtttacacggcagcgaccgaaggggtcgggtctacagacggcctggggagcgatatgcgcagtgctgtttcgctgagacagtggcttatgggggcggttcttgtatgatgtgggccggcatttctttcgacggtaaaacggagcttgttttcgtgcctggcgggggacgaggaggtggtctaacttcagaccgctacatttccgatattctgctggaacatgtcgttccttatgcgggatatatcggtgctgacttcctccttatgcacgataacgctcgttgtcacacttcccgtgccacaactgaatacctcgaagaagtcggtatcgccacattggactggccagcgctcagcccggacttgaatcccattgagcacgtgtgggatgaactgaagaggagggttcgttccagaaatcctgctccttcaagtgtgaatgagctgaaatcggtattgattgaggagtgggagggtatcccgcaagaatcgattcagaagctgattaggtcaatgaagaaccgtcttcgagcagttattagggcgaggggagggaacacaaaatattgaaactcaattttaaggccaaataaattttttattaattaatttttgttgttttcttcttttataatttttccattatccttatgttttcctaactccttcacttaatctgggatagctccttgaataccggtgggatttaaatgaatttggtatcaatttaaagttaacagtttaacctttaaaatggtaccatttttattattcttaactagttattaagtactcaagatcgcgcggaatcaattccaagtaagtgattccatacttttgctcgcaagtgtatatctaggaattatgatgtacctacttaactacctaggtaccgacataggtacctagtctagatcaggtaggtacctaatgagaattaaaacgggaactgtatagaacaaactgccgacttgactgcttgacataggcaatactcacatcgctcttcgatcgctacgaacaaaccaaaaaagcttttctaatatagctagctctcgacctaaagattactaggagccacctagtttatgagactgacgcgacgcttcctcacttatggaaacaagcaaaataaacagtaggtaggtaatgaattaccgtcaatcgtctgccagaaaaagtacctacctagatgtaaagatccttgtctctgtaacttctgaacttgtcgctagatggcatcgggtcggtgttaaataaggagcgtcttcatgtggcagcgcagaagagaaagtacttacctacttacctatctacctacctatttatacggaaaaagttctaaatttgcaaccctagatggcggtcttgcggaatttgttcaagagtcatcgcggccctggaaacgcaaagggcactataggaggtacacatgggtttttgtcagtcagagtgacactcccttccgcttagcccagagcgaaaaaagttatttgatgattcccacgttaaaaataacggcgtcttcgccgtgctcgttctaaaggagcgtcaagcgcaaacgcatgcgtctgtgtattagctagcgccttgcggcattgcagcacgttgttacctcagatttgtccacggcattttgatgcctcccatgtggaggcatcaaaatgccgtttctcaaatcgaaaagtaggtaacaataatatttcaaccatatttttgtttataatatggaagtatgtaggtactgtattctttttttgtaatgttcatcgttatttattttcaagtaaaaattgtgcagatatttttacttgtgaataacgatgaaaattatatgaaaataacactacattgaggtttgattttcgatactcaactcactaaccttaattaggtcgtggccacccgttttaattataagacgccttctcactgttggatgaagaagttttgtattaccgggtaaaatggcgtggatagaaatgcaggggtgaataaaaacgaaactttgattggaagtttgcagcaatgaggaactccaattattttatatttaaatggacgctttgtgagaaacaattaatatggcattaatgtgaaaatcccaataaaagtttcgtttttattcacccctgcatttctattcaccccgttttactaccagcatctctgattcatctgctagaaaagacatctgttgttaagatccctatctcagtaacttttcgctagatggcataatgccaaaagagtcaccgcggctggaacgcaaggggctttagaagaaacacggatcggatgggttttagtcagtaagagtgtgacacgcccttccgctccacccagagcggaagaagtcatttgatgatgtcccatacaaaaaaacccatttggataaattatatttatttttgtagataggttaaaataacatttgtacaccacattttttcttggtaatttttaactaggtgaggccggtgtttcctagctgactgccctgagaagaaacatcgaaacaaaactcagaagattgagtgccgcaaacgcatgcgtctgtgaattggtattgacctagcgtttcgcggcaaggcagtagggaacatgcacgaaagatggcagcacaagtcgacacgagagccagtgtggttaaaaaaaataaacttttcaatactgtcataaatagttacttactctgtgactgtcatcgtgttgccgtcaatcttcacattatattcgaatcttcttcttcaccatgtctttgacctgcaagacgtgtggtggttctgatcatacgagaaaaagttcaaaaaagtgcaaggaatatttaccaccgattcgaaagaggcatttgagtgatgccggagccgaacttgagatatacacggtcaagcgaggactcgtttcctctctctgcccactcttggaatctgagaaaaaactcaagcttttgacagagattcgtcgtgatgtgcgagatctgtctcgagtctacatcgaacttggcgtttggctcaatttctacatacatgaaaacagcgacccaactgccctcgaagccagatgtgctaaatttcatctacgcaatgaaaggaaaaggcccctatgccgacgcgtatcgtgttatgtttggtgatagaaaatatgacgatagacttcgttcgtttgtggtccaagagatggccaagcagtacgagacagtgttacatacgaatattagcacgcacgcatacgctagacttgctcattatttcaacgtaaagcgaaacgctccagctctctatgctgcgtttttcaagaaagacttgcccgaggacaacgaagagatgcgtcgcgtatgcactatcatcaacgtggacactgttgggggcgccaagtggtggtctaagatacacgaatggctcaagattcaggcgaaactagaagacttcaagttctttcctcagccctcgcatggactcaagcacctcacatacacgtctaggggttggcacgaattgctgcgtcgcgtagatccaaaatctattacgagctactggacgcgtatcgtagatcataggcgagaactctggtcgccgtggttagacgtagatatgaaaaagttcgggtgtagtcttcaaactgatggcatcagtgttagcctatccatgaatcgaataaaaaaaaatcaaatcctataaaacgcccgaagaaaacgtatgatcgcgtcatcgcagtggaccccggctctcggatcccagttgccgcagtagaatctaaacgatttcagtttaggcgcatcactaaaaagtatgtgaagtcacatactctcgagtggaagcgcgaacgaattcgaaacaaactgtgtcgagtcagcgaggaagctgaacaaaaggatcgagaaaaactaacctttccagtttcatcaaaaaacacgattcatgtcgtagagtataccgttttccgtatgacttggttcgacgtgcgtcaggagccctacgaaaaacacgcgaaactgactaggctcggactcgacaaatatctacgtaccgcgaaatgcgaagaaaaaataatcaaggaagtttttgatggaggtggcgtcgaatctacgttggtcttgtatggagctggaagtaaattcatgaatacggcgtcgttcagtggccgaaaattcaagcacgactcgctaatcaagagattgaggagcaagcgcaacatcgacgtcgaaatcgtggacgaaaagtacacttctcaagcttgctcttcgtgctacgcaaaaactggagagtttcagaagatcgtcatgaatcataggctacgctggggattttgccgaaactgcaacagcgagtttgatcgagacgctaacgctgcaaaaaacatactgataaaccatacaaggtctgccatctgcaggccaggatgttccacgagtggagcatcgtaaccttctagatattgtaactcgacgtcaataaggttcaattttgtacttgagctttgtcgaggttgggatttaggaggttattacccacttcaaaaaaaggaggaggttctcaattcgtcggaaccttttctactttgttttacatgttccccgattacctactcaaagatggctggaccgattagatttttttgttgtttgaaagggtatacttcccaggtggacccatgatcatcaatacaggatctgatgatgggaacctggagaaatagagagaactctttcaattttataggcacaagagtactttctcggagtggtcccatttcaatttggtaaagatctgatgaagaacttcggagataggcaacggaactcctcaataaatgatagcaaatggactgggattgctgaaatttcatgtttacaccagttcataacataacattacgccggcacgctgtgaagggcctaccccttcacagcgtgccggcgtaatacatgtaaagcactaaaaagtgaaaaaaaaaactttttacaaaaaaaatacaaccgacttccaaataactatacttgagttgttcaagttacttctatctctgtttgatgggcaaaagaaaacctatcctattcgaggcggggttttaaaaatgcaccccccttaaaatagacctgccggcgcccatgactggggtcaccactggccagatgtactttttctcattggccgcccatgcatgtctgctgtctttcacgcatgtgtgtgacttagcaaatagtttagttttgttttattttatttacatttctgttctctacagctattagtacaaacattgacactgtcttcacttgtttcgtttgtgaatattttataaacagaatccatttggctgaacccttttaagatacaggctagtcctagtttaaaagatagagactactattgcatcatattgtaaatattattttattcaaacaatgtatacatacagtgcaaagtgctatgtttttgtgaaataaatactcttacttacttatgtacttatatattttctgaaacttaaatggtgcagggagtatattctcgtttttcagaaagtgcgagcacaggaagcggatctgtcagagccccgatgatgcaactaaaaatgagatggacttcataatgtcgtcgaagaagcaaatattcagtgatgtgtctgtgattaatgtggtaaaaaccggaagcgatcacggcatggtaagaggcacattaaatttaaatatcaatgtcttgactgatgaaatctacgctctgtacagcacagatctaaacacaaagctctgagagtttgtagctcgaactgcagaatcgtttcgagtgcctagcgagctcagagcacagatacaacaatcggttcgtggcaactgtccatacagtcgggtcaacgtcttcaagacccgtcgtgcaaataagaccaattgactctctgatcctaaacagggtcattaaaacggacagtagtggcatattatgtgtaaatccgcgattatttgtggagattttaatattattattttagaaaataattcaaatagcagcagatttttaagcctttttaaatcgttcaatttgtctaatgtttttactgaacctactagggtaacaccaacttcttcaacctgtatcgataaggtattgtgcgattgtgagagtttccgtggagtttcttgcacgttcttctccatagagatctacgctttgcaacgtgcaaatagcttcatgtttttggcggactgactttgacaattcaaaagtacctgataatggtttacttgaaataaatgctttgactttgactttgaagagctctgccgagcatggatgccgtgcatacccctcaacaacttttttactagttagaaagaacgtgggcggcaattcctcaaagtgattttgatgaacagattaccaaatcactgtgggatacaattagggatacgttgctaataggaattaaagtaagaagccagcctggaacactagatttgataaaaaataattagataactttttatagttaaaaatgtacttcatccctcgacacttttgacgtgtttattttaaagcgtctaaataaaccattatcaggtagaagtacctgataatggtttatttgaaataaatgctttgactttgactttgaatatggatcgtaaaaaaaaggggtaacccagtactcgggttgtgaccaggacgtgtgcttctttcgattgtcttggagcgccattttcttttcgttacccaagtaggtacttgagcatcgggtagtttccaacaatattcgggtttttcctgggaatttccttagagacttgttgatttcataacgtcatcgccaagtgttccgacgtgatgtgacctgtacaagccctctagtgtcgataacggcgcagttgttatcagatgaagtgcgactgagtcaggggcactcgaggcgctccataagtatggacgccagccggagcccggcacagtgctgttcaagtcgacaacatgttcaaactactggtactgagttgtctgctggtcagctgcctcgctgaccccttcggccttccatcttggtgagttatataacttattgctattgttcttcagtcatttgaagaaactacttgacagtcacatacgccgttcatcgtaacggttactgccgagtcagttgtgcagcactttcatttattgttatcctttaatcgtacctatgccagagtagttctaaggatacataacggaggatacaaaaaggcgagctgaacacagaattttgcgcagtagtggtcgttcactatttgtcttatgtgtttgttggtaggcagctacttcttatgatcatttgtttctacgagtatttgcgtgttaaggcacacctttgggcttttaatgctcgtgctgagccgaagatcagtttcctcgtcaaagcacttgaacctccccccacgttcacgtccagcagagtattaacaaaaacaaaatgaatgagtacttagtgggaagtagaacgtttgacagtccgcaaagtgtgtctgatatcggggcacacttttgggctggtgtgtcgatgtgctgtgaaacttttcatccctcatcaaccagcaatacgattacagtnnnnnnnnnnnnnnnnnnnnnnnnnnnnnnnnnnnnnnnnnnnnnnnnnnnnnnnnnnnnnnnnnnnnnnnnnnnnnnnnnnnnnnnnnnnnnnnnnnnnnnnnnnnnnnnnnnnnnnnnnnnnnnnnnnnnnnnnnnnnnnnnnnnnnnnnnnnnnnnnnnnnnnnnnnnnnnnnnnnnnnnnnnnnnnnnnnnnnnnnnnnnnnnnnnnnnnnnnnnnnnnnnnnnnnnnnnnnnnnnnnnnnnnnnnnnnnnnnnnnnnnnnnnnnnnnnnnnnnnnnnnnnnnnnnnnnnnnnnnnnnnnnnnnnnnnnnnnnnnnnnnnnnnnnnnnnnnnnnnnnnnnnnnnnnnnnnnnnnnnnnnnnnnnnnnnnnnnnnnnnnnnnnnnnnnnnnnnnnnnnnnnnnnnnnnnnnnnnnnnnnnnnnnnnnnnnnnnnnnnnnnnnnnnnnnnnnnnnnnnnnnnnnnnnnnnnnnnnnnnnnnnnnnnnnnngcccgccccgcgacggcgcctcctcgccctaccctaccacacctgacgcggaagcttcagtttcagttaatgatccttcttcaacacccccggaacctagcgctgatccttctacatcggaagctcctcttccatctgaagtgccttcaactacaagcagttacagttggtgggatgactgggcttggggtcgtagataatgctgacatgtcataactggcatagcatttcctacttatatatttgttggttctttagctgcaaaattattccaatttctaatctgaaccaaatgattgaatgaaataacaacatttttttagaaaaaattctactgtatgatgataaaatccttaaaatccgagttttaacacgcttttggatgtacttgtaaaagttcaaaactattgtaagcaaaaactttgataaataaaattttgtttcaataatgtttgtattctttatttgattcttttgaacacgatgtagattatagacgtggacagaatagacatttgtcacagacaaaaacagtgacagggctacgggttcagggtttagggctcggcagggctcggagctcagcagggctgcgcgctcgccgtcgcgtatagtatggacaacgcgttgcagagcgcgcggtagttcacctgtgcaggaaacaacacgagaccgttagttagctgttatgctgggcttgtaggtattgtaatatgttaggggttagcgtgctgtgtcatccacgcccccagagaagattcgctaccgacgcactgagctcgaggatgtggctgcggctgtcaagaggcttgaatgtcttatcaacagcgcttaactttatatattataagaatatataaagttactaataatttctaaatacggtattgaaattacggtatgttttagagtttttctcgctttattagcttaacattaattgtggtcaaactttgaagctctctctaagttttctggacctattttttttttctaagggtgggaaatcatcaaatgacttcttgcgctttaggtggagcggaagggcgtgtcagactcttcctccgcaaacacttcacaatcaggtttagccaccaagcgagcattgagcgtggagagtgtgtgaaaaaagatcatccgcatagaatagactttttgacaactgacggaaggtcgttcgttgtacagtattaaaaacagaagtggtcccagaattgatccttgactgactccggaacgcgtaaggtaacacttgaatttgctgacgatcgctgaggtagtcagcgagcagccgcagacgacctggtggtaaaccggtagcgcatagcttcgcaaaaagaatatcattgttgaccctatcaaacgccttccggaagacaaattacaagacattaacctggcctctatggccttgaggtttaaatatgtagttttttttttctttgataccattttgctcctcgcactgatacttttcattcaaactcaaactcaaagcatttatttcaattagaccatttacaggcacttttgaattatcaaggtcggtcggtcaaaaagatgaagctatttgcgcgttccaaaacgtagatctctatggagaagaacgtgcacacatccttcacggtcactctttcaaatataatatctatttcattacaaagtaatggttacatcattaatgttgaaattaaacatatatgtgagaacgatgtaaaagacgtgaagaataaaagcgtccgaagaaaaaagaaacaattaaaataaaccgtggcagcccagaaattacctgtctcagctgacggcggngcagcccagaaatcacctgtctcagctgacggcggccgttcacgaacatgacgcatgcgctagcaccattcggctcaaccattttaaagggagccaaatgagccaacgcatgcaccaccatcagacagacttttgagtgagcatgacactcccaaccgccagagtacattcaagtcgaagacacccaaaactgatagttaaagtttaagtttaaggtaaactgtactcacgcatgtcccgttaatgcatgaaattatacaatgttaaataaattgagtctttataaagaaaatattgcgttcttacaatcttcagccggtccaacaatgtgctataacagattactttgtgggccctagtggctgtggagcaagaccagcattgagccaagcatttttatcttcaatataatcccccacctgcttgcctgcatagtgtgcgtttaatacaagatttaaattttgtctcaattagttccaatatatggggaggtattttattataaaattttaaacaaaaccccatgaaagatgaggctactttagctagtctgaaacttggttgaactgattggtccctatttctagtaccataattatgtctgtcgcctcttttactaaaaagaattctttctgacttatatgatgttttcgtaaatgtattgacaaggtaccgtcatgatgttcatattcttaaacagtttccttagagaatcacgcagccggagattgtatatggctttgatggctcttttctgcaggataaaaatagactcgatgtctgcagcccgtccccattgtaaaataccgtaagacatgatactatgaaagtagctaaagtagacttgtctcgcggtatcaacatcggtaaattggtagatttttttatcagcatatgctgctgaacttagccgtcctgcaggagatgctaaatgaggaccccattgcagcctagagtcaagcgtaattcccaggaaaaccgttctatcgacgaattcgactttctccccgttcaacactatgtcacaatcactacttttgacgtttggtaaggcaaatcttatgcacttcgtttttttcccatttaaaaccaaattataagcagtgaaccaattttggacctgcagaagggcgttattttgtaataaatatgttatacgttttcaaaaactttagctttagaatgaaggccttgacattttccattgttatgtgtgtgtgtgtgagtgcggtacctcctcgccgcagccacgctggtagccgaagcacttgtaaacgaggtcgcgctcgcgcgccgacaccagcgccagcaggttgcgctggcacagtgcgcgctccaccgacacgcgcggaatcgtgccgcacttctccttatccatgtcctgtacaagacaccaaatgttttaagaaacaaaaaattacactaagatgaaataatttcaaaaacagtgtcattaaaggttattaaatgagcagaacgtagcatttctaatattagtatgaggaacagttaggaaacgtggtggaaacaggaaaaagacaatatggcttggtttccaaaaccggctcacctcgaacacctccattatattggatagctggtcagggaacttggagagcttcttgagcgcgccggagacgatgttcctctcctcgaagttgaggaagttgagcggcgagtcgagcgtgggcacgtgcggcacgggcgccagcagcggtgcgcgctccagccccgtctgcgtcagcgcctcgcccaccgtgttgcagaagcgctcgtactccacgtagcgccgccgcgccggcgcgcagaacctgctcgcacacgcgaaataaacacgtcaaaagtgtcgagggatgaagtacatttttaactataaaaatttatctaattattatttatcaaatctagtgttcctggctggcttcttactttaattcctataacgtatccctaattgtatcccacagtgatttggtaatctgttcatcaaaatcactttgaggaattgccgcccacgttctttctaactagtaaaaaagttgttgaggggtatgcacggcatccatactcggcagagctcttcaaagtcaaagtcaaagcatttatttcaagtaaaccattatcagtacttttgaattgtcaaagtcagtccgccaaaaacatgaagctatttgcacgttccaaagcgtagatctctatggagaagaacgtgcaagaaactccacggacactcttttaaatcattttatgattacaaaaattctggttacataaaccttgttgcttctatatatgacaacaatgtaaagaaagaaaacacaatttatagtatcaaatattaaaattagccagtagcaactaagggatgaccagtctctactgacggcgcccgttcacgaacatgacgcttgcatcagcaccattcagctcaaccattttgatggaaactgaatgatccgatacacgcgccaccatcagcgagacattggagtgagcatgacacaccctcaactgcccctgctatttcatgtcaaacaaggaaactatctattaacataatggtccacggccctcacatttacagaacttgaaattaaaattgcttctacattgtataaaactatgaacatcaatctgaaaagacacaaaaacaaaagtttgttccaaacataatataagattatgtggaatagtattattattagacataaaagagggtgagcatctcttccaaatataaaacctaactagtggaactaagcggccgcggctgtggagcaggaccggcatttagccaagcatttttatcaaggatatacctaatcttccagttttttgtcatgcttgtctacatagagtgcgttttaatgcatgttttaatttttttctcattcaggtcgagaatctcacgtggtattttattatacaatttaacacaatatcccataaaggaagtgtgtgctttagccaatctgaatcggggttgatctaatttattcctatttctagtattaaaattatgcctatcactaatattactaaaaagatgaatatttttccgaacatacataatgttttcgtatatgtattgacaaggtaccgtcatgatgttaatatccttaaatatagtatataaataataataaaaagtggtgtaaccttactatatttcattttatccggaaatactccttggtctacacataaattgaatattaaagccaagtatggtgctatggtctcaattatggacgtgcacactttgacagacattccccataagtcttcggtcaatttgattttgatttgccggaaagcttttaaaaccgtcatagggttgatatgtttgaattggaattcaaccgcacaacttggaacgtttgctcttaataaattaaatgatacctcgggtgaagaatttaaagcttcagtagttcttgatggtatttcggtgaaaaaatatacaaattcttgagctacttctaaattagagcttatggcaccatgtgcagtctccggtaaaaacagtgttttgtactttattcctactttttttcattaattgataactttccaaactgtctttattttgttatctgccgatctgatcttgtagctaatgtggctttagctactttgcaagtatttctgaagactttagagaatttgtttacatacatattaaaggtttctgtgtcaatgaaaggcttaaggccatgtaactcatatagtctttccctacttatcctaatacctttagtcgcccagtcactaaatataaacttagagaaagtat

SEQ ID NO: 149 - DNA, 20846 bp, unidentified
  variation 16854..17353: note = n is any nucleotide
  source 1..20846: mol_type = other DNA
  variation 819..1318: note = n is any nucleotide
  misc_feature 1..20846: note = Fanzor polypeptide
ggataacattaacatgtcggaatataaacaaaaagcactgaattatatcacaacaggaaccaccgccaacacaccactgtagcaaatacttccggcaaagggaagaactgactcgggacccagaaaaaacttcactaagtgaagaaaaatacgctgggaacgtcagcaaaaatacgctacctcatcagaaagataaaaggaagcaataacgcgtaatgaaagccgcctgcatcacaaagctagctaactgtgaaaaaaagttcacctgtccacaaccggaccacgagggtacatccgaaatagatgccccaaacacacgacccaaaatacactgcactgcgggcaaccagcccaggacactcctgctacgcatatcctaaccttactcgatgcatcccggagtaaacaaatgagaaaaaactcactagggacgcagcaaatgcggaaccagcggagcgtggagagacacgtccgggccggctgaccgcagagcagagaaggaagaatgacgcctgaatcagcgtctggtcaaagatccacacaagaacatctacgatatgatggaaagcttattggatagttattcttattttatttttgtttttaattttttacgaagttttttcgtagtgagaacccaattcataatgactgaagccatgagtgaggtcgcgtgcgctcatgatgaaggctcctcagaatttaaatgctctgcgcggtagattcaaactacggcggattagtgtttgaagaggatgccttatgtaataggcatgttcgtcaatgattacggggccactaataaatagtaggttttcnnnnnnnnnnnnnnnnnnnnnnnnnnnnnnnnnnnnnnnnnnnnnnnnnnnnnnnnnnnnnnnnnnnnnnnnnnnnnnnnnnnnnnnnnnnnnnnnnnnnnnnnnnnnnnnnnnnnnnnnnnnnnnnnnnnnnnnnnnnnnnnnnnnnnnnnnnnnnnnnnnnnnnnnnnnnnnnnnnnnnnnnnnnnnnnnnnnnnnnnnnnnnnnnnnnnnnnnnnnnnnnnnnnnnnnnnnnnnnnnnnnnnnnnnnnnnnnnnnnnnnnnnnnnnnnnnnnnnnnnnnnnnnnnnnnnnnnnnnnnnnnnnnnnnnnnnnnnnnnnnnnnnnnnnnnnnnnnnnnnnnnnnnnnnnnnnnnnnnnnnnnnnnnnnnnnnnnnnnnnnnnnnnnnnnnnnnnnnnnnnnnnnnnnnnnnnnnnnnnnnnnnnnnnnnnnnnnnnnnnnnnnnnnnnnnnnnnnnnnnnnnnnnnnnnnnnnnnnnnnnnnnnnnnnnnnnnnnnnnnattttccaagactactaccaaatagtaggtgttcccactatttggtaggttgcgaggtacgtcaaacgctccaatttgttagtagtcttggcaaatcaacgtcaaggcttcataacccatagaggatgactccaagcccaacatccaaaaaacaatgcaaaacaattataatgacaaagaaacccaatttcaacaagatgttgttataaaatagtgaaaaactgaggaggtgctaaaagaacagttttacatgtgcccgtcattcaagtaagcaaaaacatagacttgtccttaaaccaaaaaagtactgtacccaaaatccacattttcttccaaaaccaacaaaaaacattgaacacaataacaaatatcacaattttcaatttggcaaacacacttatgtactgtatacataaaacataatcccaaacttgcaatcaagtgttgcaaacccgtactccccccccccccccccctttccaaataaaacaaagtaaaagaaagcgtgacaagggggaagacccaggcacttcgccagagcactaggaaacactactcccggagagatagcacagagggggtctaacaatggacatgggcgaggtaggaggagacgaaggtattgacagaagaccacaaacccgccgaggcgatgtcaggtaaggatcgactttgcaggaaccgtaaggaggcagcaaaggatcgcaccatcgtgcgcagaaccctacatcagggttaatggcacgatatgacccgaacactatgtggcgcttgcacgttccttctccaccttcgaggagaccgccaccagtccccgagtgcgatcacccacaatgacagcattatccgaatcatcggagttccccactagcggactcctacaccctgagtgcaaggcctgcaccgggcacaacacatggtgcgtgttatgcccacgcttgaaacgcctgtatggggataagctgaacttgaaaacgttggtttctctctctcatttcttgtgcaacaccaaatgagaggtgagggtgctaacttaagtgacgacattcaaggtacggggaagaatcgctgcattccatgggaaccgacattgactggctgctcagttcagcacatcacctatccccagtggccatagcgacagaagagtgtacgctcgagcacactgaccggtgtagtgtcccgtgtctatatgcgtgtgaagccagaaggtccagaggtggggatcggtttttacacctacccgaaagaggatttatggagctccgatcttactctcaactatctgaacaatttttaccacacacacctaaaactcgttaaatgcggaaatagcctcacgaaaaaatatcatgccctggtgggggcacgaactctcgacccttgggtgtgaggcagacaccttaccagttagaccaatagagggggatcggtttttacaccttacccgaaagaggatttatggagctccgatcttactctcaaccatctgaacaatttaaccagcacacctaaacttcgttaaatgcggaaatagcctcacgaaaatatcatgccctggtgggggcacgaactctctcgacccttgggtgtgaggcaggcaccttaccagttagaccaatagagatatcccacttggcctgttcggctcagggtatttccgcatccgaggtctgtttaggctagcctattttcactgactttacactacttcaccttccgggaagcgaaagctccgaacagagaggaacaagcttgagccgaatcgaccgagagtccgtcagagagatgaacgggaatggtgagtcaacttcactgagcgatgctacacacgcacctacaaactgcccagttggcaactcgcttgggcggctggcaactccacaacccaacccaatcgagtctcacaacactccctgctctctcctatcctcttccttgtcctgtggggatcggtttttacaccttacccgaaagaggatttatggagctccgatcttactctcaaccatctgaacaatttaaccagcacacctaaacttcgttaaatgcggaaatagcctcacgaaaatatcatgccctggtgggggcacgaactctcgacccttgggtgtgaggcaggcaccttaccagttagaccaatagagatatcccacttggcctgttcggctcagggtatttccgcatccgaggtctgtttaggctagcctattttcactgactttacgggcaggtgaggaggcgtgcagtggagatgttgtgtcggttcgcgaggaagaacaacttctctgagatccccaatgagatccccaacatgtcaaagactggaggaccccatgcgtttttggatacagtggacagctgtctgattgtccatcctgaaggccacggccgactttcccccgaagggccagcgcgtggtccctcaggaagaacaagggaaccaacagttcgagggcattgatgtggtaggtgtgtgtgtgtcccacccatcctgccgtgattgtgatgtcccaggttaggattggtaacgcccacccctacctgctcgacgcatctgtatggtctacccagatcgtcggaggggggggcggtccagggcacagccgcagagagcgtgccccgagcaacccaggtgtccctaagtgtctcccgtagaatggtagtacgcgggagctcggcatgagcctatccataggggccaacggaacaccttgttgcccatgagtaattataatgggcggcgtagcctgagcctccctaaggtgaatggtcctgagcggcccaattccagttgaacccactaacgagtcccagatcctcctcgtgagggagaccgagtgcaggaaaacggcgaagaccttcctgcgaagtttcaccagcgtttggctgacgctgggtccctgtatagcgctggtcagatcccattcgaggacctacccacgtcacgacacgcgacggggtcaggcgtgactgggaatattgatgtttgaaccctaactgtgtgatgtgtgtttgaactactgtgagggtgtcgcgggacgcactgttctagggtgtctgaaacaatcaaccaaaaaaaattgcgtccaagtaaaaaaaaaactatcaaggatctggaggccgctcctgaggagaggatccagagcctgcttcaccagtttcgagaagatccgcggcgcgatgttgagaccgaaggggaagtctgtcgaacatgaacacacacgatcggaagtctgaacggccaagaatcgctggaaacgaggatggataggaacgtgccaatacgcatccttgaggtcccagcgacactacccacgacagaggtcgcagggccagtcgtacctggtgcaccgtcagcatccgaaaccgtggcttgtttcacgatgtgcccgttgagggccgacagatccaccaccgtcgcatcgcgtcgcagtccttctttggtaccagaaatacacgggagagggaaaaccggttgaccggctttcacctccttgaacgattccctgctcgtgcatggacgttatcacgtcggccacctccgaagagacgggcctgccggctttcgtttacaagaagctgagtggggggtctggacttccatctccaggttagaacccctccgtgcaatcttccgcccccacgtccctcgcggccagcgagggcgcaaggggcgaaaacaacctgtgtagcccccgagatgaggtgagcgaccctttcggctaggcgagaaggagaacaaggaggagaccgacctgagaacctacaaattttttgacgtggagggtcccccggcgggtacggtcccttgcggtcataagcgccacgttgacctcctctaccccccccccccacctcgccgaaaaaggcggggtccaaacccatcccctgtccgtcgcgcgtctgacccccgtcgaagtgcggccggaagtggaaggctggccagccccattctcggcggggatgaaagggagtcagaacagaagtgcgagggccggaaccgggtgacgctctggccggcaacttccctttcctgcgccctaagcggccctttcttggcggcagcactggcggcagcaccccgaagaggaccgtcagaaggacgggactgagcgaaacctggtcgcggcgacacagcgcgtcgttgcgtgtcgtaagcaggtgtccgccgacagagaaagcgtagcgtttcccaagcatcctggcgcaaaaagtccccgatgtatagaagctcatgagaacgtacaacaaaccctgacgaatatccaagggggctttcctggcagaacgaggaccttaccgtctggcgttgtcgagttgcctcgcacaaacctaacctatcagactcgctccttcagctcgaggaaccaaagagacaccggcgagctgaaggtggatccgcgccgaacgtgtgggtcaggttcaaaaccctcgcgaagatcgctccggtgcagtcgcctcgataagccgcaggtggtgaacgacgtctgtggagggaacctaaaagacaaggataataagttttcgccaccctctgtcgcaaggtaaaatcctgtcgacagaggactttatctgggtgagagaagaacgtggttagcaatagagcaaatttcaagtttgggcgcgctgatccaggaccagaacttgccgtccaatccgccgacagatttacaagaggaggcaaaagcagtgatgactccgggggagggactgaagtagatctgtcgacggaacggaacgttggcgaattctagggcctcagcaaaccaggcctccatgggagagggttacatcgagcacgacggctaagcccaggcttaccgtgtcgtcgcacaaacccgtcccataggaggacagtcccgtcaacacagccagggactgaacatcctgaaggatgtcctggcggctgaagtctgaccagagcttagtccgaggagcagacgggggcttgggcttcaccgaaaagtactgaaggtcagtcctcgtcgggtaagcccgcacctccacgtcggcccacctgacccatacaccctgatctgccctgaactgcatcttatcattaatttgcaccgaccagccagatgggagggccctctcacctgacgggggaagtttagccggtagcacgctccgggtgggaggcctgcacccccttccaaacagccaaggagccatagaggagcggcatggtccgcgacgggaccttggccttctggatggggggcaaagcgcggacccctgccctagcagacggagaacccccgcatgggagacagcaggggcaacctccgtgagctagggcaggagcagtactagccgacgaccgggcaggcggagaagctgggcgagaaggaatgtggtccactgcagaaggagggggaccgtagcaggggtaggttgggtgaggcgctgaggtttgtgtcacctgccaagaagcgcgataagagggagtcttgcatcgcctccaagcgctcgtcgatgcgtgacacaacccacccctgcatagccgaaaattcgatccgagagaggcgacccccccgaagattgttcgggtgcccgcaggggcgagcttgagcggggaggagagagacccatggacacgaaaacagcagcgtcgcggccccaaagaaggcgagcgacgacggccgtggcgccttgagggtctcgtccccgatcactaacgcccgaggggggaaacatcaccatccccctcttccagcgacacgtcagctcccgagaaaggggtaaccccgaaacctcgctatactccaccgagtcaagaggcggggtacccccctggcgagatggtaagtgaaggtcagggatagaagaatgaggaggagcaggatgacgggagtgggaaggctggccgggtgaaaggaggtcagaaggaaaggccgcgggggaaaacagagcaaggatcccggggctgagagaaacagggcggcccgacaccgaggcggaggagggagggacctccaccttgggacgagaccgtgaaggaagaataggcaccgaagcaggagaagtaggaggagaagcaactacatcctggcggaaaccctcctggacagtgtaggaggagggagcagagggccagctacagcatgaacatccgcgcgcgtagagaacaaaggaagaggaggaagtcttttgtgcaggggaagcgggcggaaggtagtagagcccctatccggagaggccaggggagggcgcacaggggcagagccgctaaccccggcctcaggggctgagaaccatgacgaggcgcgatgggcgtcgtcaaggcgagcaggaggacgacgagggcagtagaggacggggcgacgacgaggcgagcgatgagcgtggacggagctggggatcctcccgacgatgtgacgaccggccgcggggacccaggggaggagggcccgagcagggagagggccaggtgaaacggccatccagacgggtcagggatacccagggcgacgcggatcccggtcgtcaacaaaggccggggaacggtggcccccacagtcctaatgtggtgggagaccaccgcccacacagactgaagggaagcagaggccactgccgcctctgaggaaccagggctatggtccaccacatccaccagggtcaccatacacgggccacacaaagcagggaggtaggccgtagaggacacacattgcgagtggcgtaagcaggacctgtggcgctccaagcacggggagccacaaccctggcgaaagcaaggcatcccacctgcaacggaagaacaccacaccataagcagcacgtcgatagaggaagtgtagagaatgtccaataaaaaccagggaatgagcatggggaaacagtaacacacatgcaaaccggtatccgtactcaccctaaaccgggagcaccagaggtaggtgaggagggcgggcgaggtggaagagcacaagcagaacctgcaaagatggagaaagtgttaaccaccactcaacacatcttacatgcagtttttcttttttttggtctataacactagtaaagtgcacacaccaatatagtttcaggcaacaaggatgacataaaaaaggtcaacagtgaaagccaactattaccgcaaatttgcgggccaatggaggcataaccgtaccgacacaaccctcccgcatcttcgcgggaccccccagcgatctccgcaaatttgcggggagccgaaacgtcccagaggaccgaatcgagctctccgcaaatttgcgggaccggccgagatggtccgggttggcgcgccgaaaaagcgagaggagcgtctagggaataccaaaaaaggccacaaaaatgcgtcatctccttatgaactccaagcgatgatggccatcaagctgagcagtgtcttccttgaaatttatcctaactcaaccggtaaagggagaggcaaggaagacacaccaggggagaggaggcacatcccccaggaaccacccaacccacagagatagagcaaagcccatgaggagagaagtggcagggagggtggtttcgcacaaacaggggcccccgtggggtacccctggattgggcaaaaagactatgaaaggatggaggtgaaacaggaagagaaaacaaaaaaccagtaaatgaaactggtgagaaaaagggtggcctagccgtgagcagagaatgtgtcaggtggcgaaaaaccctgtggtgtgaaggaggggcccccgtggggtacccctggattatcacgaaccacctgtcgcccaggcccttgagacacagtgaaggctcgaaagggggggactcgggaataacgctaataatgcggccgacacaaactctacaaacagcaccgccaccaacgaaatctcagattgtttaccaacggtacaccttaggctatgaaaaaatgaaaactcataggggcatagcaattcctgaatgagaaaacgagctaggctaaaataagctaaaagctaaaactatgcccagactaacaggaaaaaaagaatatgaaaagagaaagaatgaaaaacatatacgaggaacgccaggcgcccacgtaccttcggtaggctatttccacacgcgtctccattatacacacttaggagcccatttacgtgtgccctagatcacgtaacatctgtctaacaaaaaaaagaaggccagataagccgaaacgaacctaaaacagggtgaattgaaggagcacaacaaaagcggactcaacaatggagacgcgtgaaaaaatgataacaagagagggtcgctcatgcgcacgttcgacagggatctgcacatgacggaccacgggatgggccttaagcggtaactaaggtaaacccctttttcttctcttctatgcttttttcaccttcggtggtagttttggttaatgtacaacgtctcttagagcaagataaggagtagactagacgttttctttttaaccgcggttgtttggaatgacgacatagcagtcaaaatagacaagtcgtcattgcaattaggtttaatagccttgacgttggatttgccaagactactaacaaagtatctccggtggcgacagaatggcccgactttaccaaaaaaaaacacgttcgtgcaactattcacccaaggatgcgaagccaagaagaggaggaaacccaatccggcgatcccctacacgtgggagagacggttcgttagcgcgagttacccgacccaactccggtatcattcggattacaatctcatcaattactgcgccaagacctaccagacgtgtttcaacaacaacctcgcgctaaacttcgtatcccgtcagaggcacgccatacgtttctacctcaaaaacgaccaaacggggggagaagacgacaccccaccgctccgctcgtgtatgccctgcagactctcgtgaatggctggaagtacgtcggaaggacctactccgtgaaccaattggcggaactgaaagatcggcactcagcgttcattgaccggcacgtgacgtatctcgggaagccagccctgagcggggggccggtggcttacctgcgctactactacggttttctcaagcgggagtattccgagtcgaccaaactcagaaacttcccgttggctccgaccaacgcggtcaaggcccactacgtggactttgacgcggtgggagtgaagggcctgtgtcgagaactgggcatcccgtcgggagaactgaaagaaaccgaagaagggtgggggttcattttagacctgaaacggataagaagaatgggagggaacgagaagtggacgttcgatcggtgcgtgtcgaccgacggcgtgacctgttcgatccgatactacaggtataaaaaaaacgacccgggaaccggcaccgctcacaagaggaagaagaaaaatgacgggaccgtcgccttccccaggggtacggctgaagtcagcaacagcaacactaccgtcgtatcgttgaaaggtaaacggatcatcggtgtggatcccggacaaaagaacattgccttttgcgtagagttggaccccgaaactcgatagattaccaaaaagacgacactgatttctaaacagtactactgcgactccgggatgaccgaggcatagagacggatttcgtcttggatggcccatccagagtacaaaaaagcccaggaaaaattgttgagatataaatttcccgtattacaggacccccacaagcattgagggcttagagggagtgattaaacacagtggtccctatagacgcgactacctcacatacaagagtcgtctaaatagctacatccgatggccggaaggtgtcgtacagaagcctaatgaattggccgaggccggctttttctactgtggtttgagcgatcatgtgcgatgcttccactgcggaaagggtctccgtaactgggggactaatgacattccttggcaggaacatgctcactggtaccccaactgtgagtttgtgcttgttaaaaaagaccagcgatttattaaacaagctgtgggtcttacccccaagctgtccacctccacacccccttttaaaggattaactactgaggaaatggaacatatgatggggttggataacagccaggctattttaaagatgggcttcccagaaatgcagattcgtagcgccctcaaacgcaagctggaacagactgggatgcccttcttcagcctcgagccatacatagagtatgttctgcaattaatggaggatgagactcgtcaggctcttagccaaaggaccaggaagagcattgaagatggagccaatgggggacaagctatccaaacctcgccgcctgaaagaaaacccccagttgagaacattgaagacgaaaccactgagggtcaagccatccaaagctcgcaggagggagtggggcctttggtggacattgaagaggaggtcactgagactacgcaaactacccaagcctcgcagcccggaatagagcccatggtggagaacatagaagacgaagcgccactgggggacaatctgtccgtacttcgcagtacgaaatagaacccatggcgaagaacatagaagacaaagccactggggggcaatctgtccgaacttcgcagcccggaatagagcccatggtggagaacatagaagacaaagccactggggggcaatctgtcctaacctcgcagcctggaaaagagcccatgagggaaaacatagaagacgaagccactgggggacaatttgtccgaacttcgcagccaaacaaaaataataataatttgggtaatagggctgctatgtctcaccggtccaagaagtttcacagtcaaagattcgaaaaggcgcggctggaaacattcattgacttgccagtaccttggttagagcccatggatcttgcccaggatgggttctattatctgagaacagtggaccactgcgcctgcatattctgccgaggcatcgtgggtgcatggatacagggggacacacctcggggtgaacacaagcgccacttccctcgttgcccgtttgtgaagggggagccggtgggtaacattccactcgagcaccgtaatatcattgcccgaatacgcccaaggtcctcggggctcaccacggtgacggacgtctgcggaaccggtcgtgacacatgcggccattactcaaagacaaatgtcccgtccgacaggacccccacaagcattgagggcttagcgggagtgattaaacacagtggtccctatagacgcgactacctcacatacaagagtcgtctagatagctacatccgatggccggaacgtgtcgtacagaagcctaatgaattggccgaggccggctttttctactgtggtttgagcgatcatgtgcgatgcttccactgcggaaacggtctccgtaactgggaggctaatgccattccttggcaggaacatgctcgctggtacctcaactgtgagtgggtgcttgttaaaaaagaccagccatttattaaacaagctggggatctcacccccatccgcatccaatcccagccgtccacctccacacccgcttttaaaggattaactactgaggaaatggaacttatgatggggttggataacagccaggctattttaaaaatgggcttcccagaaatgaagattcgtagtgccctcaaacgcaagctggaacagactgggatgcccttcttcagcctcgagtcattcatagaatatgttctgcaattaatggaggatgaggctcgtcaggctcttagccaagggaccaggaagaacattgaagatggagccaacgggggacaagctatccaaacctcgccgcccgaaagaaaacccccagttgagaacattgaagacgaaaccactgagggtcaagccatccaaagctcgcaggcgggagtggggcctttggtggacattgaagaggaggtcactgagaccacgcagactatccaagcctcgcagcccggaatagagcccatggtggagaacatagaagacgaagccactggggggcaatctgtccgtactttgcagcccgaaatagaacccagggtggagaacatagaagacgaagccactggggggcaatctgtcctaacctcacagcctggactagagcccatggtggagaacatagaagacgaagccactgggggacaatttgtccgaacttcgcagcccgaaatagagcccatgatggagaacatagatgacgaagccactgggggacaatctgtccgaacttcgcagcccggaatggagcccatggtggagaacatagaagacgaagccactggggggcaagctattccaacctcgcagtccggagtagaacccataccaatacgaattgagcaagaacttgagatcgcgcgcgctcacgaagcatgtgtaaagtttgcatggatgccgagatgagtgttattttcattccttgtagacacttggcaacctgtaatgcatgtgctctggccattgctcagtgccccatttgtcgtgcagacatcaggtgtatcatcatcaacgccatcctcgcctagtagaagagaaaagatggtgtttgaccgactttacaaccgacagttgctgttcaaaacttctcaagggaaagaaatcataaaaacggccgtcaaacaatctgccgctctcgagacgagaccttttcttacgcgagccaggaaaaaagcagaaaatctctcaagaggttcactcgcgtttgattaaatctgacgacatagagaacatagacaatgttcaggatgatctgcctaaattagagaatcggattgttaacaatgacactttgaagaaatatgtccaagtcatcgagaatctgtctgtcggtttcttaccaccggacactcaacaagacttacaaattcactccatctccagcagtacggcagcctgtaccctaaagaagatgagtatccggttcgccgtttgagaggccgactaatggtgttcccatctttcaatattattaggaaaagcatgtgcagtaacgaggggatggagcaggcatttttatttcaacccgctagtaagaagtggtcaattggctgtagcgtgtcgttcaacgttattttgggaaggatactttctgacccttcctataggtacaaatcctattccattagagaaattgctgaggaaacaaagacgggcagcgaacctgactcccgactgaacattgtggatattctagacttcgtcgcaaagtagatggatggctttagaatcaaagtcgaccaaatccaagaaaaacaagtcctgtctcggagaagagctgccgtgtttgtgtttttgattggcttggttatcctagctctcatattcgtgatccgtatggatatggaccttaaaagaaataagatcggcagcgcggctcacgtcgtcgaacacaccacgcccctccttatggggccaattatggccgctttcgataacgacgacacggaagccactagaagattgaattcaaatgcggccagtggagaggaccagccgccgaccccccctcctctgcctacaacaacaacaacaacaccaataaaatcctgcagcgccgatggataatgcaagaggcacaacgtgacccacgtgctcttctatcagggctcgtgggttctagttatggacgttcagactatgtagcgggcaaatagctttagttagggaataaacaaagatgaaattaaaatgtatttttatttgaaacatatttttatacattgtcaacagttttaatacatgaagatgaacactgtctacagacatgtaggctaacagtgcaattactaatgttcaatacgggagcggaagctctttctaaggcaatatggtgttccttccgctttttctcctcttcttcaataatcgcctttaacttctttcctcgggcagcgccgttggtgttggtctccgtggattgatctttcattttacgcttgcggccggtaattgtattactgatgatggggttgctgtcactgcggccattgttcgtattactgttagaattgctgctgctatcctggctgctacttttgctcttatcttctccagtggaagtagaggatggtaaatcagtctcttccggatcggaaccgttgaattgcattcccccctccccttgttggtcacccttatcaacgaactgttccaaatgagagagaacgtcgtggttggccggggtcaccatcttggtcggttggttggtttggttggttggatgcttagcttcttctgggggtctacacctaacaacctaccttttacagtgagccgtgcaggcattatctaatatacttacccaatccttacactaatcgactctctgcttttgataaagcagtgggcgacccgtacagcaattttgctgtagaagcgacaaccatccccctggaaacattaatcgagaggggaattaaggctattctgacagcaagggagagcaatgtgtcctccaatcccatcccgcccaggcgttgtccattttcaagtaaaagtccacgtcagacagcgttctggccactgcgaccagtccgtacttttcgatgtgaaccacctttcccatgcctttgatgatcacccggttactattaactttatctctcagttgagcaaccttttgggcttccctactgtaccattctatttttgactcggtgaccttctcatccgagagcaatgtgttccatttattcaggatttgtagcagctcggcattgttacatctctccttctcatcgagggcgcctacggtcgtgtgggaatctctggtgcccgcttcgaccagggagattgcatcaagccattgaatatcagtgagaatctttttggcgttgacggggacgtacaatttggaacctggggtgaaattaatgttcctgttggagggtgacgcctctggagctggcatggaattaagcatgtacgaaggaatgcgatactgattcctcattcttttttcaaaatctcttcctttgcagtagtttaccatatcatcatttctcactaaatctatgagtcgactggtcaattctgccgaagcggtattcaacctccgggaccctactcctcctcctctaccattattgttacctcggtaggtattctgttttgttcccggttgctgtggaacgaaggacttcgaattgaattcgtttaagatcctctcgatgttggcagtgtttctattagtcctttgtttctgtcgcgaggaaagcctgtcgtaatgatgatcgttgctgctgttgctgttgttgttgtggtggtgtttggtggtgatgcattgccggtcggtgtttgaacaaatcctcgtttaggaaggtagagatattaccctcggcatccagaatcgccaagtgattctcctcctgacttaccctgtccagaattttggtaatttcctcaatggggcttagacttatcctcagactgtccctcattatggtactcacgttcccgcacacgtctttgattaattgcatctctccactgctcaccaccatcatgattctcgacaccagtgttgccagtannnnnnnnnnnnnnnnnnnnnnnnnnnnnnnnnnnnnnnnnnnnnnnnnnnnnnnnnnnnnnnnnnnnnnnnnnnnnnnnnnnnnnnnnnnnnnnnnnnnnnnnnnnnnnnnnnnnnnnnnnnnnnnnnnnnnnnnnnnnnnnnnnnnnnnnnnnnnnnnnnnnnnnnnnnnnnnnnnnnnnnnnnnnnnnnnnnnnnnnnnnnnnnnnnnnnnnnnnnnnnnnnnnnnnnnnnnnnnnnnnnnnnnnnnnnnnnnnnnnnnnnnnnnnnnnnnnnnnnnnnnnnnnnnnnnnnnnnnnnnnnnnnnnnnnnnnnnnnnnnnnnnnnnnnnnnnnnnnnnnnnnnnnnnnnnnnnnnnnnnnnnnnnnnnnnnnnnnnnnnnnnnnnnnnnnnnnnnnnnnnnnnnnnnnnnnnnnnnnnnnnnnnnnnnnnnnnnnnnnnnnnnnnnnnnnnnnnnnnnnnnnnnnnnnnnnnnnnnnnnnnnnnnnnnnnnnnnnnnntattgtcgatgcctttgatgattttgaacacttgaattaagtcacctcttaatctgcgctgggttaaaggaaatagatttaattctctaagacgctcttcgtatggtttgttctttaggctaggtatcattttggtaactctacgttgaactcgttctagcttgtttatatctttttggtaataagggcaccaggattgaacgcagtattccagaagagggcggactaatgaattgtaaagggttaggataacttctttggatttatgctcaaatgacctgcctataaagccaattattttgtttgccttcttaacaacttctgaacattgttgactcggttttaggttactcgatattgttactcccagatcggtttctctgtttacattcttaagctgagtgccattcatcgaatagtttgctttctcatttaggtatccgatatgtagtactttacatttatccgcattgaaactcatttgccaaatttgggcccaacatgacaatttatctagattgtgttgtatatcgtcaacttgttcttttgagagtacgctatttgcaatttttgtatcgtcagcaaattttgagattgtacaggtgagaccctcatctatgtcgttgatgtaaattagaaagagaattggtcctagtaccgatccctggggtaccccgctacttacattggtccattttgatgccttaccgtttatgactactctttgctttctgtcgctgagccaattttctatccatttcaacacaccgtcttgtattccatgcgcttttagttttagcagtaaacgtttgtggggaactttttgtcaaaggccttttgaaaatcaaggtatataatatctacagctttactctcatcgtagaggttgaggatatcgtggaagaagtctaagaggtttgttaaacaggaacgttttttacgaaagccgtgttgagtatctttaagtatgttattttcctctaagtgatttacgagtctgtctcgtatgaccgtttctagcatttttacatacaactgaggttaagctaattggacgatagttactgggtagggatttgctgccttttttgaatatcggtgttacgttggctagcttccactgatcgggcatagtcccagactgcaaggatttattgaatagtaatgtcagtggtttagagagctcatccttagcttcctttagaactctaggcgagattgtatcaggtccaggcgttttatttaccttgagtttatctaaacaattcaatacttctctctctgtaacggtgatattgcttagaacatctgaattatcaatctgaatcggcgatggtgtagggatatcactgaggtcttctgttgtaaaaactgatgcaaagaaggtattgagggcattactcatttgttcttcgtctttggtgtattctccattttcatcgactaacggtccaacagttgaagtaacgacttttttctttctgatataactatagaattctttcgggttgtttttactttgattcgcaatatgtaactctaaggtctttttactttgcttaattaactttttggctttgcgtcgtagctctacaaatttcagccgttcttcgtcattttgtgaggattttaatctatcattagcaaattttttagcaagcaggcagtttgaaatatctttattccaccatttgggcttattattatggcctggacgccgagttttcgatggtatgcagtcttgcagcttttaggtaagtaaacacagtggtccctatagacgcgagtacctcgacatacaagagtcctcgtctagatagcgtgacacatccgatggccggaacgttgtcgtacagaagcctaatgaattggccgaggccggcttttttttctactgtggtttgagcgatcatgtgcgatgcttccactgcggaaacggtctccgtaactgggaggctaatgccattccttggcaggaacatgctcgctggtaccccaactgtgagtgggtgcttgttaaaaaaagaccagtcatttattaaacaagctggggatctcacccccatccgcatccaatcccagccgtccacctccacacccgcttttaaaggattaactactgaggaaatggaacttatgatggggttggataacagccaggctattttaaagatgggcttcccagaaatgcagattcgtagcgccctcaaacgcaagctggaacagactgggatgcccttcttcagcctcgagccatacatagagtgtgttctgcaattaatggaggatgagactcgtcaggctcttagccaaaggaccaggaagaacattgaagatggagccaatgggggacaagctatccaaacctcgccgcccgaaagaaaacccccagttgagaacattgaagacgaaaccactgagggtcaagccatccaaagctcgcaggcgggagtggggcctttggtggacattgaagaggaggtcactgagactatgcaaactacccaagccttgcagcccggaatagagcccatggtggagaacatagaagacgaagccactggggggcaatctgtcctaacctcacagcctggactagagcccatggtggagaacatggaagacgaagccactgggggacaatttgtccgaacttcgcagcccgaaatagagcccatgatggagaacatagatgacgaagccactgggggacaatctgtccgaacttcgcagcccggaatggagcccatggtggagaacatagaagacgaagccactggggggcaagctattccaacctcgcagtccggagtagaacccataccaatacgaattgagcaagaacttgagatcgcgcgctcacgaagcatgtgtaaagtttgcatggatgccgagatgagtgttattttcattccttgtagacacttggcaacctgtaatgcatgtgctctggccattgctcagtgccccatttgtcgtgcagacatcaggtgtatcatcaacgccatcctcgcctagtagaagagaaaagatggtgtttgaccgactttacaaccgacagttgctgttcaaaacttctcaagggaaagaaatcataaaaacggccgtcaaacaatctgccgctctcgagacgagaccttttcttacgcgagccaggaaaaagcagaaaaatctctctcaagaggttcactcgcgtttgattgaatctgacgacatagagaacatagacaatgttcaggatgatctgcctaaattagagaatcggattgttaacaatgacactttgaagaaatatgtccaagtcatcgagaatctgtctgtcggtttcttaccaccggacactcaacaagacttacaaattcactccatctccagcagtacggcagcctgtaccctaaagaagatgagtatccggttcgccgttttgagaggccggctaatggtgttcccatctttcaatattattaggaaaagcatgtgcagtaacgagggg

SEQ ID NO: 150 - DNA, 20741 bp, Paralithodes sp.
  source 1..20741: mol_type = other DNA
tcccccaaggccactgagacacagtcgatcgatactctctctctctctcttgcactcgcttgctatcagtgatgagcacaccctccaatcggatttctaatgttagcacgaaaatatacctcagaataagggaataacagggaaaataggtgataactgaaggagaggaggaaagtggggaaggaggggaggtagaggactgagattttgcatggcccaggggcaaaaaaaaaaaaaaaaaaaaaaaaaaaaatataaattttttttttttttcgatagtaataagataataaatattgcctttgaatgatgacttatcagatcaataataaccaaatagtagtttcttagttttaattttaaaagtaatcctgttagtcgctgttttgatatcctcaggtaatgtattccagttaatacatcctgagtatgagatgaatcttatctccaattcttaataacaacctatttctggtgtctcggttgtgaacgtctgatgcagcttcaaaggttattatagagttactatcgagttggtcatacacaaattttacagactctattttattaatataacttattttaagaataccaagatttttaaagagaggatcagtatggtcacggtaatttgcattcgatactattcttattttttttttctgaattaatacaatcggtttaataatggacatttgcgcacatccccaggttacattgcaatattgtagatatggatatatgagactagtataaaattacaagtgcttatttcgttaagttaggttttattttattgattatgccaatagatttagaaagcttactgtgaacatactgtacttggggtttccagtttagcttactgtcaatgtatacacccaacatttgtgtttgaaatactcttccaataatggagttacctatcgtgatgttcaccatattgttaatacatttcctaccagcaaaaataatgaaatgtgtttacttacattgagtgatagcttgttagctaataacctattgtacacatattgcaattctctattcatggtatgagccatagaccgaatgccgcttccagagtaaaatacattggtatcgtcagcgaataacatgaatttcaaaatatttgatgaatgcaccagataatttatgtatagaaggaacagaagaagtcccagggtagatacctgcggtgcaacggttacaatttgttcaaaagtagatgttataccatttatttccgtaagctgttgtctgttgcttaaataactaaagaaccacaccaaagtctcatttctcattccataaaattctaatttctttggtaaaattgtgtggtttatagtgtctaaagcttttcgtaaatctaaaaatatgcctatggtataattaccttgattatttgcacaaattacatcatttaacatttgtattatggctgattgaagtgaatagttttttttttttattttcgaaagccaaactgattctcattcaagttattgtttgtaatagaaaaagccatcaagctgtcatatacaaaccgttctttaattttatttaaagctgataagatagatatgggtcgataattagagacttgtagccgatctccccctttataaataggtatgatctttgcaacttttaccttatcgggaaatactccagtacgaaaagataaatttattaattttgacaacaatggagagatagctgtacatgcatacttgagaattcttgcataatttccgtcaaatcctgtgccagattctttaagattatttatgatatcagttacttcattaaaaagtggtgggatttatcagcgtagttgggtactgtcctgtcaagtagtcgacaggagatgcttgacaagaagatagtgagtcagctaattgttttcgtatagaacaaaaatgtgagtttacatgattgcaaataacagggggttagattcattcattcgttgttaatttccaattcatcaatactagtgttattggtttgaagctgtaaaagtctgtttatcactttctaagtatttctgctatcttcagatgccgaacttaacttagataacaattattgtttcttggcagtagccaatttattatccaccatgttcctaaattgtcgatattcttctccgaaagtaattggttttgtaacacattttctgtataagctatgtcttctttttattagatcggcaatttccttagtgacccatggcttagactgacccttacaagatatctttataattttccatggtacactttcttccaccaccctgcctatggtgtttataacgcaattaaatgttgtattcacatcatcttgaacaatctgaaaatcatgcaatgcttcttccatacgggtgttcaaaagtgtggcatcaagtgatttataatctttaaactttatagttgtatcattatctgaacatttatcacaataagtgcagctaacaaaaggggcaaagtggtctgacacatcagtgatcaatatgccattattggatattaatgttaaatcgttagaccaaatgtgatcaattattgtcgcacaatcattactaactcgagttggtctattgatgcaagaatataatccatgcttgaacataatatcagtaaaatattgaactcctttgttgttttcataattcagtagattaatattaaagtcgcccaatatataacacttcttcttagttttagtaatttccttttaaaacaaatcaaacaattaattaaacaagtttatactcgaacatggacgtctataatatgataccaattagatgacgtttgtcgcctattacacattcaacgaacagagattcaaagcaaacacacaaacggtaaatagttttgcatcttaaataatttcttacaaacaaacaaacacctccttggcggttcctgttattggtaaataaagtaaagccattcatattgtatacattttgaatatcatcggacaatcgagtttcacaaaatcccaatatttatactttattttgaaaaggcaaaatatgttgaactaaaaacaggtctaggtttcagggtatacttcttacgttgtgaaataagattgttaacttagtggaattactatgtaaacacttttcaaactcaagttgatgatagtattcagtgctgggaagagataggtcaacgagaaggttattgtctggatcataattattaagaatttcagtctcgctattagtcgtaaaaggattaaactgtagtagcttaaagtaatcaaatgtaaccaaatgatcgcctatgctatcataatgaagcaaattgttcaattccgcatcagttaattgggaaaaagggagtaccggtacattattcatctaaaatataaagatatcgtatataatacactctcatacccttcatgaacaatcacttagccaaagtacagcccaagacaaaaatacctgtccgaatattaactctaaacagaaacaccaacgtacgaaattaaaataccaggtaagtattaatgatatgattaatttcgctcagtaaagcttcaataatccctaggtcgcgatttatgtctctgactgtacctgaatacacacaatgataggcgggaaaatatgatatttggaggaatttccccaatccggattttataaaactgttgatatgatataattggaggtttccacaaggcaatacagatgaaataatttatgttgcaatttgtaccaggttcagttacattttcattggattattcaagatgtcctaatgttaggctttgtgaattggcattcagaattcccctacgaaaaatgctaacttaatttaggaatagttaagcctgagtaatgtaagcaaattagagctgcaaattgtgttggtccctagtttttcaaaatatactggtatatatacatttagttttttaatttaggatatttatgcttacattaacaccttaagcatgggtgatgccatatggtgtcaataaggttaatgggcagcatcccgggtgacgccatatggtgccagcatttttcacatcaagcaatcaaattttccataattgtaatctcggccctatcgaccttgtgatggactaagctccatccccagctcctccttgactccgtcaagcctctcattactccccccccccccaccatctcccccacccataagcaccctcaactagctccacttcccccctacctctcagtgattacattatctgtcccaggagcgagtcagtgctatactgactgagtgaaggagatggtgactcaaaaccctctctgagcccacgtgattgacacacatacatgcacacctatttacacacacaaatgagtatagtttggttttcagtccctcacttatatatgcacgcacgcttgaggagtagaatgttgttttaggctatcgcggtgataaacaaggaacaacgcaatgtcgaaccatggtgttttcaccattctcaacctacaaggctataagttttcgagttgttacaaagaaacatttaagccttaattgttactgatacttgttattgctaaattagtataaatatagtagcactgtcaagtaacgcaatattatttaaagcaaactgtatcaaaatgtagcatcagctaacggtcttcgtgtgattgttgtgatgctcctgacacatatgttcatattataattgatataaaaaataatataatggaacaaatcattcaaatttcattgtgatgaatgtgaaagtaaacaacctgattgtatatatttcttacttcgctagtgctatccagaagatatctccggctaaaagtgtttgtgtgacaccagtgtataagtacatcagtgacccagtgactgtatcgtccatgctccaaattgaaaattggtaccatctgtgaggcctactgaaaatatatataatctatataatctatatataatctaaaagataatacttgcactgttgtggattttaatttggaggtaataactctgttcactgagtatccacataccgattagctgtttattatagcttatgctgataactagtttccttgtgtagtgtaccaaatagtaaacttcagggaactgaaattattctctcagcagatgagcagttttcaagccactgccacaaaaacggttacaaaaaaaaaaaaaaaaatcccacataatgttcgcttttcctgatgtaataataactctctctctcttcatgctaagtttgcgatgtagcaagaccagatacatagatagagattaatataaattactattataaaaggtataaatagaacaatatgactaatgtaaaagaaaaaaaacgtcatatgagtcggtatgaagctattaatggaatccttatgtcaagttggttggggaagtaatagcccagtagttaacatggtggacggcggatcaaatggtatccaggttgaggccacgccaaacgttagtgatttttctgaggtgatctgattgctcctgctgttctacaatgatcctgactacaccaacatgtcaactaaatacaccccgtatcattattaactcgagaagtgcgaaactattgtaatgcaaagtgcccgtcagatttttttttctatgtgattgagggaggcaaaaggattaactgcttatagcgagtgcctcccccatagttgaaagagtgacagggccaaaatcaagggacgttcgagccaaaatgcctggacacacggagtttgaagcaatttaagtcataggaagagggaaagactgattctgggagagagttccagagctcagctgttgagtagaagaaagtttgagagtaaagtttcactcttgggttggagagttgcacagagtaggggtgggattgagttgcaagacgggtaccacgtgccctacgtaaaggaggtggtatgcactgggatagctctgaggaacactgattattatagtagcgatagaatagcgagagagatgcaacattgcggcggagagagagagagattgcagagagttggtgagtggacgggagttaatgatacgaaaggccttcctttcaactttgtctaggagagcggtgtgagaggaacctccccacacatgtgaacaatactcaatacaagggcgcactatgcccctgtacagagcaagaagctgtgcaggggaaaagaaccccctaagtcggttgagcacacccagcttctgggaggctgccttagcaagactggtaatatggtccatccaaatgagagcagaagaaaaagagacaccaagaatattgagagaagatgaagggttgatttttgtattgttgaagaataagggatagtccgctgggagatcctgacgggtagatagatggagaaattgggttttggaagcattaaagttaacaaggttttctctgccccaattggaaatagtatttagatcagaatttaagagttctatggcttcattacgtttgtcgttgagggattgctggctggggcgttctgaaaaactaatggagtagtgtaaggttgagtcgtctgcatatgaatggatgggaattaaggtacagttaaggagatcatttataaaaattagaaagagaataggagataggacagagccctgaggaacaccggagtttatagggtgaggaagtgaacaatggccgtccacaaccgcggctatggaacggccggaaaggaaattagagacaaaggcacagatggagggatagaaaccgaaggagggtagtttagaaattaaagatttatgccagactctatcgaaggctttcgatatgtctagtgcaatagaaaaagtctcaccgaactcctgaaaggaggatgaccaagagttagtaagatatgaaagaagatcaccagtagagcgacccttaaggaagccatactggcgatctgagagcagattatgagaagagaaatgcttgagaaatttggaagcaagaatagtttcaaaaactttagaaagacaagagacaagagatgagagcaattggacgatagttggagggttgagagcggtcacccttctttggaacaggttgaatgtgagcaaacttccagcatgaagggaagacgttagaggatagaaagagacgaaagagtttgcctaggcagggagtcagcacggaagcacagtttttgagaacaacaggaggaacaccgtccggaccgtatgccttattagtgttaagcccagagagggtagaaagtacatctttagaagatattaggatattaggcataagtaagagagaggagggcggagagggaggaatagcaccggaatcatccaaggtggagtttctagcaaaagtttgagcgaagagtttagctttgtcagaggaagaagtgatggttgtgccatcagagtgggaaaggggagggaaagacgaggaagagaaattgttggagaggtttttggctagatgccagaaagcttgggaagagctagagttggatagttcagtgcatttattattgatgaaagagtgtttggcaagtcgaagaacagatttggcttgattccgggcagaaacatatgaagaatgagagtcttgagttttaaggcgtcggtaccgtttgaatgcttcctccttattgcggacagcagtagaacatgcgtgagtaaaccaagatttttttagcattagtctgagagaaagagaatggaatgtatgcttccatgcccgataggattacctcggtaatgcgttcagcactctccgagggtcctcggccatggaagcagaaatcattccatgggaaatcaaagaagtactgccgaagagcctcccagtcggcagcgccaaagtgccacaagcgccgccggctaggatgatcgggtggctgtactggagagataggacaggtgacagagataagtttatggtcggagaagcccagaggagagaaaagatcgacagtataagaagaagggttagaagttagaaacaagtcaagaatgttgggccgatctccgatgcgatccgggatacgggtgggttgctgaactaactgctctaggtcatttaggatagaaaagacgtaggcttgttcaccaggtggatcagtagtgtgagaggagagccaatggcggtggtgaacgttgaaatctcctaagatggagatttctgagaaaggagaaatggatagaatgtgttccactgtagagtttagatagtcaaagaatttgggaaagttggtagagttaggggaaagatagacagcacagaaatatttagtaagagaatgacaggaaagtttgagccataaagttgagaattcagaggagtcgaaatcgggaacacgagagcaagtgagtttgttgtgcacatatgcacaacatccgcctttggctttgaaactaggatagagaaagtaggaggatacagagaaggggttgctggaagttgctacagacacctgagtttcggtgaggaagagaagatcaggtttgtaggaggagagatggtgctcaacagagtgaaagttagaggaaagtccgcgaatgttgcagaaattaatagaaagagtaacaggccgaggtccaggtaattgtgtggggtcgtcaggggatggtcggtcgggtgagggggcatttatggtcccccccccccccccccccccctgggggactcctaggctgggctacaattcatattttattttatttttaattttggtgtggaggaatgaagtgtggtgtgcatgtttagtgtagtgaagtggataggaggaggaggtgtttgtgagagctagctggattgctctcagtgtaaatgaggcacaaagaaaatcagcaagagaggccaagcaaatgaaacaggagttccagcgactctttatcacatgcctataacctcacctgggtctagccctgatctattggtgcctacaatacaaggtattggcttcaattctgatgaaaatcatcatatttaccatatataacattgttacttctccacatgcgcctattttacttttaaccctttagcgggcaaatgactttacggggatatttgcggtagggttggaatttgaacgctttaaccctttagcagaatgcttcacaacactttgaccaatgaccctgtttatataacttattcgggcaaatggccgtacagggatatttatggtagggttggaatttgaatacttcataatatattgactgaccaactggtgtttttgttactatattgaccttgtttatgtaactttctatatagatatatttatttattttatatattaagggacataatgtccacattcggcccctcgattcggccataaaaagagatggtgcccgcaccgccactgccaaaaagtacaagaatgtaaaatgttccctgggcaagattctcttggaacccgacggttcggatcccctaatcgaaaagcgatatctggccatctctcggatggccttaaaggcctctcaactgtgcactttcgtaatatgagatctactcgaaaaagaagaaagagaaaaaaggacgagcggagtaggtgacgacggcgaagctactgccgccgccggtgtagaatggcccgactttaccaaaatgaacacgttcgtgcaactcttcacccaaggatgcgaagccagaaagaggaggaggaaacccaatccggcgacctccgacacatgggagagacggttcgttagcgcacattacccgacccaaccccggtatcattcggactacaatctcgtcaattactgcgctaagacctatcagacgtgtttcaacaacaacctcgcgctaaacttcatgtcccgccagagacacgccatacgtttctacctcaatcacgtccacggggagacgatgcccactgctccgctcgtgtacgccctgcagactctcgtgaacggctggaagtacgtcggaaggacctactccgcgaaccaattggtggaactgaaagatcggcactcggtgttagtcgactggcacgcgatttatctctggaggccgatccctgagcgggccggtgaattacctgcggtactacggttttctcaagcgggagtattccgagtcgaccaaactcagaaacgtcccgttggttcctaccaacaaggttaaggcccactacgtggactttgacgcgatgggagtgaagggcctgtgtcgagaactgggcatcccgttgggagaactgaaagaaaccgaaggatgggggtttattttcgacttgaaacggataagaagaatggggggaaacgagaagtggatgtccgatcggtgcatgtcgaccgatggcgtggcctgttcgatccggtactacagttataaaaaaaacgacccgcgaacccacaccgcttccgctgtcactcgtcataatcacaagaggaagaagaaaaatgacgggaccgtcgccttccccaagggtacggcggaagtcgctgtcgtatcgttggaaggcaaacggatcatcggtgtggatcccggacgaaagaacattgccttctgtgtagagttggaccccgaaactcgaaagattaccaacaagacgagacttacttctaaacagtactactgcgactccgggatgaccgaggccaagagacggatttcgtcttggatggcccatccggagtacaaaaaagcccacgaagaattgtcgagagccgattccgaaaaagaaggagacgaagcaggaaaaaggtccgcttacctaaaataatacgttcaacattacaaaacgctatggcagaccaagatcgagaagaagtggagaagggtcaagtttcgaaagtactgtctcagccagaaaactctagacgcgttcgtcaacaaaactctgttcggcggcgataaccgctccccgtttcacgtcgcgtacgggtcggccaaattctcgtccaccggtaagggggagcactactcgtcccccaacggaaagctggccaaattgaagagagagagagccggcggcgaaaattttaccgccgtggacgagtggaacacctcaaaattgtgccaccgttgcatgggtcctctcagcccggtgggtttcgtgaaagttcaaaatgaaggagaaacggaagaagaaccaaaagttaccgagagattgatctacctgcgaggtttgcgccgttgctctgtccagagtaataatttcaacgacgtagacactcaaaggagaaaatgacaaagaagaatcggcggcaacgacaacaataaccctgtctcgagtccacccagtaaatgtccgatcggcggagcctttcttgaccgagacagtaaagctgctgccaatgttggccagaaactttttctggactcgtctacgttgtcgtcatcatcgacactacaaagaggggtcaaggttgaaacgaaacaagttttctggttaaataaagtttattgtaaaaaaattaccacaccgtgcacacacgtgacggagatgtgagtagtatggctctaaataaaacagggtcgtatataacccgaggcggcaaaccaatactgacccttaccacattcggatcggtgagttgtttgcccgctaaagggtaaatatgaaaatatgaacattgaacagcaataaaagaagtggtaacagcaattggctggtgaaaaacttatgttttggccccgcggtcctaatataaggcagaccggcgagaatacaaaggagtacaaagggtacaaaggaaaacaagcaacaacaggttatgcgacccctcgaggttacttgccctccaaaacactgctgttccaagtgttgcaacagtatttcggagagatgtgagacggaagtgctgccctggggcttagtccatggcagggaaaattatattaagatctaatagataattgaacaaacattactaaagaaattatttattcaattacaaatgcagtcaatgcacatgcagtggtgtaaggagaagagggaggggagtgaagggtacagcatggtggacagaagaagtaaaaacagctgttcaagacaagaagaaagggtatagagaaaaaagagagtagtgaagagagtagtgaaggaaagtacgagaagagaatataaggaatttagaaggaatctgagtaaaaaatggagggagtgtaagaaactgttctggaaagaagtcaagaaagttagggaaggtagcaagggaaatagtaagggtgtgaaagataagaatgggaaagtgctagccaagaagcaagagagagtcgaaagacggagggagtactttaacgaattgctgaatgtaaggaatgaagcgccagcacacatagttggatggggtatgggagggaaaagaagagaagtagtggagaaggaggtgggggtcaggaggtcagaagtgtgtgaagccatgaaatgagtgaagttggggaaagcaccaagaatagatggagattggagagtgttgagaaatgctgaaatatgatggtgagatagtgatcaaatgggtatggaaaatgtgttaactagcatggaagaaggggagtgcacctgatgactggaatacaggcataatagtccacctatataagggtaaaggggaaagaggagtgtgtagtaaccaccaagtaatacgtcttctaagcgtagtaaggaaggtgtacagtagggtagtgattgagagactgagagcgagaatggagaaatgggtagtcgacgagcagggcaggtttaggaagggaagaggatgtgaagatcagattgatactctgaaatgtcttgtatgttgcctttatggacttgaagaaggcctatgacagactggatagagaaggtatgtggaaagtacttagaatatacggagtagatggcaagttgctgaaaacagtgaagagattgtatgagggtgcaaaggcggcagtatgtatggagaatgagcagagcgagttctttgatctgaatgttgggttgagacagcggtgtgtgatgtccccgtggttgtttaatgtatatttggatggagggataagggagggaaacgagtggaagctacctgtactgctgtttgctgatgatacagatctgatgagcgacaatgaatgggagttgcagggtctggtaaatatgtttggaacagtgtgcgaaaaacagaatctgaaggtaaatgcggggaagagcaaggttatgggttgaagccaaagagtgaggtgaagttgaacggtgaggctatggagaatgtcagctcaattaagtatctagacagtgtgctgagtaaagatgggagtgcggataaagaaatgttggaacgctgaaagcagtaacaaataatagggtgatcagcatggaagtgaagaagtccttgcatgacagtgtggtaatcccgacattgatttaccgatgctgagcatggactttggtcaagagactcagaccaagagtgagaggggtggaaatgagttaattgagaagtgcgtatgaggacagacgaatgaggaagtaagagggaggtgtggtgtggaggtagatgtgctggaaagtgtgaaaaggaacaccttgagatggtttggccatatgaaacgtataggaagtgagagaatgactaaaatggtgtatgatagtgaggtggaagaacagagagggagaggtacaccgagagagaggtggaaggatggagtgaagaagtatatgaatgaaagcggagttgggtgggaggaggggcgtcgactgactggggacagaggtgcatgggggcattttgtttgtggccaccccttcggggatcactgcatttcaggcaatacatagatagatagaaatgcagtcaaccttgggttcagggcaaggtgcttgtttaggcgaacttttggcggaggacggggaatggtggaagtgtggcggtgagaggtgggacttctgaatgttggtacagtgaccggtaaagcgagagagctaggctgggagtcggcacagaagaacagttttttagtacaacaggaggaacaccatccggtccgtacgccttctaagtattaagccaagagaaggcagagagtacattcttggaagagattatgataaagggcataaataagtgagagggggtggcgagggatgtgtagggccggaataatccaaggtggagtttttagagaaagtttgagcgaagagttcagctttatcagagaaagaggcgacggcggtacaaaggagtacaaaggtaaacaaacaacaacaggtcatgcgacccctcgaggttacttgccctccaaaacactgatgttccaagtgttgcaacagtatttcggagataatgtgggaaagatgtgagaaggaagtgctgccctggggcttagttcatggcaggggaaataatattaagatctattaggttattgaacaaacactacaaaagaacatatttattcaattacaaatgcagtcaaccttgggttcagggcaaggtggttgtctaggcaaactttgaagtctatgacatcatggggaagcccattccacaagttgacgactctattgaagaagttcttggattcattagagttgaatgatttaccaattattttgcagccatttccctgtgtgtagtttgatagattaattggttaatatttactacaattcatgttgtctatgtatttaatgatcttgaaaacttgaataaggtcacccctcaatctgcgcttggctaatggatataaattttgttcttgaaaacgttcctcgtttggttttttgcaaagacagggtatcatcttggtaactctacgttgaactcgttccaatttgtctatatttgttttctagtaatggcactagaactgaatgcagtattccaaaagtgggcagactaatgaattgtaaagggttaggatagtcttttggtttatgtttacattttctacctatgaaacctataattttgcctgccttcttaacaccttcagcacaatgttgacttgttttaaattactggatattattaatcctcaattggtttatctacactctttagctgagttccattcatcgagtaacctgcattttcattgcagtatcagatatgaagtactttacacttatctttattgaagcacttttgccagattttagccctttgtgaaagcttgtttagattgttatgcatatcttcaacatgttcatttgttagtatggtatttgcgatttgtgtgtcatctgcaaactttgagattgtccaggtgagaccctcatctatgtcgttattgtaaattaggaaaaggactggccccagcactgatccttgaggtacatcactagttacattggttcacgttgatgcttccccattaataactacgctttgtttcctttccctaagccaatttactatccaactgtagaacggtgccttgtattcaatgtgattttaatttcattgctaactgtaggtatggaacttcatcaaaggttttctggaagtctaagtatataatatccacagctttactttcgtcatataaggtttgctaagcaggaacgatttttgcgaaaaccatgttgtgtgtcttttattatattattttccttcaagtgattaacgagtctgcttcttatagtttctaatatgttttgcatactactcaggtcaagttgattggagacgataattgctaggcaaggatttgctaccttttatacacattggtgctacgttcgcaagcttccactcatcaggtatttcgccagtgtccaaggatttgttgaaaatcagctttaggggtttggagagctcgaaattagcttcttttaagaactctatgaaaaattgtaatgggttcaagtgaaatttgttttccttgaggttatctaaaaatcttcgtacttctccctcagtaatgctaatattcctaagaacttccaaattgtttgtctgtgctggcagtactgtagggatgtcacttaggtattctgatgttaagactgatgcaaagaagttgttaagagcattactcattttggcatcagcattggtaaaatctatattttcatcgacccagggtccaattgttgaagtcaccactttcctcttcctgatgtaactgtagaattattttgggttcgtcttactttgattctcaaaatgtaactccaaagtgtttttactttgtttaattaaccttttggatttacgttgtagatctccgaagtcctgtctattttcatcgttatcggaggtttgtaatatctcatgagcattctttttagcgaatagacattcagctatgtttctattccactattaggtttgtggataattatcttctatatatttatggtatgcatcgcatactgtgttcgtgttaatttctgtgaaaaatttccatgattggtttatctcatttttgtttagaaaactccaattggcttctttaaattttattttgagtttacggaaatttgctcgcttgaaatttggaacttctcattgttggtattgagttttttgctattaaatttgatactgaaagtgatcgtccgatggtcactattgcagaattcatcaccaacagtcacgttattgatcgagtcttcttttgttgcaagtacaaggtcaagaacattattaccgggagttggagattgaacaaattgatgaagggaactttcttgtaagtttgcttacagatcgtatccagagtgtgaagtaagagtgtcaccccacatggtcactagtaaattaaagtcgccaaaatatatagtatcgtgtatgttacttatttctgcaatttgcttgtaaatttctttgtcggtttgcgctggttggtctgtatattaatactaggaatatttttgttactttaatttttttttattagcacataagatgaatcaatatttactatttgaggttttgacaagagaattgggataagactttctttgatgacaaaatataacaccgcctccatttttattaactctgcttttctcaaacattacacaactgggaagagaaaacgctgctaaaaagtctctgtcttccgtatttagccaagattctgatatgccgattacatcaacattttctgtgaacactagttcctctaattctgaaaatatatagcgtatacttcaagcattcacgtagaagacctttagagatgtggttcttgatataatttgatgctcgccacatgtatttgatgattttgcttgtcttgagtttgtatttcttctgagattgaaattgtcctcccactctgatgactgttggccccattttttaacaaaagttctttatgtcatcattcagcagacggccaaaccgggcagctccttaacgggtttaggtggacaccatctcttgagaacaaatgttgatcgtggtagaaattattccaagtgttgatgaagccgatgttctctttcctgcagatgttggcgatttatattcgtggctgtggtccagaagagattctttgcgttaatccgtggaaagatacccgagataacgatcctgctagatttgtctctatacgtcttgatcagcttcttgtatttgttcaagtgttcctctgatcgtgtgcactggacgtcgttcgatccgacatgtatgacgtacgttgtgtttgtgggggccagcctggttacctcggtcacaacagcagcgacgtcatccatgccaccacccgggatacagaatcactttctggtcctgggtgaccaggcgcagaactccttgagctggccgcgtactatggagtcccccacaagcaggacttcctgtttcttcttcttcatcagtagcgagaatttggaaacagtttggatgaccttcttggtagcagtacctatttcttgcgagctaaaaattattttcattaggaacgagagttggggtattgtcagaggtctggttggtggttgaggtctgaggtggtgctacatccaaccttgggcgattctgaatccctgtgtcttgttgctggcagggtggcgtaatttccgacgtttgtgctcaggaacttttcaagggtattaactctgcgagttaacatattaaataattagagagcttttcctagcttctcctcttgttctgcccgctggacatagaacctgcagtttgtcatgctctcgttctcgaagaatgtcgtaccaaagcttccgttgcacgacactcagtcacgtagattgggcatctatctagctgtggtcttcgtagtgatgatcaaggcaaaacaaccatttgggagtgcttggaaataggctaccatgggcagtcataaacaaagattctggaataaaataaaacagaaataggctaccagtggtactagcctagtcaaagacaaacattacgaaatgcatagcaaaaggccaccagggggtagcctagtcagaagcagaaaaagataatttcgtaaatcgtagaaataggctaaaggggtgcagaataggctaccgggtgtgatacgcaggaattggctgactgacgcagctaggtcacaaaaagagggtcggaataatttgtccttgcacgaaaatactcgataaatattgggaataataggaaaaatacccaataattgaggaggggggaagaaggtgcagagagggggggacacatgtggaggagtgatagcaggtactggaggtgaattatctcacataatcacatattgctttgttttgagtatcagtggggtgttttgaacagtgttattgtttgtgttggctctcgagaggacgctcgccgtccaccagtaaaacctctctagaggactcatgccattcttgggttaactcataacaatagacgatgcccgaccatattcgaagatgctgtgaacgatgccatacctgctttctataaatcacatgacatgtattaataaggtgtggtcttctagtgttgcagaaaggaaacaaccaacaccttgaaataccatctagtgtgacacacccagctcctcaaagtttcactcaataatcccgggaccttgaaagagttgcagcttacagcccccaagtaaaaacctatctgcttcttcttcttcgatatctcctacgttactttttgcctctccttcaccataatgttttgccttaacttatggctaaccattacctcttctgtctacctgtcaatttgttcttctacctaactttcagtcttattctattctcctatactatctgccttctttccatctgccttactgattccctcttctccttcttacctaattgcctgcctatgttcttacctctgctttcagctacactctaaaaaatggaaacatgtagatgcttaaattcctcgacgcactcaaggacaggtttgtcttttccttaagccagcatccttgtctcactttactctccccccacccccaccctctctctctctctctctctcactctctcgtccggataactatctaattttcagtcacattcaagttgttgtgtatacactttacaagtcacatgtaaccggtgtctgctagtggcttccgacttcaatttcatggacatttacattattaattaggtgtgctcagtacagcccgtaagaccatcatctctgtaaaccaaaaataaatatcatctacattcctcgaacatgatcggccggttatgttcgttagtttttgtttctgcagctgttttggtttacggctgttttgtccatgaccaaacgggtccgtaatcgatacaagcccagccaagtgatcaatttagtctgattgtccaggcaaaatatagctggaattcgcaaaaattgcaacagaaatgattttacttatattggcttgtggaaaccctcaacagtctatatcaactgtctattaaaattcagaaaggggaaagtcctcaaaatacctacatctgttaattagtccaatcacaatgtagctagacctaacaaaatgcaacagcaaatatttcacctatatttgcttcaagaaacccccaagtacaacatatcaaaagtccgcaatagtccggataggggaaagtcctcaacattaataaaccaacataactttacaacaaagtgttctaacatggcaaaattggtgtctctacccatgttttcatggtcaaggaatccactgatcattggattaacccccctcaggtattacataatattaacccccctcaggtattacataatattaacccccctcaggtattacataatattaacccccctcaggtattacaatattaacccccctcaggtattacataatattaacccccctcaggtattacataatatgtggtatgtaaattagaagcagccaatacccaaaaatcgaacattattgtaactttgcagccaatggtgtaaactcggtaaaacaggtggctatatccatattttcaacgtcagggaatacaatgatcctaagagtaaccgcctatgtgtattacataacaagtactatgctaattaagaggtgaccaataatgctaactactaaatgtctatagggatcagtgtatcaaaaaaccgagaaaaagactcaatttcattattccatgcaaaaaccgtccacatcattgctttaccccacaaaacaaaataatataataggacattaataggaacagaattaccatgatggcagtattgagtgcttcacttatcgaagtccagtttgtcaaggggttttggagaatttgaacagctctatcttttacagtcaccacatacaactgtttaatcaaatgtgcactggcaggtgcacat

SEQ ID NO: 151 - DNA, 20669 bp, unidentified
  source 1..20669: mol_type = other DNA
  misc_feature 1..20669: note = Fanzor polypeptide
  variation 16302..16801: note = n is a, c, g, or t
ttgagccccgttgtgtgtctacgtctcgtgtattagctagcctagttttaggggctctaaatcccgtttcgtgtctccaccatacaagaccagttcactttagtgtacaatctcagatttttttttttgagaaaatattatttttgtcaagtcaatcttaactagcctagtttttagggggatttgagccccgttatgtgtgtgtctcgtcgtcgtgcattagctagcctagttttaggggctaaatccgttttgtgtctccaccatacaagaccagttcactttagtgtacaatctcagatttttttttttttgagaaaatattatttttgtcaagtcaatcttaactagcctagtttttaggggggaagtgataaaattgcctgagagccgaatattgcagcttcccccaaaccagctgggcaggagggttttcatgttacaaccacctttctcacacacatatatgtgagtagtacgggctctaaataaaaaagggtcgtatataaccccgaaacggccaaacaatactgacccttaccacatttggattggagagtcgtttgcccgctaaagggttagataaaaaaaacagcagtcttccacagggtcccaccgactttctcaacactaaacgtatacatcaagttctgggcaagccaatctgacctgtagacgtagattgtgctctcaccaggtagtctggggagaagtgccaatattgtctgagagccgaatattgcaacttccctcaaaccagctggtcaagccaatcttacatgtagacgtagcttgtgctctcaccaggtaggcatgtagacgtagattgtgctctcaacaggtaggttgaggaaagtgggcatattgcctgagagtccaatattgcagctttcctcaaaccacctggggaggcgggttttcaagttacaaccgactttctcacacacgtatactgtacatccactatttcacacactggtatattgtacatagagtcttcatcatctttatgtcttagctagcctcatccctcaagttctggtcaagccaatcttaactcaccatagcttccacagggtcccaccaactatctcacacacacactggtatactgtatatagataaagtgcaggtcaagtatttaaaccccattgtatgtcttcatcatcttatatggaacggtgaagatacacacggacagcgtcgccatatcttccacagggtcccaccaactatctcacacacgtatattgtacatcgggtatactgtacatcgagtcttccccattgtgtgtcttcgtcatcttatattcacaaactcaggaacggcgaagatacacacggacagcgtcgggtcccacctagtgaagttaatttttagctcgccataacttccacagggttccaccgactatctcacacacactggtatactgtatatagataaagtgcaggtcaagaatttaaaccccattttatgtcttcatcttatattcacaaactcaggaacggcgaagatacacacggacagcgtcgccatatcttccacagggtcccaccaactatctcacacacgtatattgtacatggactatctcacaccctggtatactgtacatcgagtcttccccattgtgtgtcttcatcatcttatattcacaaactcaggaacggggaagatacacacggacagcgtcgggtcccaccaacatcacacgtatacttgtacatcaatcatcaagttctggttaagccaatctgacatctgacatgtagacgtagattgtgctctcaccaggtggtaggctggggaaagtgcaatattacctgagagccgaatattgcagctcccctcagacccagctggggaggcgggttttcacctactttcacacacacgtatacggtaatcaattagttctagtgaagttaatcttagctcgccataacttccactatctctcacacacactggtatactgtatatagataaagtgcaggtcaagtatttaaaccccattttatgtcttcatcatcttatatggaacggcgaagatacacatggacagcgtcgtcatatcttccacagggtcccaccaactatctcacaccctggtatactgtacatccagtcttccccattgtgtgtcgtcatcatcttatattcacaaactcaggaacggcgaagatacacacggacagcgtcgccatatcttccagcagggtcccaccgacatcacacgtatacttgtacatcgaacagggtcgcaccgacttttctcaacaccacacgtatacttgtacatcgaacagggtcccaccgccaacaccacacatattcagtagacgtagattgtgctctcaccaggtagactggggcagcccgcaatattgtctaagagccaatattgcagcttccctcagacccagctggggaggcgggttttcaagttacaaccgactttctcacacacgtatactgtacatagacttaagccaatcacacactggtatactatacatagagtcttcatcatctttatgtcttagctagcctcatcgttcaagttctggtcaagccaatcttagctcaccatagcttccacagggtcccaccaattatctcacgcacgtatactgtacatagataaagttctggtcaaatatttaaaccccattgtgtgtcttcatcatcttatattcacaaactcaggtgtcttcatcatcttatattcacaaactcaggaacagcgaagatacacacggacagcgtcgccatatcttccaacagggccccaccgacttttctcaacaccacacgtatacttgtacatcgaacagggtcccaccgacttttctcaacaccacacgtatacttgcacattgatcaagttctggttaagccaatctaacatgtagacgtagattgtgctctcaccaggtaggctggggaaagagtaatattgcctcagtgtcgaatattgcagcttccctaagaccgagctggggggaggcggggttttcaagttacaaccgatgttaagccaatctaacatgtagacgtagattgtgctctcaccaggtaggctagggaaagagtaatattgcctgagtgccgaatattgcagtttccctaagaccaagctgggcaggcgggttttcaagttacaaccgaagtcaagtcaatcttagctcgccataacttccacagggtccccttccacagggtcccaccaactatctcacatactggtatactgtacatcagactatctcacacactggtatactgtacatagagtcttccccattgtgtgtcttcatcatcttatattcacaaactcaggaacggcgaagatacacacggacagcgttgccatatcttccaacagggacccaccgacttttctcaacacacacacgtatacttgtacatcgaacagggtcccaccgactttctcaacaccacacgtatacttgtacattgatcaagttctggttaattcaatctaacatgtagacgtagattgtgctctcaccaggtagactggggaaagcaacatattgcctgagagccgaataatgcagcttccctcagacccaactggggaggcgggttttcaagttacaaccgactttttctcacacacgtacactataatcaatgagttctagtcaagtcaattttaactcgccataacttccacagggttccaccgactatctcacacacactggtatactgtacatcaagtctacatcatcttatgtcttagctatcctcatctggtcaagccaatcttagctcaccatagcttccacagggtcccacgactatctcacacacgtatactgtacatagataaagttctaatcaagtatttaaacccaattgtgtgtcttcatacattttatgtcttagatagcctaataattttggggggctctgaatcccgtttaaaaaaatatattaggatgtaaatgaaacacaaaaattaaacttatatatatatattcacaaactcaggtacggcgaagatacacacatggacagataacagccgtcgccataaatttttttttttcccagttttaaaatcgttagtcttgttcggcaactcatctaggggagacaaccttatacaaattcgggtggatgggactcgtcaaccttggttggcaacctgtctaggggggtaaacctgatatacaaatccgtattgtttacctaagggtaaggcaggttagtggatggattagccgaacaccactgtagcaaaaaaaatagtgctaacaagatacacagagggcctcggagtcggaccgacccacagggtcccaccgactagactatctcacacacacatacacacaacaaagttctggtcaagaattctagtgccatcctcactcgtgacgttttctcatctttacatacaaggaagactcaagacggcgaagatacatggacaggtaacaaccatcgccatagcttccacagggtcccaccgactagactatctcacacacatatacacacgatcaagttctggtcaagaattctagtgccaccctcactcaccaaaagaagtgacgttttctcatctttgcatacaagtcttcttttctcctcattgaataaaattcagacttttcttgacctcctcgtacaacgattccaccacaacgaaggccaatcaccaccgccaccaccattactactaccaccaccaccattactactaccaccaccaacatactggtatatatatatatatatatattaaaagaagacgcaggggtgtgatgtgctcagcttaagagggtcgactttctgcgggcaaaaatcctgggaaaaaaaaatcataaatcaatcacagggtcccaccgactatctcacacacatatacacacgatcaagttctggtcaagaattctagtgccaccctcactcaccacaagaagtgacgttttctcatctttgcatacaagtcttcttttctcctcattgaataaaaatccacaaattcagacaatgtgtaaacactcttcgtcatacaacgaacaccaccactgccaaaacgccaccaccgccaccatgactactaccaccaccaccattactactacaccagcaacataccacatatatatatatatatatatatatatatatatatatatatatatatatatatatatatatatatatatatatatatatatattaaaagaagatgcaggggtgtgatgtgctcagcttaagagggttgactttctgcgggcaaatatcctggggaaaaaaaatatcataaatcaagtacttctcaatagactatgcctaaaactcactatgaacatacataatattatacaccctatgaaccaaaataaccatccaaaaacacatgaaaataagggcaaacgaaagaggtcaaaataagtattatttgacaatatattaattaagagggccgacttttcaatgaattttgattatcaattatgacccttattttgtaatattatttattttgatattgtagttttttacctttaagagttgcacaccaggcaggttttgagctagtgatgaccacacacatacttcttacaacttcatcaggtaatcggctacccctgagagttgtggcaggtgcatgcggtccacccatacgcgcagggtcatccacactcgtattgtcgtaattggagggaatctgccgtggtagtcctgggtgggttaaagtttgtatggcagccatgactgcctgcatgtatcatcggttcaagggttatcacatgggtggtggtttggtggtcataaacgggtatattaacatattttgatgatgtggttggttgaggatcagtaacaggtatattaatatattttgatgatgtggtggtcagttgatgggggatttcattagcaataacctggtgttcattagttgtgagggtggtttggagatttccatttgttaatggtacatcttgatgggggattgcattgttggcacggtgtttctcagatttggtattaccaccaccaccaccaccgccactactactactactactactactactactactactactagtagtagtactaatagtactactactactgtgactatgactgttttttatgttcacttgttgcgttgatttgtgacaactatttggtggtgtcttgggtctgggttgtgtcctcctcctactcctactattactactcctactactactactaccacgtctgctactgattttcaattattgtttggtactatcactactacttatgttcacttgttgtttgcaaccagtggatttgtgaccactatttggtggtgtcttggggttgcattgtgtgagttgtgtgtcctactactactaccatcaccactactactactactgatgttcacttgttgtttgcaaccagtggatttgtgaccactatttggtggtgtcttggggttgcattgtgtgagttgtgtcctactactactactactactgatgttcacttgttgtttgtaaccagtggatttatttggtggtgtcttggggttgtatttagcgattagtttatgtctaagttgtatccagtcttgcatgcatttttggcgttgtgctattaaacattctaactttggggatatgttgtttcttatatatgttcgttttttttaatggttggtgctagtggtggtggcggtggtggtggtttattatttatctggaaagtaaaaaaaatcgggtataattataatttatataaatatacacgtataatattttttaaccaattcactccaataaaaaagttccatttcattaaccttttttattttgtgttggtgttgtgatgatgatggtttcccccgtttagtggtggtggtagtagtaggtggcggcggcgtaaagaaccctcccttgcccccgctatagtatttatatttaaatagtgagatattttcctatcatttcgatatttccacttttttttctgttctatatagggattcaaaacttgtctagggaaatgtgggaataatcgtatgtattctgattctggctttctgtggaaaagtcctagtaatctttcacatgtatcatcggttcaagggttatcacatgggtggtggtttggtggtcataaacgggtatattaacatattgtgatgatgtggttggttgaggatcagtaacaggtatattaatatattttgatgatgtggtggtcagttgatgggggatttcattagcaataacctggtgttcattagttgtgagggtggtttggagatttccattttttaatggtacatcttgatgggggattgcattgttggcacggtgtttctcagatttggtattaccaccaccaccactacacctactaccactactactactactactactactactactactactactactagtagtagtactactaatagtactactactactgtgactatgactgtttttgatgttcacttgttgcgttgatttgtgacaactatttggtggtgtcttgggtctgggttgtgtcctcctcctactcctactattactactcctactactactactaccacgcctgctactgattttcaattgttgtttggtactatcactactacttatgttcacttgttgtttgcaaccagtggatttgtgaccactatttggtggtgtcttggggttgcattgtgtgagttgtgtcctactactactactaccactactcaccactactactactactgatgttcacttgttgtttgcaaccagtggatttgtgaccactatttggtggtgtcttggggttgcattgtgtgagttgtgtgtactactactactactactactactgatgttcacttgttgtttgcaaccagtggatttatttggtggtgtcttggggttgtatttagcgattagtttatgtctaagttgtatccagtcttgcatgcatttttggcgttgttctattaaacattctaactttagggatatgttgtttcttatatatgttcggttttttttaatggttggtgctggtggtggtggctggtggtggtggtttattatttatctggaaagtaaaacaaatcgggtataattataatttatataaatatacacgtataatattttttaaccaattcactccaataaaaaagttccatttcattaaccttttttattttgtgttggtgttgtgatgatgatggtttcccccgtttagtggtcgtgggtagtagtaggtgggcggcggcgtacttgtctgaaaagtaaaatattttcggtagtctatataaatatacacttttaatatttttaaccaattcactcaaataaaaaaaaatcatgtactactactactactagtataattatcatttatctgaaaagtataaatatacacgtataatatttttaaccaattaaccaattcacccataaaaaagttccatttcattaaccttttgtattttgtgttggtgttgtgatgatgatgatgatggtttccccgtttagtggtggtgtggtagtagtaggtggcggcgtacttgtctgaaaagtaaaataattagggtataattaaaatctatataatgtcttctttatccacattacaaagaggagtcaaggtggaaaagaaacgcgttttctggttaaataaagttcattgtaaaaaaaaaaaaaaaaaaaaaaaaaaaaaacgtgcacgttaagtaaagttcattgtaaaaaaaaaaaaaaaaaaaaacgtgcacacacgtgacggaggtgtgagtagtacggctctgaataaaaaagggtcgtatataaccccgaaggggatatataagttccatttcattaaccttttgtatttcgtgttggtgttgtgatgatgatgatggtccccccccccccccccccccccccgtttagtggtggtggtagtagtaggtggcggcgtacttgtctgaaaagtaaaataattcggttataattatagtctatataaatatacacttttaatatttttaaccaattctctcaaataaaaaagttccatttcattaaccttttgtattttgtgttggcgttgttgtgtcgacaatgtatttttccgtttggtggtggtaggtggaggtgatggactcatctaagggagagtaaaaaaaaaaaaataaaaaaaaaaatgccctatttcggtcgtgtcaatcttagctagggaggggatctgaacattgaaaacatattttctgagaggtagagtgtttcagagcagacaggagggagctaggtagactgtttcagagcagacaggtagagagcgggtgaccctccaaggcttctactcaggccggtattcatttctacacctcaatcactcgtcccgttttgagaagctatgtgtcgatcttttccatggcagcccttgagcctatggagaattccctgcgctcccaagtatttttttacattttatttctataacattcaatatcgacgatagagtgttctatccactttctttttctatggctgctcaagtgggcaattccgtgatacgggatctactcgcaaaagaagacagagtatctccggtggcgacagaatggcccgactttaccaaaatgaacacgatcgtgcaactattcacccaaggatgcgaaaccaagaagaggaggaaacccaatccggcgatctccgacacgtgggagagacggttcattagcgcgagttacccgacccaaccccggtatcattcggattacaatctcatcaattactgcgccaagacctaccagacgtgtttcaacaacaacctcgcgctaaactttgtatcccgtcagagacacgccatacgtttctacctcaaaaatgaccagacgggggagaagacgacacccaccgctccctgcagactctcgtgaatggctggaagtacgtcggaaggacctactccgcgaactaattggctgaactgaaagatcggcactcggcgttcattgaccggcacgcgacgtatctcgggaagccagctctgagcgggggaccggtggcttacctgcggtactacggttttctcaagcgggggtattccgagtcgaccaaactcagaaatgtcccgttggctccaaccaacgtggtcaagatccactacgtggactttgacgcggtgggagtgaaggacctgacggcgtggcctgttcgatccgatactacaggtataaaaataacgacccgggaaccagcaccggtcacaagaggaagaagaaaaatgacgggaccgtcgctttttcccaggggtatagctgaagtcatcaacaacaacaccactaccgtcgtatcattgaaaggtaaacggatcatcggtgtggatcccggacgaaagaacattgcctattgtgtagagtcggaccccgaaactcgaaagattaccaaaaagacgagactgacttctaaacagtactactgcgactccgggatgaccgaggccaagagacggatttcgtcttggatggcccatccagagtacaaaaaatcgtgtacaaatatcgccatggtgaaagacgccaattattcacggttaagcttgatgcatttcacgcaacactgttccaactatatcccctccagaacttgagcgatgaggttagctaagacataagatgtagacacacaacggggctcaaatccccctaaaaactaggccagttaagattgacttgacaaaaataatagcttctcaaaaaaaaaaatctgagattgtacattaaagtgaactggtctagtatggtggagacacgaaatgggatttagagcccctaaaaactaggctagctagctaatacacgagactgacaaaaactaataatatttcttctcaaaaaaaaaatctgagattgtacattaaagtgaactggtcttgtatggtggagacacgaaatgggatttagagcccctaaaactaggctagctaatacacgagacgtagacacacaacggggctcaaattcccctaaaaactaggctagttaagattgacttgacaaaaataatatcttctcaaaaaaatctgagattgtacactaaagttaactggtgttgtatggtggagacacgaaatgggatttagagcccctaaaactaggctagctaatacacgagacgaagacatacaatgggatcgtatcttccacactctcataattatttatgattttttaaagtaggccgtatacctttcaatcgtggataataggggtaggcgtttttttcgagtatgtatggagtatgccgactgcatcgcgagtagcgcgctcttggaaacagatattggttgaaagcgcgcccatccaggtgtctccattcagaaggaatttccaacacgaaccgatgtaatattctcaattctagagacgatagactgggtgatataattctacacctgggcgtcaccgtgagctactctcggatgcctggtgtatctacgttcgttcacaattatcctgttaaactggacgcgagtttgtcaggaaactggacgcgagtttgtcaggtgaaacaattttggaatctatcctgagtaagtgtagagcacgtataaaatacctgtatagacaggtgggatgcttgcccgcggcgaccaaaaagaccctctgccaagcacttgttcaatgtcattttgactattctgtgtcatcctggtactctgcatcatctaaatcagcacagcacaaacttcaggtcactcaaaataaaatggttaggttcatgctgaacctaggacccagatcacatgttagccaggaacaacttcagtcactaggtatgctcaatgtttctgacagggccaaacaaatcaggctaactaatgccttcaacattttctatgacagagctccagagtatctaaagaatgattttgttaaagcaaatgagaggagtggacataatacaagaaacatgatgtttaattttaaggtcccgagaatccaaggacagggtaagcaaacattcttcttcactgccatcaaagactggaacgacctacccctgtcagtccgtgaaaagagaacactgtattccttcagacgtagcctgaaggaacacctgaaccggacagctgcgagaagggagcaccaagcttatgtctactactaaataagacataagagatagacaaaccaaactgaaatgattactgattacggattactgatatttactataggatgtaaggtatcttaaaataaccccctagaaatactttctctaaagtatctatttctttatcctccccttttccccagctaacctaatcccacaaggaccccaatggaaatacgcctaacggccttattgggctatccttagttggaattatgcaatgcaatgtcatatttgtaacaaactatgtggtaccaactctgtaaattgctgactgaataaatattattattattatattattaagtagtagaaacacaatggggtttaaatgactttctccaaaaatattttacataaagtgaactggcctttgtatatggctgcacaatataccttgtattgaattgtatagaaattaaatgaaatgtacaaatgtgcctttttatctccttcagtgtatatgggacctggttggaacactctcaatattgtctcccccagaagataaaataaataaccctacacttgacacattcaaacagaataaactaacacagcgccctacacattataaaaaacatatatattatagaatacagagggagagaataccttttgtgtcggggagtagcttaaattgtagttcgttctctgtgagatggcactatttatatgtttggaaaaggggagtggctagtgggggtggactctaaataaaggggtgtgtgtgtgagatcatatccggatggggaactcaggggaattcccaaattgtgtgtacatattatgtgtacatattatgtacaagaccaattcactttagtgtacaatctcagaaaatatttttttgagaaatattttttatcttaactttttttttttagtcaattcaatcttaactagcctagtttttagggggattttagctccgttatatgtctacgtctcgtgtagatagcctagttataggggctctaaatcccgtttcgtgtctccacatacaagaccaattcactttagtgtacaatctcagatttttttgagagaaaatattattttgtcaattcaatcttaactagcctagtttttagggggattttagctccgttatattatatgtctacgtctcgtagtagatagcctagttataggggctctaaatcccgtttcgtgtctccaccatacaagaccaattcactttagtgtacaatctcagaaaaaaaattttttttttagtcaaaaattttatttttttgtcaattcaatcttaactagcctagtttttagggggattttagcttatatgtatatgtctgtcgtctcgtgtatatagcctagttataggggctctaaatcccgtttcgtgtctccaccatacaagaccaattcactttagtgtacaatctcagaatttttttttgaaaaaattattagagaaaatattattttgtcatttcaatctactagcctagccttttttagggggattttagctccgttatatgtctacgtctcgtgtatatagcctagttataggggctctaaatcccgtttcgtgtctccaccatacaagaccaattcactttagtgtacaatctcagattttttttttgagaaaatattattttgtcaattctagtttttcaatcttaactagcctagtttttagggggattttagctccgttatatgtctacgtctcgtgtagatagcctagttataggtctctctaaatcccgtttcgtgtctccatacatacaagaccaattcattttttttagtgtacaatctcaaaaaatttttttgagaaaatattattttgtcaattcaatcttaactagcctagtttttagggggattttagctccgttatatgtctacgtctcgtgtagatagcctagttataggggctctaaatcccgtttcgtgtctccaccatacaagaccaattcactttagtgtacaatctcagatttttttttttgagaaaatattattttgtcaattcaatcttaactagcctagtttttagggctctgcggtcagccggcccggacgtgtctctccacgctccgctggttccgcatttgctgcgtccctagtgagttttttttcatttgtttactccgggatgtatcgagtaaggttaggatatgcgtagcaggagtgtcctgggctggttgcccgcagtgcagtgtattttgggtcgtgtgtttggggcatctatttcggatgtaccctcgtgggtcggttgtggacaggtgaactttttcacagttagctagctttgtgatgcaggcggctttcattacgcgttattgcttccttttatctttctgatgaggtagcgtatttttgctgacgttcccagcgtatttttcttcacttagtgaagttttttttgggtcccgagtcagttcttccctttgccggaagtatttgctacagtggtgtgttggcggtggttcctgttgtgatataattcagtgctttttgattatattccgacatgttaatgttatccgtctgcctaggcctagccagcctctcgtagctttaccacatatacaagtgttattgatttattttctaaatatgtactactgtgtgatgtgtgtcctggtttagttgtgtattggctaattccacggactatttatgtgtcctgggttagttgtgtattggctaattccacggactatgttgggcccggcgttagttgtgttttggctacgcctcggtcctgtgttgcgttcagatggtatctggacggggtgggttttttccggcggggtttttctcggtttacaccatgaaaaacccggctggttgccgagttttggccatgcgtggtttaaaaacaggcttgtttccccggcgagtgggtgtctgtggctccccaggactgcgtctctggggtgcctgtttcaggctccttctgattcccggcgggttggctgtacccatctaacagtgttcatacggacacgtgttgtttgtagttttttttcggttttgcaaagccaatataaaactatgctgttgttgtatttcctccccggcgatcttttacaaagatgtggggttaggaacaattggggttaacttttaaactttaaatcacccggcgggtgcaacctggtagggtgggatgcccgaatttgcaaaattcagtttagttgaccagacaattgagggatgcattgtgtatcgcctccttcaacatacggcgctttagggcacaattggggttaacgtttttaaaactaatattcacacccggcgggtgctccctggaggggtgggaataacgaatttacaattcagttagttaaccagacaattgagggatacgttttgtatcgccgccttcaacatacggcgatctaaaaagatacttcgggagaagttagatctcgtatatttgtcaggcttcccagtttttgatctacgagataattcgggggccggcgtttttttagtttttttttttctccaaaattgaatcttgaaacaaacaccaccggaaagacttaatcagttataaacgccatgctggtctttatatattatgtcagagggtattcataaatcttttggacaaattaagatattctgaaatcttttacttaggaaaccccaccgcgtagcgagctgtagtcgttgagtattacgtctcgttacccggcgggttatttaacacttgtgtgcgaacatgtttgggttaaccttatgagcattaattcctggaaaaattttccagagctgggtcccggcgggtctatgcagaacctggagtaatgatcccaccagtctctgtcatggctacctttgccccggtttttgctttatgcattacgccctcctgttcaggtatccctatttttgcgcacaccctttgtataaaatgtgttaaaatgtctcgtttgtgtgggttacctttccggcgttttttttctcgttgctccgagaacaccgtttttgtttaccgagttttagtcaggatggctcaaaataggtaagttactccgacgagtttggtcgcttgagggctcataagaaactgcgttttctgtggtcgagcctgggatcaggcttccnnnnnnnnnnnnnnnnnnnnnnnnnnnnnnnnnnnnnnnnnnnnnnnnnnnnnnnnnnnnnnnnnnnnnnnnnnnnnnnnnnnnnnnnnnnnnnnnnnnnnnnnnnnnnnnnnnnnnnnnnnnnnnnnnnnnnnnnnnnnnnnnnnnnnnnnnnnnnnnnnnnnnnnnnnnnnnnnnnnnnnnnnnnnnnnnnnnnnnnnnnnnnnnnnnnnnnnnnnnnnnnnnnnnnnnnnnnnnnnnnnnnnnnnnnnnnnnnnnnnnnnnnnnnnnnnnnnnnnnnnnnnnnnnnnnnnnnnnnnnnnnnnnnnnnnnnnnnnnnnnnnnnnnnnnnnnnnnnnnnnnnnnnnnnnnnnnnnnnnnnnnnnnnnnnnnnnnnnnnnnnnnnnnnnnnnnnnnnnnnnnnnnnnnnnnnnnnnnnnnnnnnnnnnnnnnnnnnnnnnnnnnnnnnnnnnnnnnnnnnnnnnnnnnnnnnnnnnnnnnnnnnnnnnnnnnnnnnnnnnacagttttacaaatgtactggaaccgatctaacgctgaacattaaggaaaaatgtcccaagacagtagaggaggctgccaagatggcagacctcagattatcattgattcgtggttgcggtgccgctcagagggctgagtcagggcagaaggggcgctataccccacccaccagagttttcgataataacaaatcctatgacacacataaccacactaaaagcattgcacctaataacacctacaaaacacaagcctctcccgtttactaaaggtcaggccccttcttcgcccgcacaagggaagaagcccattggggatgtgaaatgttacaaatgtcagaagctaggccattattcacgtgagtgccctagtaacactcccgctaagccggtgtcattggttcacagtatcggtgtgtctctgaaggctgcagcaactgcccggggtaggttgtcagcagctgaggcacacgcggtaaagaagcgtacggaaggctcgacacctgtccgggacactttctgtagccatcggggacacgggtttgtgagctgggggagtgaactacggagggttgacttgttgagggatacgggggcttcgcaaactttgttgaggaacttcacagggaaaccgataaaatgcggccagagttgttgtggtgcagggtataaatgctacgaggtcatacccacttgtgaggttggagttgagagtgggagaggtgtgcagggagctggatgtagggatcgttgagtgtttgccagttgagggcgtcgaccttcttctcggcaacgactttgcggtgcccacttccgggactccacccttagtcgttgccgagagggcggccgacgtggatggtgagaatcgggaatgggttgggaggtgccaacaggatgagatggcctgtgtggtaacccgatctcgctctgcggctcctgcacagcctagcactcaacctcggggacagtggaggaaggatcaggagaaggttgctaagggcaggaaaagggacattgattctgctgcacttctcggtgattcggtacttggacctataataaacacgggagttgactctggcccagagatggtgtgtaacaaggcagagttgggtaagacttcgcgtgaggcaagagctgtagcgagagccactaaggcagtagagcctactagccggggtaatgtcttattacaaaaccatcttgatgcattgacgcccggggacattagtgagcagcagctgcaagacgctagcctagctcgttatagcaatggtgccatagagttggaggaagatggggatgcgagccgggagagacttataggttgcatggcagcggcaggtaataacttggttaatgcacaggcggtcatgaagcaccagtatgacgccaaggtgaagcttcgggagttttcggtgggtcaggaggtaatgttgcttttacctttgcctggacaccccctttttctgccaagttcattgggccgtatgtggtggctaagaaactgtccgaccttgattatctcgttgcaacacctgaccgtaggaaaaaacatcagttatgtcatgttaacctcatgaaagagtatgtgagacggccccctcagagcctctcactgtccctgtgctggcctgcagcggccagggtggagaaggaggtggggacagtcatgctgctgaggaggatagctgggactgtgtcatttccgcggaacagtgggcggggaatactgaacaagaggctaggcaagctgtaagtcacctgcctgagcaccagggtgctgctgtcctaggcctgttcaggtcatacccctctgttttcgccgaacacccaggtctcactactcaggtaacgcacgacgtgggacgtcggtgataatgtgcccttcaagtcagtgccctaccgtgtgcccccggtaaagttgccagctttacgggaggagttaaagtacatggttgagagagggatgatcactgaaggttatgtgaagtggacatcacccgtcacgttgcagccaaaacctgacggcaaggtgcggttctgcatagattttcgtaggctaaatggcttgaccactaccaacccttaccctttgcctcgagttgacgacagcgtggacaagatagggaatgcaaagtaccttactaaaattgatcttgtaaaaggctactggcaagtacccctgtcggaccgagctaagcaagtttgtggttttgtggtagatggcaagacctaccaatgtaacgtaatgccttatgggcttaagaacgcacctgccacgtttcaaaacctgatgaacgatatttgtgacgaaatccctaactgcacggtctaccttgatgacgtgatagtatatgatgacgattttgaaaatcacctaaggcacttagagaccctgtttaggaagttgcacgatgctgggctggtggtgaacctgaggaagtgcgagtttgtaaaggctactgtgcagtatcttggctttgtggtcgggttaggccgggtgtgccccccccctgagcaagatacaggctatcaatatgtttcccaggcccaccactaagcgccaggtcatgcggttcctaggtatgataggctattataggcgcttcatccggggatactctactgtcttagcaccgttaactgatctactgtcgaagtcagtgaagttctgttgggctgcggagtgtcagagggctttcgacctagtcaagcacctgctgtgtacacatccgattttgagggccccagacttctccaggagttttcagctggcgactgatgccagcggtgtgggtgccggggcagtgttactgcagactgattccgagggcttggaacacccagtgagcttcttttctcgcaagtttaattcggcacaaaggaattactcgactatagagaaggagcttctggctatcgttttgtcgctcaaacatttcgaagtttatgttccagcctacggcccggtagtgacgatttatacggaccatcatcccttgaaattcctaaatcagtttcacaatcggaatatgcggttgaccaggtggtccctaatgctccaagagtataatctcaacattcagcatattgccgggagtgagaacgtgatagcagattgtctatcaagggttgatgatccaagatagtcgtgcacggtgtgtgggttgagcaggagtaaaattaggctatcataacgccgtccaaaaagattataaaacaataaaataaacgagaaaactctttcttttttttagttttgtaactctttattgttgtagcatgatgcatgcaatattgtgttttatgtataattcacacttcagttgttgtgcaccttttgcaattagtggcagctaagggtagcaggtcggttggttgcctgtcagattttgataatgcttctaaggtcgattatctaaaatcttgggggggctgtgacgcaccccagtgctgggcaacgcaacctgattgtactccttggtactccactgtaccgcccgtgatctggctaccgtcagccgctatgtatattgagtgtgacaacttataactatgttctttgtatctctgcaaaggtctcgtcatgtgctaaccagtggtgggttttgttttaagccatgtcgagaccttccatttaatatgtagtatcaatagagaagttgatagataggataatgggaattcagagagagagagtgagttgggcttcagagcaagagggtagcaacacgccgcgctgccggccgggtggttgccagacgtatggactggttggcagccttgcccttatagctaggcgcgatagggttggtagtccattgttgcctgcctgggctgggcccatgttgtcgtacagca

SEQ ID NO: 152 - DNA, 20663 bp, Paralithodes sp.
  variation 894..1393: note = n is any nucleotide
  source 1..20663: mol_type = other DNA
  variation 8446..8945: note = n is any nucleotide
tcactcttgggttggagagttgcacagagtaggggtgggattgagttgcaagacgggtaccacgtgccctacgtaaaggaggtggtatgcactgggatagctatgaggaacactgattattatagtagcgatagaatagcgagagagatgcaacattgcggcggagagagagagattgcagagagttggtgagtggacgggagttaatgatacgaaaggccttcctttaaactttgtctaggagagcggtgtgagaggaacctccccacacatgtgaacaatactcaatacaagggcgcactatgcccctgtacagagcaagaagctgtgcaggggaaaagaaccccctaaagcggttgagcacacccagcttctgggaggctgccttagcaagctttcccctttttaacgccggcacagtgaactcagaaaacatgtgtgcactgtgctcattcttggctacaaatcccggggaaggtgcaatgtgaatacattcattaagtctaccaaaccgaaggcaattaggtgtgttgctcatcgccgccagctcagacactctgttcccggtggccaaagccaaaaggaatacagccttttttaagagtaatgcaaaatctgcagtattttggtacagacgagagtgaagtaaagacaatgccttgtccagagaccaagtaggcatgagctgacggggaggtgggcggagtttaaaacatgctctcataaaaccagtttcctcagccaccggtatgaagagacctgtaaggtctaaaaagggcactctaatcgcagttaagtgataagtaaacgttaccacagataaacgtttctgctcaaacagataattcaaataattaaaaactaacgccactgagggcacagtctgttctgttnnnnnnnnnnnnnnnnnnnnnnnnnnnnnnnnnnnnnnnnnnnnnnnnnnnnnnnnnnnnnnnnnnnnnnnnnnnnnnnnnnnnnnnnnnnnnnnnnnnnnnnnnnnnnnnnnnnnnnnnnnnnnnnnnnnnnnnnnnnnnnnnnnnnnnnnnnnnnnnnnnnnnnnnnnnnnnnnnnnnnnnnnnnnnnnnnnnnnnnnnnnnnnnnnnnnnnnnnnnnnnnnnnnnnnnnnnnnnnnnnnnnnnnnnnnnnnnnnnnnnnnnnnnnnnnnnnnnnnnnnnnnnnnnnnnnnnnnnnnnnnnnnnnnnnnnnnnnnnnnnnnnnnnnnnnnnnnnnnnnnnnnnnnnnnnnnnnnnnnnnnnnnnnnnnnnnnnnnnnnnnnnnnnnnnnnnnnnnnnnnnnnnnnnnnnnnnnnnnnnnnnnnnnnnnnnnnnnnnnnnnnnnnnnnnnnnnnnnnnnnnnnnnnnnnnnnnnnnnnnnnnnnnnnnnnnnnnnnnnnactgaacgtgatcgcctctgattcgacgaatcacgtttgtgattgtttgcaatcagacggcgatcacgctaacactccctggaggtgactagcgaagctatcataacagtaggcctaaatctctcctctacattatattatcataattaagcttaattagcctccctccatgttatttatgtgtcgcaatctcaattataaggtggcacacctataaaaatcatagttatcgtgaccattttgctatatataacataaaacaagcagcttggagcgcaagtctcacagctacttcgtcaggccttcagtgcggtaagcgtagcctagttggtaacgacttcgcttttaaatccgtaagcctactcgcaagggttcgaggctcgatgagctaatgtttttttttttttttttttgcagtttatttatttaatttgtatcgttatatattggtaatgttactatgccaatgatgatgtattgtaatgggttataacttgctgtacaggtttttgagcgtttgtctatattattgattgattattatgttttttatgcggtttgtatttcattgttatagttatatatcggtaatgttacagttgttactatgccaattgaatgatagcctatattttaacgggttatagcctagcttgctgtacaggtttttcggcgcttgtctattattgatcgattactctatttacatttcttaaaaacaatttctgaggcataattgcatcgaagtatgataggtcagttaagctatgtttagtaaggtagcctatccacgctatagttaaatatgcaaagtaataatctaatggttaaaaaaatatatttatgaaccttccataaatataggcttgcaaatagcctatatacacatagatcgtcagaaaaagaaagtatgcctatacatacattgccaggaagagataatatagcctatataggctactatttaattcagcctggctacatagccaatatatataaaactataggcctatagtttagcatattcatagtcctacatcgccaggaaaagaaatctactttttatttccccaatagactaacggagaattgtttgaaaattacacggggaagaaagagctacctttgccagataaggaccgtaataactttgtcaacatttcttaataagattataagatataatagcctgatggtagcctagcctaccgtctgtcttgagcttgaacaaggctgctgactgtagctgacagtgtgactaccttagccaatagtctatattgatggataataatatccaatattaaaatgtattgatttgacaaaaccatttgactttgattgaaattaatagaccgaagaagcactgtaacaggcctaaaaccttcgcagacatcgccaacaagatttgaatttcgtgctcatagccactgaccaatcagcgacgagaatcaatgtttggctatcaatgtcgttcagtctgcgcgatcataaacaggattgctcaaacagaaacaggattgcctgatagggtagactgaacgcgctccagcatgcggaaacgggtgttcacaatgtgagagttgaggactgagagatctaccaccggcctcatagcagcgcagtccttctttaggaccagaaacacatgagacagaaataccttttgtgtagaagatatttccttgataacgccttcctcgtgcatggacatgatcacttgggccacttcctgagacactggtcgctgtcggggagggcacctgagaggaggcctggacctccacctccaagtcagacccttcttgaccacccgacgcgcccacgaccggcggggccattgccggtagtgggggcggaagaagccggtgcgggcgcctttgtgtcaggcccatcaccgcttcgacgagatgggcgggcgagggaagaggggactggccaggaggaactacgcgttttttggcgcggagcccctcttggacttatcgtagtgggagctagagccaccacgtcctcctccagacgtccccccgccccgccgaaacgatggacgagcctcgcgctccggcctatccccctccaggctgtgtctggcagcggaggaactggggccctgcgcctgccagcgccgcatcccctcttgacggggacggcgatccggggaccgacgaccacggaaggcgggtacaccacgccccctgtgagccagtcccctggccacacctctagcctggcgccctctgccggcgacagacctgcccccgcgtccgcgggtggaggaggatgaagtgggcttcgccaccaccttccgttgagcagagtatgtgtcactctgcgccagtaagaaagccccttgccaagcctcctcagggaacagtccaggggtcagaaggtcagtcagtaggaggcggttgcggacgtcggcaggggccttcttacagaaagccacccgaagttgttgacggcaacgagtggcttcatggagggagtggcggatgtcctgaacagggttgagggcaagctgcagggtgatccgtcggacatgctcaaaaccttggcgatgatcagccgattccagcgactcaataaggcggaggtgaacccgcgccagttccaactgagcaagaagagttgaaagttggcgcgccgctcgctgacggaacttaaagtcccggtccagtggtgccttctccggtgccgtgaaaaaggaacacggaagggggcccaccgacagtttgggagcattgagccactcccacacaggcagagggaagcccgaggaggtaaggagcatgcccgacagaaaagatgattccatggatgggatggccggcaaggtctcagccatggactgaccaaactccactgcttcacggatccattcaccccagggacccggacagacgtgcgggagttcgagcatcaggaccccgtcccgatctcgcacattcctgaggtacggcgtccctgagatggcagagagggagtggacatccgcagacaggtcttggcgggagtagtcagcccagggcttggtggcagtgtaaggcaagaccgacggatgatatgaaaaataccgcatgtcttgccggttagggtacaccctcacatcgacctcagggaccagaccctgtggagtaatggccctgaagatgtttttctcattcacctggatagcccagccctccggcacagcccgctctccggccggcaggtggaccgccccctcagggttggaggcgatcacagctctccaagcaacagaatccccatacagggatggcatcttgactttggggatcttaaacttggagagaggcggcacggagagggggtgagagaacaaccccaaaccctggcccgggataacaacgggccagagaggagtcgtaggcggtgtcggaggtgcaggtgatgaagtagatgatgtcaacggtaccacgaccgggagagcaggccgagatgggatgtggtcggcaacaggtgggagaggagccacaagcggagtctgcagaggcaccgggttagtagtacccaaccgggagaccactgcctccatggccgccgtgacagaggagaggatgtctgccttattggaggccatctcaagacgaatagacgccaactccgcccgtaactccgtctccgcagcaggagggaaggacgtctgtagaggagacagggaaccagcctcactgggcccacgggccccatggtccgtgagcggggagaactcaggggacggtgggagaggactgtgccgccacgtcggggtcctcctggcccgaatcaggtgcaccgtccgaagacgagtcgacccccatatcctcgtcctccagccgatcaaaatccgcaacctccatctcaagaacatcttctaaatggtcagggagacgaggaggagactgctggccacaagggatcgaggcgtcggaacctccaggttgaggaggaggcgtggagggcatcgccgccgggaccaccacagccgggcccgccatagggaagaggccgggacccctcacaggctgggaggcaggcagaggctcgaactccaccccaccagtggctgaagatggtgcaggatggagaacgacctcctcggcaggcggggcaggacggcgtttggccctgaagaccgtggaaccctgcgaaggaggggggctcatcctgaggtgaggagaagcaagacggggtcgatcagcaggggacggagatcggcgacgtttcttcttgccagaagctccagaagtcatggataggtcggagggaggcacacgatgttcatgacgcctgggggcccgctccctggaacgcgccctcccgcccgcctgacccgaactcccgggaggggagccccgagccgtatgaggagagcgagagtgacgaacagtaggggagcggggaacggcgtgcagcatcggaggtaggtgggatccctaacaacacccggacgtcatcctcacggaaggaaggagccctgtgcaggaccctttggacgtgacgggagatgacgtcccatgatcggcgtagagacgtcctggcccgttgtccttccgccgacgtagggagagtctcgagtagttgaagagcggagagacacaccccacaccggcggggatcgtaaacatccttcccatagcaggccgtgtggaggcaacattcccgatgatcccgcaaggccgtccgctgacacgtcggccgagagcagggaggagccggcatcacagcactgaaaaatggggaagcattacccaccagtagaggtgagacaggcaatatgaggcagtagagccaattcagcatgtaagactcaataagacaatatccagtaagaagctatgtagcaagtataacaggaaagtcaaaagaaaacacccacaccagagaccctcaacaccagggctgggacaagccccttagcgaggcccaaccctgggaacaggtcctaaccaaaatcgtggggaaagtggtacccttcgaaatacctgagaaccctctgtgagagcggagggaggaggcggcgaagcggcggcggcgtagggacagccggcagtagagcgggcaccagctggaaggaaaaggtcaagtgtgagcaacccaacagtaccctataagtgtaaataggggcggggagggaatccaaaacacacaggacatcgccactttgggtcgagtcctaggacttttcaggtggtctttgggtcctcccagtatacaaggaggacgcccgtagggcgggaaccaggtacagaaggaggacacaaggaacaggacataagggataggaaaacagccaatcagccgttgtccaaaaagccctgtccaggtacatgaagaggggggcagaacagggcgcataaaccaagtcaagtgaaaagctatgtggcctaggccttgacaaggcacagggcacatcaaaaagataaaggcgcttctagggcggatttaaaaagatgaaggagctgaggacaccagaagacccttgcctgtgtggcgaaaaaaaaaagtgagtaaacacgaaaatcgagtcaacttgtccaagcatatcctccctgtgagcggggccccctatcgcgtacagtttccagacatcccccccccccccccccctttttagtgatcaagtaaccacaggcaggggaagaacagaaacatggacttgtaagaaaaacgagaatttaaccgagagctacgagaccgagacttcccagtcagtggagacaaaaggaaggcagaaggaaaggacctgtgtggatcattccaacggcgggcagctcaaggcaaaaaaccgattagcttaaacacacaattaatgagaatcttaacaagagcgtagaagaccaaccagcaagtcagtagagacaagaggaaaacagaaggacaggactatgtggcccaaaccgacggcggtcagctcaagttaaaaaacacaggcctagcctagttacacaattcacataaacgagaaaagactagggcagcgtcaatccctaagtgaaaaaacctagtaacaaagctaaacactgcccgagaagccccacaagtacgttaaattaataaaataaaaggaggatagcctagggcttgaccgacattttcaccagaaccacgtatccacgagtcaagtaggcccggggaaacgaaaaggaactgacaaaagcgtgaaccatgcgaacgaaatacaagaccaccaccaccaactatggacaagtttaataaacaagtcagaagggctataggtcagttgagaccaaagcagcatgtttgtgagagaataaaggctatgtggcctatgctcacacaaagcagaatccagagaaacttcatgctcaagtcttgtaaaacatcgacacgtagtcatatgaaaaaaaacaataaaacaaaaagtcacaaagggaaagaaacacaatgcatcccgcgggaagcatatttccccccccccccccccccccaggtacgttaagggtagttaaactgaacatgaacccgaaaagcgagggtagaatagacacacaacgaccgctacgcggcgttgaggaccaaccaccccgaagaaaacaaataaataaacaagtctccagcactacgcgcacacaccttaaacacgccataaagccgtagtaaagtgctgcctacatcactgaacatccttctaaaacctcaacagcctgaaaaggctcacactcactaatagttgaagcgaaggggatgcaaagcaggcactcgcgaagcacagacaaaaaaggcgtgtgacatcgacggtgggcgcgaagtgactgatactttggcaggtcctggcacaggctcatagaacatggagcatggctcagaggagagcagctagattaaatgggtaactataacaattctttctctccttcgctatctcttctttcctagtcgtctcggagtgtgtacaacgtgcctagtagtgaattgaggtgcaactctagagattatttggttacttcgcgtgagtaccgataaatcggcccgctgtggtagcggctgagatcataagccctacgttggaaacgtagagactgctannnnnnnnnnnnnnnnnnnnnnnnnnnnnnnnnnnnnnnnnnnnnnnnnnnnnnnnnnnnnnnnnnnnnnnnnnnnnnnnnnnnnnnnnnnnnnnnnnnnnnnnnnnnnnnnnnnnnnnnnnnnnnnnnnnnnnnnnnnnnnnnnnnnnnnnnnnnnnnnnnnnnnnnnnnnnnnnnnnnnnnnnnnnnnnnnnnnnnnnnnnnnnnnnnnnnnnnnnnnnnnnnnnnnnnnnnnnnnnnnnnnnnnnnnnnnnnnnnnnnnnnnnnnnnnnnnnnnnnnnnnnnnnnnnnnnnnnnnnnnnnnnnnnnnnnnnnnnnnnnnnnnnnnnnnnnnnnnnnnnnnnnnnnnnnnnnnnnnnnnnnnnnnnnnnnnnnnnnnnnnnnnnnnnnnnnnnnnnnnnnnnnnnnnnnnnnnnnnnnnnnnnnnnnnnnnnnnnnnnnnnnnnnnnnnnnnnnnnnnnnnnnnnnnnnnnnnnnnnnnnnnnnnnnnnnnnnnnnnntttagcagaatgcttcacaacactttgaccaatgaccctgtttatgtaacttattctgattcgaaaaaactttgacttttcctggattcttctacattatctttatcgacattataaagaggagtcaaggtggaaaagaaacgcgttttctggttaactaaagtttattgtaaaacaatcataccacaccatgcacacacgtgacggaggtgtgagtagaacggctctaaataaaaaagggtcgtatataaccccgaagttaccctaaaacaatgtaaatgaaatacaaaaaactcaccaaattcaactttattaacccttcagcgggtaaatgaccttatggggatatatgcggtagggttggaattagaatgctttaactttagcagaatgcttcacaacactttgacctatgaccctgtttatgtaacttattcggattaaaaaaaaaaaattgactaattaaaactgatgttttttttactagattgaccatgtttatataactttatatatagatatattttatttttatatattactctcggatggccgtaaaggcctctcaactgtgcaattccgtgataggggatctactcgcaaaaagaagaaaggacgaccggagtatctccggtggtgacagaatggcccgactttaccaaaatgaacacgttcgtgcaactattcacccaaggatgcgaagccaagaagaggaggaaacccaatccggcgatctccgacacgtgggagagacggttccttagcgcaagttacctgacccaaccccgttatcattcggattacaatctcatcaattactgcgccaagacctaccagacgtgtttcaacaacaacctcgcgctaaacttcgtatcccgtcagagacacgccatatatttctacctcaaaaacaaccaaacgggggagaagacgacacccaccgctccgctcgtgtacgccctgcagactctcgtgaatggctggaagtacgtcagaaggacctactccgcgaaccaaatggcggaactgaaagatcggcactcggcgttcattgaccggcacgcgacgtatctcgggaagccagccctgagcgggggccggtggcttacctgcggtactacggttttctcaagcgggagtattccgagtcaaccaaactcagaaacgtcccattggctccgaccaacgtgttcaaggcccactatgtggactttgacgcggtgggagtgaagggcctgtgtcgagaactgggcatcccgtcgggagaactgaaagaaaccgaagaagggtgggggttcattttcgacctgaaacggataagaagaatgggagggaacgagaagtggacgttcgatcggtgcgtgtcgaccgacggcgtggcctgttcgatccgatactacaggtataaaaaaaacgacccgggaaccggcaccgctcacaagaggaagaagaaaaatgacgggatcgtcgccttccccaagggtacggctgaagtcatcaacaacaacagcaacactatcgtcgtatcgttggaaggtaaatggatcatcggtgtggatcccggacgaaagaacattgccttttgcgtagagttgtaccccgaaactcgaaagagtttcccccaacgggaagctggccaaactgatgagagagagagccggcgccggacatttcaccgctgtgaacgagtggaacaccttcaaagtgtgtcatcgttgtaagggtcctctcagcccggtgggtttcgtgcaagttcaaaacgaagacaaaggagaaacggaagaagaaccaaaagttaccgataaattgatctatctgcgaggtttgcgtcgttgctcggccccgagtaataatttcaacgaagtagtcactcaaaggagaaaaagacaaacaagaatcggcggtagtgtctctagtcaacaacagagtagtaaatttccgatcgggggagcctttctagacagagacagtaacgccgccgccaatattgctcagaaacttttcctggattcttctacgttgtcttctttatccacattacaaagaggagtcaaggtggaaaagaaacgcgttttctggttaaataaagtttattgtaaaaaaaaaaaaaaagaccacaccgtgcacacacgtgacggaggtgtgagtagtacggctctaaataaaaaagggtcgtatataaccccgaagcggccaaacaatatttattgacccttaccacattcggattggtgagtcgtttgcccgctaaagggttaactctcagggaatagtcattctcaatgtatgattttttaataaaaaagtttattttacaataccattcaagtggtttaaagtcgatataggatactacatgttctatctcaccctcggatatggcctgcctaccatgactgaaatttataaaaaggctcattagtacgttggccctagcattatgggtctgacgcggaatttgatatcttcacgatagtcctcaaaccccccaaccagcacccctttcatttgtacactggagtaatcccaacatggtaggtgaattaggaggtcttcttcccttatagtagtagttgttccaaagccaaagtgatgaccgagaccccggtggtgcattgttgtcccgttccagaagtctgctcttgtataggtagatgccgtcatgtgggaaccaaccgggtcctacacgatttgttactctgaggatgagtttgcgaaaagagtatcgtgtcggtagtagtaccaacacaaggtatttgggaagacgcatacctacgaacctgctggggtgttaggtagattatcttgatttgtttattcatcaggaatccaggaggaagtcaattgtctggatggtaggaggtgcaggtataatagggaaggggtggtggtggtggtgtggtggtggtggcagaaactttagttttcttcatcggagggacataatccttagtttgatccatcggttgcttaaccgccatggttggaggtgaaggtataatagggaaacgggcagtggtggcggcagaaaccttagttttcttcattggagggacagaatcctgagtttgatccattggtcgcttaaccgccataaggttggtaataataacaggtaatatggggtcgacacgtataatggctgctagtgaggatatgcggcccaggtcccggatagttggtgttgctgaacggtcacacccactaccacatatccgaacaagggaacgggaaaagcccccagctaggagtacaaaggaaatcaagcaacaacagatctagtgacccttctaggttgcttgtcctccaaaacactgaggatcaagtgtccaaacagtggtttagagtgggtaagggaacattggaaagggaattactgccctggaaactaatgtccgtggcaggattaggaagttagtaggggacagatgggttagtaactgagggggggataaaataaagttattcatttacaaacgcagtcagtcgcgggtttgatgagagatatttgtctaggcggagtttaaatgaatcaacggtgctgcagtctataacgtttcggggaagcccattccacaagttgacaactcgattgaagaagaaattcttagattcgtgcgagttaaaagatttaccaataattttgcaaccgttttcccgcgtgtaattagattggtcgatagtgaagtacttactacagttcatattgtcgatgcctttgatgattttgaacacttgaattaagtcacctcttaatctgcgctgggttaaaggaaatagatttaattctctaagacgctcttcgtatggtttgttctttaggctaggtatcattttggtaactctacgttgaactcgttctagcttgtttatatcttttttttggtaataagggcaccaggattgaacgcagtattccagaagagggcggactaaggaattgtaaagggttaggataacttctttggatttatgctcaaatgacctgcctataaagccaattattttgtttgccttcttaacaacttctgaacattgttgactcggttttaggttactcgatattgttactcccagatcggtttctctgtttacattcttaagctgagtgccattcatcgaatagtttgctttctcatttaggtatccgatatgtagtactttacatttatccgcattgaaactcatttgccaaatttgggcccaacatgacaatttatctagattgtgttgcatatcgtcaacttgttcttttgagagtacgctatttgcaatttttgtatcgtcagcaaattttgagattgtacaggtgagaccctcatctatgtcgttgatgtaaattagaaagagaattggtcctagtaccgatccctggggtaccccgctacttacattggtccatttagatgccttaccgtttatgactactctttgctttctgttgctgagccaattttctatccatttcaacacaccgtcttgtattccatgcgcttttagttttagcagtaaacgtttgtggggaactttgtcaaaggccttttgaaaatcaaggtatataatatctacagctttactctcatcgtagaggttgaggatatcgtggaagaagtctaagaggtttgttaaacaggaacgttttttacgaaagccgtgttgagtatctttaagtatgttattttcctctaagtgatttacgagtctgtctcgtatgaccgtttctagcattttacatacaactgaggttaagctaattggacgatagttactgggtaggatttgctgcctttttttaatatcggtgttacgttggctagcttccactgatcagacatagttccagactgcaaggatttattgaattgtaatgtcagtggtttggagagctcatccttagcttcctttagaactctaggcgatattgtatcagattttcaaagaaccatgggggtgagatgaggagagattcgtaacaagatgaagggcctggacgaaaatgagctggaaagaagaagactggatgttcaacagaatcagattaaaatgattatgaactcgacctacggtcttatggcattaaacaacaaacccctggctagtttgattacccaaatcggccggagaaccattgctaatatacagatagcgggacaattaattgataaaaattgtataacttcttatggggacacagacagctgtttcttttaaatgaatgatccaaccattcggaggagtatcaccccggataaaacctatcttgatgttgatttattactcgaaattgagagtcaacaaaaatgtattgatcaaatttcatgcgtattaaaaggcttaaatcagtcctcatttgacatgcccgggattaatgttatgaaacttttacccgagaaaattatattgttggcaaatatttggggaaaaaaaagttacgtcttactatattggcgggatgattccactccctatcgagacctaataaaggccctttccgaggggaatacgattactagcaatctcttccaaattatacctagatcggaatcgagcctattaaaagtgcggcgcggctcgacgcacattctaagagttaatatatggggcattgtcaatttctatctcaatcgttccctaaagacggacaataatgttgtggattatgcgagcctcatgggaggtactccgttggacgatgtcgttaaagacgccgaacgatatttggatatgtattataaaggtatttttgttaagggggactgtaattatctagagttggcaattaattatattacccaaaataaacaaatattttcctcattataagctgggtcatattctggccaagttgattaagaacattattatttttaataatagtttcacagacatgtcatattggaaaagtatccgcaaggagacccccattagtccctacgatatagttctggaggactataataaggatcccgtattattccccgaattgaaattgggtatcaaatcattatttggaaatatggtttacgtgaataatctttacgagctgagatctaacgattagggggtaaagtggtttaccactacacatcagaaaaaaaaaagttggaatacacagacaatgtgtggcattctatcgggtaatagtatactccaaaaatcggtggtggtgaatgtctttaaaattgttgtagacgccatccaaaaattatacctcggactacaaaatcaatttaaaactaagttatcattctcgtttcatcgagataatatgaatggtgtatgttttcagtcagaagagattgaagccaaattaaagattactaatataaccatgcccgataaacacgatattgcaaccataatgaaccattttaattgctgcgaggatttagctatagagatacagagcgcgtcctcgcatcaggtgctatttatgaatttaatggagacaaccaagcctcgctctgcgttcatgtcgtgcagtaacgaggcgtgtcaaaagattcacaaatattttctcgaaaatgtgaatataaactgtcgtcacgataagaaagtatttacgcaaatgaatcccgaatcatataaagagattaaaattaatagtatcatctttactaagatataagttggatattaatgatttaattggctaatgtatcgataccattttcggatatgttaaatactgtaaactttccattgacacctatcaacattttataaatgttatggggcgtcacatcttgcaaggatgtgtgtttatttacactagatacccacatgtatatagttctcatatattacgttgcaaagttggttaaaggattaactttcatgacacccgatggagaattatgcaatcagttaaaacaattcaagtattattctaaagacaggaatgcctttgtttatataaccaatcatgaaaaaatacatcatcgatcgaaacagatgaagatagatacatatttcaaaaaaatgcaaaaaataggacaagtagaattggatacaaaaacccacggagatggaccgggaatatatcattttaatattgtatcttccattacaaacctcgccttgacacgttttaccttgttagggggcatcaccctataaatatttatatttcatttatattatattatacctatcaagaatgatattaattattttgattgtcctaatattcactcttatatatcattttatatataatcaacaacaacaacccaaaaagaataaagaggacctactggattttaaaaatatgatggcgcaaattgtgactaatgaggttaatatctatgaaccattatatattgaggtcatggaccaatataatataatgaaaagagaagaccgtgtagaagcagacaactgtttttataaatgatataaaacctatgaaaattgcaaatgataagatgcaccaatatcgtatacaaattcagcaaaagcttagacggaagatgtattctaacttaccactactagaacttcagagtgcaatttttgaatctactataaacattgttcaatttatggatagtgtgtgtatactcagaaactgtattgataattggaaccaaaaaaaaaaaattacaacaataatttattcgttttgtcttttcactatggatactggatttacaacattatccttaaacatttgtatcgcttgagaatattgggtccaatcaccccccccccccccagtttgcaccctattttgtatggaaatataatatgtttgtatggatttttggttgaatagctttgtatttgctgtaatccaagtttaaaccatttcaatcgattttccggcgtatcttgttctattcctgttcggagatggtcatcaatatctgggtaagccaatatattccgagaaaaaaaacatccactctttcccatataaaattgtccgaaaatatttataatgatggggtttttcgtgagtatagggggattgcatattttaatatcacccggtttggaccgatcggtaacaacggcgcgattataatttttgattggtcgtctgtgagcgtaaacttcactatagggatattttcctcccagggctttggatagtatgtgtgacctaatggcacaacaattcaatatctgtactataatgtaatctgtattggtataggttatatctgtcacacttcccggtgtagttgtcaggttgtccatgttaatgtgcaccttttaaatatatttgtcatccttatatatacatttttcccattttacccaaacttttttactgtagaaaaaaaaatggaagggcccactcggtgaaccaattttgggaactgtaaagatcggcactcggcgccgaaacatcagtcggacccagaaactggaaaagggtccacttacctgaacgctatagcagaccaagactgcgaagaagttgaggaggctcaagtttcgaacgtgctgtcttggccagaaaactctgaatgtgttcgtccagagaactctgtttggcggcgataaccattcccggtttcacgtcgcgtacgggttggccaagttctcgccccccaatgggaagttagttggtcaggagagaaatgaaaggagttttctggttaaatcaaatttattgtaaaacaaatatatatagtacggctctaaataaagggccgtatataaaaccccgaatgtagatttatttttttcattatttatacaattaggcgatggctgattgtaatactagtttactcattttacctaaaaaaaaatcattagaaaataaaatattaaatattctcgataaccaccaacagaaaataaatgactacatgactcctgaagagtcccatcttttcaaggctttgacattctatcataaaataaaaaacatggacgataaaagaattacatttcttaacctttatttttttaatcgagcccttttcagaggactagaatgtcaattatatttaacatattttttttaaatatgtttctttgaattgtcaatgttgaatatattggggcagcataataataataataaaaataataattatgatgatgttaagtgtaatgacataaaacaacgaatagcgctcaagtttattttggtgtcacatttagttacaaattgtaaatcaatcgagttcaccattcaccagcaaaatatcttcacaaaacaatatgataccattttggataaatctggatacaaatctgaactagatgtattatacaagacccaaatccaatcacactatgataataataatgatcaaaatccaattgtttctctcaataactctaccaattatgttatcgtcaactctgaccattttaagctttccactcgcaactttgatttctcttgggattcgccagaattgagtgttagcaatatactaatccgatatgaagatgtaaatgggggacaattagactgtgcactaaacgaacaccacaagataatggaaggctatgctcagtccctggaatggattaaagacctagtcggaagtcaaaatagtataaatgagccaaataatgaagttaaggaaattgataaattaaatttacatctaaatttggtatgttatatatcatctgatttgttaatgttagatgtcataaaacacatataatgatgacagatttaatagatatgacccttttccgtttttcaactatatacaatatgttaaataaatgtataacaattatccataaaagtaattgtagtgatattattaagataaattttaaaaattatatccttgaacaattgaatgtttatacctttaaaattcatggtatttatcaatacaaacacgcgacaactaacaccaccaatactaataccggtaaacccatcaggttacggaacggtaacattttaacggcctccgaggtaaattccataaagacttgtcgatgcgaagatggagagtcgcattcagatttgggaagagataatatgtctatagaggctttttatgcaagaaaaacccaagagttaggatgtttgacttttggcaatagattagaatctgatgtttgtgagctttacaatccattaacggatcccgctttgttaatgagggatgacatgtctaaaaatacagaggtaggacagaaaaatatgatctacataacaccaaccctctatacggaggtaccccattccctgagacatttaatacagaaaaataagtctcatatgtttatcgtgttaaaaataggcatactcatatttagaatatttaatttagaagatgaatttctaaaaagcgtggaaacattattactaaccaaatatgagactaacaaactcgaaaaaaatcacattaatgatttatgcagtgtgttgaatgaaacagatacgtcaaatcatatattcatatatttaaataagctatttggagttgacactgtacaatgtattcgtcacgcgcaatatacaacctccacgggtaagaatgctaaatatacggctttaggaaacggaattacatttcaaaagctggtttacattatgcattttctgcttagggaaactcaaaatattatagaaaaaaaactctatgggtggtggtggtggtggttggggtggaggatacctaccatttcattgtttcaattgaaatagttctgaaaaccaagttgctttttaatggaaatggtagatacaatcgctatggcaactttcgtttcaaattcccgatatcccggtaaagccatttgctcactaaagggctttcttacgccttcgtcggtgcttgactctggtggcggggctagtagattctgggatgttgctgggggtggtaaaagtatgcccggtggttatattgttctcaaaatcgtctccggtgatggtactgacgtcggcgctggtactgatgacaatattatcctcagaatcggcgttgacactactagccccaaaatcaactccggtggtgctatagagcggaatgttgctgctgttggtagattcggtggtggaactcgtcgttattttcggagtggtagcatcattggtagaagaattgaacaaatgaacattggtgttgagcattattatggtgagtgggttggtagattccgggatgttgctggcggtggtaaaaatatcctcggtgtttatattattctcaaaatcgtctccggtgatggtactgacgtcggcgctggtactggtgacaatattatcctcagaattgtctccggtggtggtggtttcggcgttgacactactagactcaaaatcaactccggcggtgctatagagcggaatgttgctgctgttggtagattcggtggtggaactcatcgttattttcggagtggtaacatcattggtagaagaaatgagccaattaataaagggatttatattggtgttgggcattggggggttggtagattccgggatgttgctggcggtggtaaaaatatcctcggtggttatattgttctcaaagctggtactggtgacaatattatacccagaatcgtctccggtagtggtgtcggcgttaaaatcatctccggcggcggtggtggtagaagattcggtgttcggagtggtagcatcattgaaccagagacttatattggtgttgagcattgtttcctcctgaatggtggtgctggcgttatcatcgtatccggtggtataagaagaagattcggaagaaatccaataatgatcaggaa

SEQ ID NO: 153 - DNA, 20774 bp, unidentified
  source 1..20774: mol_type = other DNA
  variation 10735..10754: note = n is any nucleotide
  misc_feature 1..20774: note = Fanzor polypeptide
  variation 7433..9493: note = n is any nucleotide
  variation 12357..14349: note = n is any nucleotide
aggatatttttttgtatcaagagatgagtactctaataaggttttttgtaaaacctcaaaggttgaagcttatcatgagtgcactagataaataaattccattacactcttagggggtgctttcctattctctgctacctttactatggatagaatatgcaaatgtgcagtttttctgtgaggtccactattcggttagacgagtatagtgaaatcaagtcaaaatgcaaaacctgtagaaccaggttggactcgtgcagcttggttcccttggtctatattggtgcagtggtttgggcttggcttgagatcctggaggtcgctggatcaatacccggtggggacaaaatttgagaaagtcgaaaaaaccgaaagttgggtggcttggggtaattgtcgcgtgcaagcgcttcttgggactcgagacataatcaaggaactggcatattccgctctaccttcgggtacgtctcacatagggtcaggcttggaatttgacgggtggaagttgctaccacccatgtataactctgcataagccgtttcaaggagccggatgggattattccttgtgtacgaacgttcccggttggcattctcagcttggtgtaggcttcttcaaatcttgtagtcttcataataaccattgtgtcaggtagtgccttcttcaaattcactcgactctgtcgtgctggtgtcaaagccagcgtcttgtatcagcctctttagctgacgcaagaccagagccgagtgtctttggctttttacttgtagttgctgcttgtacgcgtggatgtggagctggagaagtgcttgtatcctggcttgtgtatcaactgggttggggacttggtcgtggaaacggatatcattgcggtgcatccatatgcagcgagtcacaatggctcgcacaaagttgagcaccacaaagagagtgtatccgtatttgtgtttggcttcctgggtaggtttgagacttgtaaagtagaccaaggtgctccaggtcaactcgcttgtaaacgctctttggagaggctgtataaatgggtcccataaccgcgaggcaaagggacagagccaaaagagatgctgagctgtctcgagatgttcacagtcaaaatgacaagttgtcttggcgtcttggatgtgctggaatcgatagcctaagtgcaaggcattgtgctggagtcgatagagaaaatcggcgtagactgggaggaggtgcttgttcagcttgatatcgcgtttccagaagtcgggttcaggatcttccgagactcctaatcgctgcaatggcagcaaagggggtcttggagacttgagcacgttccggatcttggcaactgtgaggtcttctagggggtggtctccaataacccagttatggaaagcacttgcaaaggcttgacttggacgagggccgattggagggtcgagaaggactcgaagtgcaacatcacagtctacgaggaagttcctgcaatagcgtgtgttgtatgctcttgagtcgcctggttgctggattgctgtggcaagtgccgccggtgttggcgtactaccacagaggccgtatatgtcttctgccgtgtagagctggagttgaccgagtctctgcacaagtgccgagggtcttgtagctaatgtgcggtcttggcttccatgtcgtagtgtggcgttgtgcaatagcagcatagacaataagtcgaattcgcttgtgctggctcgtatcttgggtctcaactttgtatgccagacaaagagcacctggtgccagaagctgtttagagcggaccatcgattttcacgccgagtgctggcgtggttgggactcgtagttactggagcgtacaggatatcgaggggtcggccccatggagtcatagcctgctgaaagacttgaacaacaggggagacccaactgggaagcgagtggtggcactttcgcacactcttgaccacacgtacaagtgcatgtacttgtagcgcgttcaccgagtcttctatctgtgtgagaccgagtcctccttgggatcttggagtgtaccaccagtctgtggccaggatagctgatagtcgggagctcgaagtgctgagtcactgaggaaagtcgcgatgacacccttgatttgatcttgaaagccggattgcgggatatgacacacactggctgtgtaccagagcgtgggtagcacaatttgctggagcaacgccactcggccgttcaaagtccttgcgcggtgcttccatactgtacaacggagctggatacttgcaatgaggtggtgcagtcgatctgtattggagagacgcggtccataacgaataccgagaagcttggcttcaccagtattgtcaatgacttgtactccgagttgctgtagctgagtctcgagttcttcatcttcatctctccattctcgaaaaggtagtatgacagtcttgtgcgtgttgagcttcatcccggccgccgagcaaaagtcttggacacgttgtagaaactcgggtgcaagagagagatcagtgaggagacctgtgcaatcatctgcaaagctgataactgtgtggggttcctctgaagctcgtaacttgagaccacgggacttgaactggactcggaggtagttcaatagcggttcaatgtagagcacaaataaggctggcgagagtggatcaccttgccgaactcctgcaccgagtgcgaaatgaggcaatggagcgccattgaagagaatcgagacgatagtgcttcgaatcatcactcggatccattcccggaaagtcggaccaaacccaaagtgcctcagtatcatctcgagtgcatcccagacaacactgtcaaaggctttggcaaagtcgagtaggagtgcacctgccatttcttggtttcgttggaatagatgctggagagcttggaaccggagatgcgcgttacgaatatcacgtcctgggacgaatccatactgatccgtgtggagcaacttgggcaaaattgactgtaacctcttggacaggattttcggtccgagttttgcatcgatgttcaatagcgtgataggccgatagttactgggcacatgtcggtcaccactcttgtataggagcgagatctgtcctcttctctggaacttggtcattttaccgagttggaattgagacgagtacaccacttcgagtatcttgctccaaagctgaatgtccacgttgtagtacgcaagcgggagaccgtctggacctggagctttgttgggtgttgtgtgtttcagtgcatagcagaagtcattcgcagtgaacggactatctagcatatgctggtcttctgtagtcagtctggtcttggtatgctggaggattctcgatagcttgagtggattccactttggcttagagtgagaatactcacgagatggcgagcaatagataccactccagtaccggttgatgtaatgggctatacctagccattacatgaaggtgcggctgtgccctactttagtgttggacacaccaccttcagcgtgcattgtggtagcaaataacaaagggattacggtacaacagatcccacatgcacgtgtgacgtcatctgatgatgtcacaagtatccatgtactaatcaagtacagagtgatggttccgacttgggaatctacactggtgacgagaccgacgtgtctctatcctctgaagtgagtggctcccgccaatcactttgcagggaatctctgcggtacttcaagttcaagttcccagcagatcccctgggttcaacctcagtgtacccaaggttttatatatcagattcataggttttatttctgcatgtgtaggttttagttgtaaaacctctaggatctctagtggtgtttcatatgtagtgtcaggaaccataaccacattttaattcagttgcaattttacctccaagtcctcaagtcgtcttctctccctccaagtcgggagatcgcttcctcgttgcacaagcgtgtgtgccgtgtattgggaactgttgtgaacagcgtcccattacacctggtagcacttcgagcggtccttccaacgacccagtgaagtgaaaggtttgacgacgcggctttaagcacgtcgcgcattcctgttcaagacctactcttacccatgtccgggaacatggaaggagttgatgtgccactcggttcagcagtaccgcaaactgtcgagttgacgaatgagtatttccctcatttgtctactcatgagtggtcagcgctggagcggatgagagatgtcatcggggaggctgctgtggtcagcctgcttcgatcggcatctcctgaagaccaaaagagcgctgcggtcagtttcatgcaccacgagattgtgatctcgaaagcaggtcgcaaccctgtttcgtcttcaagacgatgcctctgaagctgaacgtgtctccgtatcgcggcggagagaacgagcctctttcgagatggttcgttgagttggatgcagcaatgtctgcaagacaactccgcgacccctcgcagcaagtgttgttcgcaatgtccaaccttgcgggtcgtgcgaagagctgggcttatgggaagcgtttggccgatccaaactgcttctatagctacgacaatttcaaggcagaactcaagatggcgtttgaaccaccgcagagtgagttccgtgcacgcgccgagtttctcaagcttcgccaaggtcgtttcgatctacactcatatgctcagcgagctcgttatctggtctcgagcattgtggacgagccgattgacgtcccaacgcaagttgtgacgttcatgacgggtctgaacgacggtccaatccggaaccaattgttccgtgagtacccaaagacccttgaagaagccatcagccgcgcgatgcaagaagagtttagcatcaaacaagccaagttccaaggttttccgtcaagaccaccaaggcaatcgaacgtcgttcatgatggtccagagccaatggacatctcgtacatttccactcctggaaatgaacgtcctcacaacgatggaaagtgcttccgttgtgggaagtcgggccacttcgctcgaaactgcaaagtgtctttgcctgatcggcaaacggcacagggctcgcgctcgaacaactacggccgtagtaatggtcgtcggttcgatcgttcccaaaggtcaaaaaacgggaacgaccagtaggggcggggcctcctactgggctcgagaagaggactgtggatgttgtggaaacacaggactctggccccaatgtgcatgatgcacatgcagtttccacgagtgagagcagtgtcagtcaaacgtcaagtttgatcgttctcaaagttcatttaggcggtattgcaacgcctctacgtgctttagttgacactggtgcgtcgaacaactttgttcgaaatgaagtgatcaccaggcacaacatctctgtgcctgttgcgaatgaagagaagatgatgattgttcggttggccaacgggtcaactgtgaagatgccaaagcgagttgttcgcttggcaatgaagtatgaagatttccgaggtgaagacgagttcattttactcgacctcgatgacaagtttgatatcatcctgggcatgccatggttgaagcgttaccaacctagcattgactggatgaagatgaagatctccgttgacaagtcgtgcatcgccgacttgagctgcatgacaacggatgaagtggtatgggtttacacatctgtggaagaagtcccagatggcccttgtgatattgcggtgtgcgatggccccccatgctcacaagcggcacccattttgaagaagacgaacggaggtggagcagtcaggcgccataaaaagactgtctcctttgccatcgacgacagagttgcgtgcgatggtagtgtgaagaacgacgggaaaagaggcagagacccatcccaagacaagaagaagaagaccagcaagaagagtgttccgccaagaattttgagtgcccctgatcaaggtacaagtcaagatgacgaaggaagtgtccaagcacaagacatttcaagcgagtttgtgaacgttctggtttcgaacgaagatggtgacgtcgatgtaatccatcacatgaagattgaaaatcccccaagttcagtcgaagaattgatttccttgccatggatgagcaagaagacgctgaagcgtagcctaacgagaggcgaaatctcgcagatctgcatgatcgtcgatgttgacgatgcagaggacatcggcacggtatcagcaacggaagccgaagtgctcgatgaaaagacacggaacgaaaggttcgaggagcagtcgtgggatgctctcagatgaccccgtgtatgcacttgccaggaatttgaagacattttcccagacaaggtgccggacgaattgccatttgatagaggcattcgtcacgagattgacgtacttcctggcacgaagtactgtatcacacgacagtggccgttgccaaaggaacaagtcgaggcaattgacgagttctttgcgcaacgcgcgaaggctgggcatgtgcgggagagcaagtctccgcattgtagtcccactttttgtgtgaagaaggcgactggcggatggcgcattgttcacgctttcaacaagctgaacgacgcgactattcctgctcagactccggttccacgcaaggatatgatccttgatgggatggttggcagcaccgtctttagtgctatcgatctgaaagatggattctatcagattcgaatgcgcaaagacgatgtcccactaactgcagtgagtacccctagcggtatgctgtgggaatggttagtgatgccacagggactgaagaatgcgcccgcgaccttcaatcgaatggtcacgaacgttcttcgtcctttacgaacatttgcaccgagttacttcgacgatatcttcgttcatagtaaggccacaaatgggagatctgatgtcgatgttcatcttgatcatcttcgtcaagttttccaggtcatgcgtgaaaacaaactttacgcaaacttgaagaagtgcatgttcttcgcccccgagatccctgttctcggatgttttgtgggcaagaacggtgttcgagttgatccggagaaggtcaaagctattgacgattggcctgtgccaaagaacgtcaaacagctacgccaatggttgggtctggccaactatttgcacaagtacacgcgcaattatgcagcgttagtgcaacccctcacacagctcttgaagaaagacgttgagtggaagtggtcgaaagaccatcaaacggcgttcgaagaagtcaagaggagtcttcgtgaagctcctgtgttggctctaccgaatcacgacaagccgttccacgtcgtctgtgatgcgagcgattatgccatcggttgcgcattgatgcaacacgatgatgagggtcgannnnnnnnnnnnnnnnnnnnnnnnnnnnnnnnnnnnnnnnnnnnnnnnnnnnnnnnnnnnnnnnnnnnnnnnnnnnnnnnnnnnnnnnnnnnnnnnnnnnnnnnnnnnnnnnnnnnnnnnnnnnnnnnnnnnnnnnnnnnnnnnnnnnnnnnnnnnnnnnnnnnnnnnnnnnnnnnnnnnnnnnnnnnnnnnnnnnnnnnnnnnnnnnnnnnnnnnnnnnnnnnnnnnnnnnnnnnnnnnnnnnnnnnnnnnnnnnnnnnnnnnnnnnnnnnnnnnnnnnnnnnnnnnnnnnnnnnnnnnnnnnnnnnnnnnnnnnnnnnnnnnnnnnnnnnnnnnnnnnnnnnnnnnnnnnnnnnnnnnnnnnnnnnnnnnnnnnnnnnnnnnnnnnnnnnnnnnnnnnnnnnnnnnnnnnnnnnnnnnnnnnnnnnnnnnnnnnnnnnnnnnnnnnnnnnnnnnnnnnnnnnnnnnnnnnnnnnnnnnnnnnnnnnnnnnnnnnnnnnnnnnnnnnnnnnnnnnnnnnnnnnnnnnnnnnnnnnnnnnnnnnnnnnnnnnnnnnnnnnnnnnnnnnnnnnnnnnnnnnnnnnnnnnnnnnnnnnnnnnnnnnnnnnnnnnnnnnnnnnnnnnnnnnnnnnnnnnnnnnnnnnnnnnnnnnnnnnnnnnnnnnnnnnnnnnnnnnnnnnnnnnnnnnnnnnnnnnnnnnnnnnnnnnnnnnnnnnnnnnnnnnnnnnnnnnnnnnnnnnnnnnnnnnnnnnnnnnnnnnnnnnnnnnnnnnnnnnnnnnnnnnnnnnnnnnnnnnnnnnnnnnnnnnnnnnnnnnnnnnnnnnnnnnnnnnnnnnnnnnnnnnnnnnnnnnnnnnnnnnnnnnnnnnnnnnnnnnnnnnnnnnnnnnnnnnnnnnnnnnnnnnnnnnnnnnnnnnnnnnnnnnnnnnnnnnnnnnnnnnnnnnnnnnnnnnnnnnnnnnnnnnnnnnnnnnnnnnnnnnnnnnnnnnnnnnnnnnnnnnnnnnnnnnnnnnnnnnnnnnnnnnnnnnnnnnnnnnnnnnnnnnnnnnnnnnnnnnnnnnnnnnnnnnnnnnnnnnnnnnnnnnnnnnnnnnnnnnnnnnnnnnnnnnnnnnnnnnnnnnnnnnnnnnnnnnnnnnnnnnnnnnnnnnnnnnnnnnnnnnnnnnnnnnnnnnnnnnnnnnnnnnnnnnnnnnnnnnnnnnnnnnnnnnnnnnnnnnnnnnnnnnnnnnnnnnnnnnnnnnnnnnnnnnnnnnnnnnnnnnnnnnnnnnnnnnnnnnnnnnnnnnnnnnnnnnnnnnnnnnnnnnnnnnnnnnnnnnnnnnnnnnnnnnnnnnnnnnnnnnnnnnnnnnnnnnnnnnnnnnnnnnnnnnnnnnnnnnnnnnnnnnnnnnnnnnnnnnnnnnnnnnnnnnnnnnnnnnnnnnnnnnnnnnnnnnnnnnnnnnnnnnnnnnnnnnnnnnnnnnnnnnnnnnnnnnnnnnnnnnnnnnnnnnnnnnnnnnnnnnnnnnnnnnnnnnnnnnnnnnnnnnnnnnnnnnnnnnnnnnnnnnnnnnnnnnnnnnnnnnnnnnnnnnnnnnnnnnnnnnnnnnnnnnnnnnnnnnnnnnnnnnnnnnnnnnnnnnnnnnnnnnnnnnnnnnnnnnnnnnnnnnnnnnnnnnnnnnnnnnnnnnnnnnnnnnnnnnnnnnnnnnnnnnnnnnnnnnnnnnnnnnnnnnnnnnnnnnnnnnnnnnnnnnnnnnnnnnnnnnnnnnnnnnnnnnnnnnnnnnnnnnnnnnnnnnnnnnnnnnnnnnnnnnnnnnnnnnnnnnnnnnnnnnnnnnnnnnnnnnnnnnnnnnnnnnnnnnnnnnnnnnnnnnnnnnnnnnnnnnnnnnnnnnnnnnnnnnnnnnnnnnnnnnnnnnnnnnnnnnnnnnnnnnnnnnnnnnnnnnnnnnnnnnnnnnnnnnnnnnnnnnnnnnnnnnnnnnnnnnnnnnnnnnnnnnnnnnnnnnnnnnnnnnnnnnnnnnnnnnnnnnnnnnnnnnnnnnnnnnnnnnnnnnnnnnnnnnnnnnnnnnnnnnnnnnnnnnnnnnngacttcaaatgtgcagttttttgtgattttgttttcttgggttgtaggggtcgactgcttggttgaaaaccgagaacaagtcaaactctcaaactgacgtaaaatctcccagggaccgctcgcaatgaggcagtataggaaatagtaggcagcactgaagagtcaagatcagagtgcgaagcgaacctcaattcgcggcagctccgaaatgtacacttcgggagagcaatagcactcacagatgagctctaaaagatcgatcccaccaacaagcgtggcagacgaaactgatcactaaccacgtcgtggaaagcaccgagtcgctaatcaaacttcgagaggttcacccgtgtgaactaagggacggtcgaggttgggttggagagggttggcagtcgcttgggaccagctggcgcagaaagtcgatagcaagcgtgggcttgtctattcgacttgtggggtagctggaaaattggaaagtcatgagtgcactagaccatacaataagcaagttcaacaaacagccaatcagagacaggtattcagtcaacactgtgtattcactgcgctttgctggcagatcgctcattttcctttttgctgaagagcaaaatgaagtcaaccaagcgcaaacgaccaccggaagactcggactccgacttcgaagaagacgtcacgccgcgaatcgccagtctgagactgcgcgtggctccaaccgatgagatcgtacaagagtccgaccgcggaagttcttgtgacgagtccgctcctgcagtccgtgaagtgatcatccttgacagctcggacgaggacgacctactcgaagacatccagacaatgactgtccgtcccaagtctgtcaagcgtgcgacgaccagaaagaacgccagtgcgaagaaacccaaggtgtctgccaagacctcacaacaacaagttcgtgttgggaaggagcctgcagcccgcaagaaatcttccggtaccgtactggagaacgcgttcaagaaaggcaagcagttctgcagcatcacgtgtcgtcttgagaccgtctgtccggatcccgacctccgtcagcagatccgcgactgcgtccgacgaatgaaacagatccagatggagtcctggcacctcgcgaacctccacaccctgcggtgtttggaagaaggcatccagcttccgttgtatgatgagacgttcttcgaccaatgttgctctggcgtatcaagcacatcgcgtctcacaacnnnnnnnnnnnnnnnnnnnnggctatacctagccattacatgaaggtgcggctgtgcctactttagtgttggacacaccacttcagcgtgcattgtggtagcaaataacaaagggattacggtacaacagatcccacatgcacgtgtgacgtcatctgatgatgtcacaagtatccatgtactaatcaagtacagagtgatggttccgacttgggaatctacactggtgacgagaccgacgtgtctctatcctctgaagtgagtggctcccgccaatcactttgcagggaatctctgcggtacttcaagttcaagttcccagcagatcccctgggttcaacctcagtgtacccaaggttttatatatcagattcataggttttatttctgcatgtgtaggttttagttgtaaaacctctaggatctctagtggtgtttcatatgtagtgtcaggaaccataaccacattttaattcagttgcaattttacctccaagtcctcaagtcgtcttctctccctccaagtcgggagatcgcttcctcgttgcacaagcgtgtgtgccgtgtattgggaactgttgtgaacagcgtcccattacagttgaattcttcacacatcgagtgcaagtcttctgccgattgtactgggatggtagtcttgtgcaggagcattgggggccggaagaaatacttggtgcacttttcggactggtacaagtcggatgcaaatttttgcttggacttgtggtggtcttcttcttcaatatggactcgtagtttctgttggagcgaactgagggttgttgacacttcttgagacggactgagatgctggaggtgttggagttgattaatacgcatgtgcaggtcttctttctcgacttgtctcttgttcttcttttcgttgaagagctggcgtagatagatgcagtcttgacgcttgtgttcatcgaggagatatcctgggttgtatgtcgatgtaatggtcggatcaattgattccgccagttttatcagggacaacttgagatattcttgcgcctcaggcaattcgatcacccagcttggacatcgccacggtgctcttgttcttggcttgaatagttcagaaccgagggtgaactcgatcccgcagtggtcggctttgttcggctggtgcttccagtcgtgcttgagttgtttgagctgccaattgaatatatcggaactcaataggacgaagtcgatacgagcacttcggttgggactcgtaaattcgcgaacatggggttctgcaggcgccatgcatcaaaaagattcaatgcctgcatccactccaggagttcttgacggccctcacgacgggctcggttgtttgtctgggcttggtcgagctgggtcgagaagactgtgttaaagtctcctagagccatatgtatggcattttcttcaaactgtctggggagactgtcaaagaagcttggtcggtcagttgggtttactggcgcatacactgcgtgaatatacgctggcgagccatccagtgtaccttggagcacgagataccgtgagagagtgtttcgatcactcacttgggtttctgtgatgtcttggatatcttggaccggacaagtgggggtgagnnnnnnnnnnnnnnnnnnnnnnnnnnnnnnnnnnnnnnnnnnnnnnnnnnnnnnnnnnnnnnnnnnnnnnnnnnnnnnnnnnnnnnnnnnnnnnnnnnnnnnnnnnnnnnnnnnnnnnnnnnnnnnnnnnnnnnnnnnnnnnnnnnnnnnnnnnnnnnnnnnnnnnnnnnnnnnnnnnnnnnnnnnnnnnnnnnnnnnnnnnnnnnnnnnnnnnnnnnnnnnnnnnnnnnnnnnnnnnnnnnnnnnnnnnnnnnnnnnnnnnnnnnnnnnnnnnnnnnnnnnnnnnnnnnnnnnnnnnnnnnnnnnnnnnnnnnnnnnnnnnnnnnnnnnnnnnnnnnnnnnnnnnnnnnnnnnnnnnnnnnnnnnnnnnnnnnnnnnnnnnnnnnnnnnnnnnnnnnnnnnnnnnnnnnnnnnnnnnnnnnnnnnnnnnnnnnnnnnnnnnnnnnnnnnnnnnnnnnnnnnnnnnnnnnnnnnnnnnnnnnnnnnnnnnnnnnnnnnnnnnnnnnnnnnnnnnnnnnnnnnnnnnnnnnnnnnnnnnnnnnnnnnnnnnnnnnnnnnnnnnnnnnnnnnnnnnnnnnnnnnnnnnnnnnnnnnnnnnnnnnnnnnnnnnnnnnnnnnnnnnnnnnnnnnnnnnnnnnnnnnnnnnnnnnnnnnnnnnnnnnnnnnnnnnnnnnnnnnnnnnnnnnnnnnnnnnnnnnnnnnnnnnnnnnnnnnnnnnnnnnnnnnnnnnnnnnnnnnnnnnnnnnnnnnnnnnnnnnnnnnnnnnnnnnnnnnnnnnnnnnnnnnnnnnnnnnnnnnnnnnnnnnnnnnnnnnnnnnnnnnnnnnnnnnnnnnnnnnnnnnnnnnnnnnnnnnnnnnnnnnnnnnnnnnnnnnnnnnnnnnnnnnnnnnnnnnnnnnnnnnnnnnnnnnnnnnnnnnnnnnnnnnnnnnnnnnnnnnnnnnnnnnnnnnnnnnnnnnnnnnnnnnnnnnnnnnnnnnnnnnnnnnnnnnnnnnnnnnnnnnnnnnnnnnnnnnnnnnnnnnnnnnnnnnnnnnnnnnnnnnnnnnnnnnnnnnnnnnnnnnnnnnnnnnnnnnnnnnnnnnnnnnnnnnnnnnnnnnnnnnnnnnnnnnnnnnnnnnnnnnnnnnnnnnnnnnnnnnnnnnnnnnnnnnnnnnnnnnnnnnnnnnnnnnnnnnnnnnnnnnnnnnnnnnnnnnnnnnnnnnnnnnnnnnnnnnnnnnnnnnnnnnnnnnnnnnnnnnnnnnnnnnnnnnnnnnnnnnnnnnnnnnnnnnnnnnnnnnnnnnnnnnnnnnnnnnnnnnnnnnnnnnnnnnnnnnnnnnnnnnnnnnnnnnnnnnnnnnnnnnnnnnnnnnnnnnnnnnnnnnnnnnnnnnnnnnnnnnnnnnnnnnnnnnnnnnnnnnnnnnnnnnnnnnnnnnnnnnnnnnnnnnnnnnnnnnnnnnnnnnnnnnnnnnnnnnnnnnnnnnnnnnnnnnnnnnnnnnnnnnnnnnnnnnnnnnnnnnnnnnnnnnnnnnnnnnnnnnnnnnnnnnnnnnnnnnnnnnnnnnnnnnnnnnnnnnnnnnnnnnnnnnnnnnnnnnnnnnnnnnnnnnnnnnnnnnnnnnnnnnnnnnnnnnnnnnnnnnnnnnnnnnnnnnnnnnnnnnnnnnnnnnnnnnnnnnnnnnnnnnnnnnnnnnnnnnnnnnnnnnnnnnnnnnnnnnnnnnnnnnnnnnnnnnnnnnnnnnnnnnnnnnnnnnnnnnnnnnnnnnnnnnnnnnnnnnnnnnnnnnnnnnnnnnnnnnnnnnnnnnnnnnnnnnnnnnnnnnnnnnnnnnnnnnnnnnnnnnnnnnnnnnnnnnnnnnnnnnnnnnnnnnnnnnnnnnnnnnnnnnnnnnnnnnnnnnnnnnnnnnnnnnnnnnnnnnnnnnnnnnnnnnnnnnnnnnnnnnnnnnnnnnnnnnnnnnnnnnnnnnnnnnnnnnnnnnnnnnnnnnnnnnnnnnnnnnnnnnnnnnnnnnnnnnnnnggtgtatccgacgccaaggagaagacgtacttcatggatgctacaactcggaaccgaccaagcttgaggaagtccaagaaatgcgagcgttgctcactccagacggtgtgagttggtgcgaagagtggatcccatggccaaatcttatcacggacgatagcaagatcgagttctacatccgtctcctttggaagttccaacgggtgatagaagaccacatcgaagcgaacccgggaagaagtacgaagggtgtacgggcgttctcactcttcccggtcgctactagctacactgcgtcacacatcaaaatcaacgcgacgacgttagctggtctgtgttctcgtgtgaagaagaaagatcccgagaccggcggtgactgctccatcacgaaatggtggggagtcgaccacatcaagatcgatcacaacgcattcgccgcggagaagtggacggtgatgaggaaggctttcgacatcgatgcgtttgagactttgcgacctgacaccgacgtttccaaggcagacttccgacatatgactgtcgaggagaagtacgctcacgcgagtcacttgtttgcaaaccaagtgacaactgatggatacggcgcgagcgttctgttgttccgaacaaagaacgagctcgatgaggcggagaagcagcagtccgaaaggcttgtccctgaggggtaccgtccagaggtcgtgatcggtctggatccaggcatgcgttccgtgtgtactgcagtgcgcgagcgttttgctccgcggcagatcaagcgagttcgtcggcgttcagtgaggaagaagcgacgacggaaaaggtcgtggattcgacgatacgatggccccaaacgcaagaacggtcgagatatcgtcgaagtgcacgcgaaggagtaccggcatctggccaggttcagaaaacgacgggcgtgggaagaagtactgaagaactccaaccctgagtacgggactgcgattcgggggatgccgtccttcaagacatcaagatacaaggtctacctggaacgtctacattacttctggaagcatgcaggatttctgttggagatctgctggcggaagccgttcctgaagtggaagttctttaacaagcgtagttctcgcatcgcagtggacgcgttggcagcacggattgttcctgatctcagcgtgcagacgtgcattgcatacgggaactggagcagacgagatggaatcaaaggacatgcttccagtccagtcaagggtttacagcaggcgttggcaaagcgcgcaaaggtggtcatcctggatgagttcaagacgagcaagctctgctcgacgtgccaccgcgagctttcgcccgtatcgtacctcgtggaccccgatcttgacaagagacgcaagcgcgcaggcaaaataatctcgcgatatcattccgaggaaaggaagttggtcgagtgtcacgcagtgctgcggtgtgaccagaagaagtgcgaggcctcatactggaaccgagacgtgaacgctgccatcaatatcgtgaactgctcaagtacgagattgaacatggaggacgcatggcggcgtttgcacgagtacaagatcgaagagactgaaaaaaatgcaggctgtatagcctcatcgtggagacgagaacctctccacccaggtattagcgtgagaagacatcgtagacttctctcagtaagctagagtcctgtatattacggattagctagtttttagctagggtgacattctcactgaattccgtaatacctgatagctgcgcatatgcagttgagctcatttcccttcttcgcctgcttttcaatatatatattctttcaacatggtctcaatatatacacaatcctttgatgctctgtttccctattcttgatgcagttgctgctcgtcgtctctccgcggctgtcgctgcgcttccagttggtgcgagtactcgaccaggaagcggttcgagccgacaccaaacacgtcgccgtgcaataaataccggcgtcggctcttctcgccgctcgcacttagcctaacggccgtgccgttcgtgctgtccaggtccgtgatgtagaagccgtcgcctaggtacgagatgacgctgtggcggcccgatattgagccgtcatccgtgatgcagagcgcgttgctggatcgccgaccgagcgtcacggcggttctccctaacgtctggccgatgcccgtcaacggaccttcggtgaagcagatgcgcaggaacggtgtcttggtcgcaggattctcgtcgatcgcaacgacttcaaactctgtgtcgcccagtttcacgcggtcgtggatgcgaaggcgcttcgggacattgggcttcaggaacaggaacgtccccgtcgtactcccgaggtcctgcaggaaatactccttctccatggggtcatactggatctggaaatgataccgactcacgtacgggtcatcagagacgatctggttgctctggtggcgaccgcctcgggcgccattccgcggattcagtacgatcgacttgcccccactcctccgctgctccatcgacggattgctggaattggattgtactgacgagctgcgtcgggcttttgcgggtggcagcagcacattccgctcgggggacagcgacgtcaccacgagcagatcgagctcgtcgatctcgcggtcgacgccgaaatagccccaactgtggcgcctccgatgggcatgcgactgtcgccgctttttagtccgtgtctggtgtctgtcgtggatggctttgatcttttccacaaagccgacaaggcgcttgcccacgcgcttcactgggaagtgcagccgatactcgcgcgacatgatgagcccgaggaaccacgcggccatgatcgcagtcaccagcacataccgaaggtactgtgtcgtgctcagtccactcttcgcaccacctgatgacatgggtgcactcgatgcctgcgacaggacgatccgttgaccaccattctgcgcgaaataatggctcgcttccgtctgcatgtacgcaaaggacgcgacgatcgcggacgagcacgccgtagcgtgcagccagttccacttgaccgtcggctcggggcgcctggacgatgcgccaagaaggatccctgttttactgctgggcggtgtcgtcctgttcgcagcgccgctgctgttgtagctgctgctggaactggatctctcactactgctcgtgctgctgctgctgctgctgcttcggcgggagctcatgggcgtcgacaggaacgtgcgtgtgtgcctctggtgacgtggcgccttcccccctcagtctttgctgctatagtacgtggtatggagagcgcgcttctcctgcgtggcggcgtcggcggcagtgaagagtgccgctggtggcgtgatgtggcttcgcagccccatctcgattgacacaactggacggtgtcatgttgctcgaaggtaacacaatttaaaagtgtagtgatatgcgacgaacgcacaagtgtcacgagtgtaacgtaaaggaataacaaactacacccacgatgtacatgttgcaggaaggtaacgaaagaagaatacaaagggcttgtattcaaggctgcggactttaccgagagcacgatgcttgcgcagcacgcgtcagccccacatcatttcttagaacaccaacagagcattgagcagaatggacctgtggctgctcgcgctcgcgctcattgcagcgtaccccgtggtcgccgcgggcatctgcttcttgttcatctacacggagcgccggcggtacgtgcgccaccacttggtcgcgcagagcgacgtcgcggaccatcactcgggcgagaagaccgtgacgatcggcgtgttccacccgtacgcgaatggcggcggcggcggtgagcgcgtgatgtactgcgcgctggtcgcgctcgtcaagtactttaaagagctcaaggccgagccgacggagacagcgagcggcagtgataacaagccacgcgtgtatcgagtcgaattgctgctgtactctggcgacgacggcctttccaccaaggaactgctcgaccgcgcggccgagcggttcaatctcccggacttgcatcagtatcgagtagatcttcaggttcgcttggtgccgctcgccaaccgcgaggtgctggatccggggctgtacctgcgattcacgctgttctggcagagcattgcgcacatccgattggcgctcacagcgttccgcacgagcgagaaactggggttgtacccgcaagtgtggatcgatacgacgggatgtccgttctcatacctggtagcgagcgtccgctttggatgtaccgtcgtcgcgtacgtgcactacccgatgatctcgaccgacatgattgcgaaagtgcaaacgcgcgccaccgacttcaacaacaacgcgaccgtggcattcagttcgacgcgctcgttcgcaaagtacatctactaccgcatctttgcggccacatacacgcttgtgggcaagtactgcaccgacattgtcatggtgaactcgacgtggacgtacaaccacgtcaagcagctctggggcggcaaacctgcgatcgtgtacccgccgtgcggcagcatggaagagtttatgcagtttgacattgaaaaccgcgagccactggcgttgtcgatctcacaattccgacctgagaagaaccaattgctgcagctgcaagcgatgaaagtgctgctcacaaagtacgcgacaaagatgaacacaacgcacaaggactttaagctgataatgcttggaagctgccgcaatgccgacgatgaagcgcgcatcgagacgctgaaggagcagtgcgtggagctgggtctgacaggtcgcgtggagtttgtcgtgaacgcgagctttgccgagctgaagcagtacctcgcgcgctcgtccgttgggatccacacgatgtacaacgagcattttgggatcggcgtcgtcgaaatgatggcggctgggctgctggtcgtcgccaacaactcgggcgggccggccgccgacattgtgcgtccagacacggggtacctcgcgctcacggcggacgagtacgcggacaagatgctggcgatcctcgagcaggacgcgagtgccgcaagggcgatgcgcgcgcggtgccgccaggcgtcgggtcgtttctccgacagtgagtttggcgcgcagttcattgcggccatggacgccgtcctgcgacgtgtgagcggcaatggtgatcacggccttggcaagaaagccatgtagatcatctacagtagatgtcatcctcactgtttttctttcattgctgccaatcatgtgtcgttattcgtccgtaataccttttttctacgaatcaagtgtcatgaaagattgaaaatgcgactttttcaaccaattagtcatttgcatgttgctatctatgaaaacgtgtcatttcgcgaaaagatcaaatggcgcgcaagacaggcaaggagagtgctgcggatgcgagtgccgccaagcgcgcggcgcgcaaggccagcggaaagagcgccaagcccaagagcctgctcgtgacgatcctcccgtacgtcgtgctcgtcgcggttctcgcggtggcggtcaactatctctacctgcagccagcgcagactacagcaaagaaatcggcggcgaagcgcaacggaagctcgtatctgtcgcgcaaggagatcgtcgaccgcaagcgcgttgatatcccatgctggatgaagaaggttcgtttgctccccctgctgtatatcgtttagtatggtgctcgttcatgattcatgtgcgctattacgaataaatgatagaaaaccaagggctttgtggaaggctgccaccaaatgggcaagtcctgcggccgcgctgtcaaggaccagttcgtgacgcccgaggaggtgatacagctgcgcgagatcgcggaggtcggcatgacgaaccgctcaaagctcggcggacccacgatcatggacgtgaacacggggtacgtgaaggacggtcaggggctcgtcaatatctaccagagccaccgcaacgcgccgccgacgccgcggttcactgcggagcagtttgcgctctaccgtcaagtcatcgagaagatccgattggcgctgatcgaggagttccagctgaagatgctctacttcacggcaccgacgttcatcacgcgcatcgtggggaatgcgtcatggagtccagccgacatgcacgacgagtactggtacgtaggcaatcaaacgatataggcgcacaagcattgactccaaccttgtattattactgcattgcaggcatccgcatgtggataaggacaacacacagcattacgactactcagggctactctacttgtccgactacgaggacgaattcaccggcgggttgtttgcgtttatcgacaagaagagcgagcaaatcgtggaaccggcgcg

SEQ ID NO: 154 - DNA, 20816 bp, Pythium sp.
  variation 10847..20145: note = n is any nucleotide
  source 1..20816: mol_type = other DNA
  variation 6263..6282: note = n is any nucleotide
  variation 1..3978: note = n is any nucleotide
nnnnnnnnnnnnnnnnnnnnnnnnnnnnnnnnnnnnnnnnnnnnnnnnnnnnnnnnnnnnnnnnnnnnnnnnnnnnnnnnnnnnnnnnnnnnnnnnnnnnnnnnnnnnnnnnnnnnnnnnnnnnnnnnnnnnnnnnnnnnnnnnnnnnnnnnnnnnnnnnnnnnnnnnnnnnnnnnnnnnnnnnnnnnnnnnnnnnnnnnnnnnnnnnnnnnnnnnnnnnnnnnnnnnnnnnnnnnnnnnnnnnnnnnnnnnnnnnnnnnnnnnnnnnnnnnnnnnnnnnnnnnnnnnnnnnnnnnnnnnnnnnnnnnnnnnnnnnnnnnnnnnnnnnnnnnnnnnnnnnnnnnnnnnnnnnnnnnnnnnnnnnnnnnnnnnnnnnnnnnnnnnnnnnnnnnnnnnnnnnnnnnnnnnnnnnnnnnnnnnnnnnnnnnnnnnnnnnnnnnnnnnnnnnnnnnnnnnnnnnnnnnnnnnnnnnnnnnnnnnnnnnnnnnnnnnnnnnnnnnnnnnnnnnnnnnnnnnnnnnnnnnnnnnnnnnnnnnnnnnnnnnnnnnnnnnnnnnnnnnnnnnnnnnnnnnnnnnnnnnnnnnnnnnnnnnnnnnnnnnnnnnnnnnnnnnnnnnnnnnnnnnnnnnnnnnnnnnnnnnnnnnnnnnnnnnnnnnnnnnnnnnnnnnnnnnnnnnnnnnnnnnnnnnnnnnnnnnnnnnnnnnnnnnnnnnnnnnnnnnnnnnnnnnnnnnnnnnnnnnnnnnnnnnnnnnnnnnnnnnnnnnnnnnnnnnnnnnnnnnnnnnnnnnnnnnnnnnnnnnnnnnnnnnnnnnnnnnnnnnnnnnnnnnnnnnnnnnnnnnnnnnnnnnnnnnnnnnnnnnnnnnnnnnnnnnnnnnnnnnnnnnnnnnnnnnnnnnnnnnnnnnnnnnnnnnnnnnnnnnnnnnnnnnnnnnnnnnnnnnnnnnnnnnnnnnnnnnnnnnnnnnnnnnnnnnnnnnnnnnnnnnnnnnnnnnnnnnnnnnnnnnnnnnnnnnnnnnnnnnnnnnnnnnnnnnnnnnnnnnnnnnnnnnnnnnnnnnnnnnnnnnnnnnnnnnnnnnnnnnnnnnnnnnnnnnnnnnnnnnnnnnnnnnnnnnnnnnnnnnnnnnnnnnnnnnnnnnnnnnnnnnnnnnnnnnnnnnnnnnnnnnnnnnnnnnnnnnnnnnnnnnnnnnnnnnnnnnnnnnnnnnnnnnnnnnnnnnnnnnnnnnnnnnnnnnnnnnnnnnnnnnnnnnnnnnnnnnnnnnnnnnnnnnnnnnnnnnnnnnnnnnnnnnnnnnnnnnnnnnnnnnnnnnnnnnnnnnnnnnnnnnnnnnnnnnnnnnnnnnnnnnnnnnnnnnnnnnnnnnnnnnnnnnnnnnnnnnnnnnnnnnnnnnnnnnnnnnnnnnnnnnnnnnnnnnnnnnnnnnnnnnnnnnnnnnnnnnnnnnnnnnnnnnnnnnnnnnnnnnnnnnnnnnnnnnnnnnnnnnnnnnnnnnnnnnnnnnnnnnnnnnnnnnnnnnnnnnnnnnnnnnnnnnnnnnnnnnnnnnnnnnnnnnnnnnnnnnnnnnnnnnnnnnnnnnnnnnnnnnnnnnnnnnnnnnnnnnnnnnnnnnnnnnnnnnnnnnnnnnnnnnnnnnnnnnnnnnnnnnnnnnnnnnnnnnnnnnnnnnnnnnnnnnnnnnnnnnnnnnnnnnnnnnnnnnnnnnnnnnnnnnnnnnnnnnnnnnnnnnnnnnnnnnnnnnnnnnnnnnnnnnnnnnnnnnnnnnnnnnnnnnnnnnnnnnnnnnnnnnnnnnnnnnnnnnnnnnnnnnnnnnnnnnnnnnnnnnnnnnnnnnnnnnnnnnnnnnnnnnnnnnnnnnnnnnnnnnnnnnnnnnnnnnnnnnnnnnnnnnnnnnnnnnnnnnnnnnnnnnnnnnnnnnnnnnnnnnnnnnnnnnnnnnnnnnnnnnnnnnnnnnnnnnnnnnnnnnnnnnnnnnnnnnnnnnnnnnnnnnnnnnnnnnnnnnnnnnnnnnnnnnnnnnnnnnnnnnnnnnnnnnnnnnnnnnnnnnnnnnnnnnnnnnnnnnnnnnnnnnnnnnnnnnnnnnnnnnnnnnnnnnnnnnnnnnnnnnnnnnnnnnnnnnnnnnnnnnnnnnnnnnnnnnnnnnnnnnnnnnnnnnnnnnnnnnnnnnnnnnnnnnnnnnnnnnnnnnnnnnnnnnnnnnnnnnnnnnnnnnnnnnnnnnnnnnnnnnnnnnnnnnnnnnnnnnnnnnnnnnnnnnnnnnnnnnnnnnnnnnnnnnnnnnnnnnnnnnnnnnnnnnnnnnnnnnnnnnnnnnnnnnnnnnnnnnnnnnnnnnnnnnnnnnnnnnnnnnnnnnnnnnnnnnnnnnnnnnnnnnnnnnnnnnnnnnnnnnnnnnnnnnnnnnnnnnnnnnnnnnnnnnnnnnnnnnnnnnnnnnnnnnnnnnnnnnnnnnnnnnnnnnnnnnnnnnnnnnnnnnnnnnnnnnnnnnnnnnnnnnnnnnnnnnnnnnnnnnnnnnnnnnnnnnnnnnnnnnnnnnnnnnnnnnnnnnnnnnnnnnnnnnnnnnnnnnnnnnnnnnnnnnnnnnnnnnnnnnnnnnnnnnnnnnnnnnnnnnnnnnnnnnnnnnnnnnnnnnnnnnnnnnnnnnnnnnnnnnnnnnnnnnnnnnnnnnnnnnnnnnnnnnnnnnnnnnnnnnnnnnnnnnnnnnnnnnnnnnnnnnnnnnnnnnnnnnnnnnnnnnnnnnnnnnnnnnnnnnnnnnnnnnnnnnnnnnnnnnnnnnnnnnnnnnnnnnnnnnnnnnnnnnnnnnnnnnnnnnnnnnnnnnnnnnnnnnnnnnnnnnnnnnnnnnnnnnnnnnnnnnnnnnnnnnnnnnnnnnnnnnnnnnnnnnnnnnnnnnnnnnnnnnnnnnnnnnnnnnnnnnnnnnnnnnnnnnnnnnnnnnnnnnnnnnnnnnnnnnnnnnnnnnnnnnnnnnnnnnnnnnnnnnnnnnnnnnnnnnnnnnnnnnnnnnnnnnnnnnnnnnnnnnnnnnnnnnnnnnnnnnnnnnnnnnnnnnnnnnnnnnnnnnnnnnnnnnnnnnnnnnnnnnnnnnnnnnnnnnnnnnnnnnnnnnnnnnnnnnnnnnnnnnnnnnnnnnnnnnnnnnnnnnnnnnnnnnnnnnnnnnnnnnnnnnnnnnnnnnnnnnnnnnnnnnnnnnnnnnnnnnnnnnnnnnnnnnnnnnnnnnnnnnnnnnnnnnnnnnnnnnnnnnnnnnnnnnnnnnnnnnnnnnnnnnnnnnnnnnnnnnnnnnnnnnnnnnnnnnnnnnnnnnnnnnnnnnnnnnnnnnnnnnnnnnnnnnnnnnnnnnnnnnnnnnnnnnnnnnnnnnnnnnnnnnnnnnnnnnnnnnnnnnnnnnnnnnnnnnnnnnnnnnnnnnnnnnnnnnnnnnnnnnnnnnnnnnnnnnnnnnnnnnnnnnnnnnnnnnnnnnnnnnnnnnnnnnnnnnnnnnnnnnnnnnnnnnnnnnnnnnnnnnnnnnnnnnnnnnnnnnnnnnnnnnnnnnnnnnnnnnnnnnnnnnnnnnnnnnnnnnnnnnnnnnnnnnnnnnnnnnnnnnnnnnnnnnnnnnnnnnnnnnnnnnnnnnnnnnnnnnnnnnnnnnnnnnnnnnnnnnnnnnnnnnnnnnnnnnnnnnnnnnnnnnnnnnnnnnnnnnnnnnnnnnnnnnnnnnnnnnnnnnnnnnnnnnnnnnnnnnnnnnnnnnnnnnnnnnnnnnnnnnnnnnnnnnnnnnnnnnnnnnnnnnnnnnnnnnnnnnnnnnnnnnnnnnnnnnnnnnnnnnnnnnnnnnnnnnnnnnnnnnnnnnnnnnnnnnnnnnnnnnnnnnnnnnnnnnnnnnnnnnnnnnnnnnnnnnnnnnnnnnnnnnnnnnnnnnnnnnnnnnnnnnnnnnnnnnnnnnnnnnnnnnnnnnnnnnnnnnnnnnnnnnnnnnnnnnnnnnnnnnnnnnnnnnnnnnnnnnnnnnnnnnnnnnnnnnnnatagcggagatgtcgtacaaaccgggaagccgtccgctgtcgcttcggctcgggctgttcttcgcgcttcacttggttgcttgatcgcttcatggtcaattgaaaagtgagagcggatacctcttccaaaagaagtaaagtccatgatggaactttaagggagggatgatgtaatgggctaaggctgccattacatgcaaggtggctctttgtgtgtgtcacacgccaccttgtggaagtgcattgtgggtgcgaagatattgggtgaaacacataaaaagtgatcccacatgcacagttgacgtcatcgtctgatgtcagagcaatctgtgtctgagttgagtgttgatcgctcgcaatcattgagattcggcgtgattatgcacgagagtactctagacatgtgaatgatggttcctacttggggaaaccacactggtgacgagatcaacgtgtctctaccatctgaagtgagtggcttccgccaatcactttgcagggaatctccgcggtacttcaagttcaagtttccagcagatcccctgggttcaacctcagtgtacccaaggttttatatatcagattcataggttttatttctgcatgtttaggttttacaagtaaaacctctaggagccctagtggtgttttatatgtagtgtcaggaaccataagctcattttcaattcagttgcaattttgccaagttctcccaaagtcttcctctcaagcgtaagcgtgcgtgctgtgtttgaggctgtctcggatagcctcttacacttccatactgtacaacggagctggatacttgcaatgagatggtgcagtcgatctgtattggagagacgtggcccataacgaataccaaggagcttggcttcaccagtattgtcaatgacttgcacccctagttgctgcagttgagtctggagttcttcatcttcacctgtccattctcgaaaaggtagtatgacagtcttgtgcgtgttgagcttcatcccggccgccgagcaaaagtcttggacacgttgtagaaactcgggtgcaagagagagatccgtgagtaaccctgtgcaatcatctgcaaagctgataactgtgtggggttcttcggaagctcgtaacttgagaccatgggtcttgaactggactcgaaggtaattcaatagcggttcaatgtagagcacaaataaggctggtgagagtggatcaccttgccgaactcctgcaccgagtgcaaaatggggcaatggagcgccattgaagagaatcgagacaatagtgcttcgaatcaccactcgaatccattcccggaaattcggaccaaacccaaagtgcctcagtatcatctcgagtgcatcccagacaacactgtcaaaggctttggcaaagtcgagtaggagtgcacctgccatttcttggtttcgttggaatagatgctggagagcttggaaccggagatgcgcgttacgaatatcacgtcctggacgaatccatactgatccgtgtggagcaacttgggcaaaattgactgtaacctcttggacaggattttcggtccgagttttgcatcgatgttcaatagcgtgataggccgatagttactgggcacatgtcggtcaccactcttgtataggagcgagatctgtcctcttctctggaacttggtcattttaccgagttggaattgagacgagtacaccacttcgagtatcttgctccaaagctgaatatccacgttgtagtacgcaagcgggagaccgtctggacctggagctttgttgggtgttgtgtgtttcagtgcatagcagaagtcattcgcagtgaacggactatctagcatatgctggtcttctgtagtcagtctggtcttggtatgctggaggattctcgatagcttgagtggattccactttggcttagagtgagaatactcacgagatggcgagcaatagataccactccagtaccggttgaattcttcacacatcgagtgcaagtcttctgccgattgtactgggatggtagtcttgtgcaggagcattgggggccggaagaaatacttggtgcacttttcggactggtacaagtcggatgcaaatttttgcttggacttgtggtggtcttcttcttcaatatggactcgtagtttctgttggagcgaactgagggttgttgacacttcttgagacggactgagatgctggaggtgttggagttgattaatacgcatgtgcaggtcttctttctcgacttgtctcttgttcttcttttcgttgaagagnnnnnnnnnnnnnnnnnnnngttgattcttcacacatcgagtgcaagtcttctgccgattgtactgggatggtagtcttgtgcaggagcattgggggccggaagaaatacttggtgcacttttcggactggtacaagtcggatgcaaatttttgcttggacttgtggtggtcttcttcttcaatatggactcgtagtttctgttggagcgaactgagggttgttgacacttcttgagacggactgagatgctggaggtgttggagttgattaatacgcatgtgcaggtcttctttctcgacttgtctcttgttcttcttttcgttgaagagctggcgtagatagatgcagtcttgacgcttgtgttcatcgaggagatatcctgggttgtatgtcgatgtaatggtcggatcaattgattccgccagttttatcagggacaacttgagatattcttgcgcctcaggcaattcgatcacccagcttggacatcgccacggtgctcttgttcttggcttgaatagttcagaaccgagggtgaactcgatcccgcagtggtcggctttgttcggctggtgcttccagtcgtgcttgagttgtttgagctgccaattgaatatatcggaactcaataggacgaagtcgatacgagcacttcggttgggactcgtaaattcgcgaacatggggttctgcaggcgccatgcatcaaaaagattcaatgcctgcatccactccaggagttcttgacggccctcacgacgggctcggttgtttgtctgggcttggtcgagctgggtcgagaagactgtgttaaagtctcctagagccatatgtatggcattttcttcaaactgtctggggagactgtcaaagaagcttggtcggtcagttgggtttactggcgcatacactgcgtgaatatacgctggcgagccatccagtgcaccttggagcacgagataccgtgagagagtgtttcgatcactcacttgggtttctgtgatgtcttggatatcttggaccggacaagtgggggtgagtagaatacccactcccgcctgtccggtatacatgttggaatggtcatgggaccaaaaggcggtgttgaagctcgaggactttttccacaaaaagtcggcgcgcttgaggttggctgggttcgtgaacttggtttcttgtagtgcgataatatggaacttggacgagaagtagttgagcgtactctgcgtgactcggttgaagccgttcacgttgatcgagtagcctcgtagggtccagtccacattagagagaaggctggctggagaagagggactggcgcaactcgcagatcgaggtcaaaagttcgcttggaagtcgcatactggccaatttctccatcaaatcggaccgaagcaggtttaacagcgttgtgtcatcccatagtagccaaagtgtatgttgaagtcgctgagccggagcttgcgagattgcacacactttgtatggatcggagtagatgctgggagccatcacttgcaacagcaggtcaaactcggcaatccagacttgctgccagaaaagcgcttgattatggtcgagacactggctgagcatggtctggtagtcttcggggtcttgggggttgaacacggcttggaccttgtcctcgaacgtgtcgagttccggaggcagttcttgcgagctgattttccgtaacaaggcgtgaccgtagaactttccagtcatgacactgtaattgcccggattactggtatcataaagcggacggaaaagacttggctgggttttgaccgtgactatgctcatctcaggactgggttcctcgtcaaattgtcggaggaacgcctggatgtaattgcacagacttgcagctgacattgactcaacattgtagtcaatcgtcgtgcgttgcacctcgatctgaccttccgcttgggtcacttgcgatcgaataggtgaacggtcttggttatggagggtgacgtctatgtccggagagatggacgcgtcctccgagcccagtgtaatccacgcatacacgttatgagacgcgatgagcggatacgtggtttgggatggtggcagtagaaaggcttgtgcctgatccactggtaccgtagagaatatcattttcttgcttctctcgatcagatggtacgcgtcgcacacatctgggagaggtgggatggggatggtggccttctgttcttcggaggtccacatcgaggatgggttgacagacagagatgtcatgtcagagtccgatcccatgtcagcatccgagtcaccactagtgtcagctgggatgatcggctgcatagctgcgtctgaaggagtatcgctactagcttcggcagccggtggatcttcgctgggttgggacgtgttcttgcgccgttctaatagaaacggcggggtcttcttattatacgcttggatacggtggttgacaacacaatagccagacgcagtgaactggatctggcgtaaaggttccttgccgccgatcataaccgctgcaggggagtctttctggttaaagtagacccgccgattgcgtaactgtagtccattggcagaccaagaaggggtgatgtacacgggaggtacaccatgggttgcaaaccaatcatagatgatactatcagtagtatcatccgcgaggcgttgcaactcgacatagtacaagtgagagtacttggagtagggttgaatcttgaacacctttccacagatggaaagttgcagattacccagcttcgtgcagatctcgcgattcgtgcacacgaagcttactccctttcctcggatcactttgaagtcccgaaggtgcacaatactattcgcccacaatgtggacttttggtcaccacccaacgaggtcatgatctctgtgtccgaaaacgtcgaggtcaagtctctcgctgggatccacatgggatagcactggtcgctgttcacaggcgtgggaacgcctcgcaacgcagctgccttccgttccgcagcagtgctgtccttatctaggaacactctttccgcttccgcgaaagtcgcatccgtcgggatagtcacttgcggacgtgatgagttggcacgccattgcttgcgccactcgatgttggcagctgaggtcttcataatgcagggataggtcaaacttgattttttttcttggctggtttctttttcttggctggcttcttttttcttggcttctttttcttgacttcaaatgtgcagtttttttgtgatttttgttttcttgggttgtaggggtcgactgcttggttgaaaaccgagaacaagtcaaactctcaaactgacctaaaatctcccagggaccgctcgcaatgaggcagtataggaaatagtaggcagcacctgaagagtcaagatcagagtgcgaagcgaacctcaattcgcggcagctccgaaatgtacacttcgggagagcaatagcactcacagatgagctctaaaagatcgatcccaccaacaagcgtggcagacgaaactgatcactaaccacgtcgtggaaagcaccgagtcgctaatcaaacttcgagaggttcacccgtgtgaactaagggacggtcgaggttgggttggagagggttggcagtcgcttgggaccagctggcgcagaaagtcgatagcaagcgtgggcttgtctattcgacttgtggggtagctggaaaattggaaagtcatgagtgcactagaccatacaataagcaagttcaacaaacagccaatcagagacaggtattcagtcaacactgtgtattcactgcgctttgctggcagatcgctcattttcctttttgctgaagagcaaaatgaagtcaaccaagcgcaaacgaccaccggaagactcggactccgacttcgaagaagacgtcacgccgcgaatcgccagtctgagactgcgcgtggctccaaccgatgagatcgtacaagagtccgctcctgcagtccgtgaagtgatcatccttgacagctcggacgaggacgacctactcgaagacatccagacaatgactgtccgtcccaagtctgtcaagcgtgcgacgaccagaaagaacgccagtgcgaagaaacccaagaaggtgtctgccaagacctcacaacaacaagttcgtgttgggaaggagcctgcagcccgcaagaaatcttccggtaccgtactggagaacgcgttcaagaaaggcaagcagttctgcagcatcacgtgtcgtcttgagaccgtctgtccggatcccgacctccgtcagcagatccgcgactgcgtccgacgaatgaaacagatccagatggagtcctggcacctcgtgaacctccacaccctgcggtgtttggaagaaggcatccagcttccgttgtatgatgagacgttcttcgaccaatgttgctctggcgtatcaagcacatcgcgttctcacaacaccgcgaataagaatccagcgttgtgggagacgatcaagatctaccgcgcggaaaggtcaagaacaaacttgaaggagtcgaaaatcaagtcggacttcccaagatgaagtatgaactccgacagcagatggttgnnnnnnnnnnnnnnnnnnnnnnnnnnnnnnnnnnnnnnnnnnnnnnnnnnnnnnnnnnnnnnnnnnnnnnnnnnnnnnnnnnnnnnnnnnnnnnnnnnnnnnnnnnnnnnnnnnnnnnnnnnnnnnnnnnnnnnnnnnnnnnnnnnnnnnnnnnnnnnnnnnnnnnnnnnnnnnnnnnnnnnnnnnnnnnnnnnnnnnnnnnnnnnnnnnnnnnnnnnnnnnnnnnnnnnnnnnnnnnnnnnnnnnnnnnnnnnnnnnnnnnnnnnnnnnnnnnnnnnnnnnnnnnnnnnnnnnnnnnnnnnnnnnnnnnnnnnnnnnnnnnnnnnnnnnnnnnnnnnnnnnnnnnnnnnnnnnnnnnnnnnnnnnnnnnnnnnnnnnnnnnnnnnnnnnnnnnnnnnnnnnnnnnnnnnnnnnnnnnnnnnnnnnnnnnnnnnnnnnnnnnnnnnnnnnnnnnnnnnnnnnnnnnnnnnnnnnnnnnnnnnnnnnnnnnnnnnnnnnnnnnnnnnnnnnnnnnnnnnnnnnnnnnnnnnnnnnnnnnnnnnnnnnnnnnnnnnnnnnnnnnnnnnnnnnnnnnnnnnnnnnnnnnnnnnnnnnnnnnnnnnnnnnnnnnnnnnnnnnnnnnnnnnnnnnnnnnnnnnnnnnnnnnnnnnnnnnnnnnnnnnnnnnnnnnnnnnnnnnnnnnnnnnnnnnnnnnnnnnnnnnnnnnnnnnnnnnnnnnnnnnnnnnnnnnnnnnnnnnnnnnnnnnnnnnnnnnnnnnnnnnnnnnnnnnnnnnnnnnnnnnnnnnnnnnnnnnnnnnnnnnnnnnnnnnnnnnnnnnnnnnnnnnnnnnnnnnnnnnnnnnnnnnnnnnnnnnnnnnnnnnnnnnnnnnnnnnnnnnnnnnnnnnnnnnnnnnnnnnnnnnnnnnnnnnnnnnnnnnnnnnnnnnnnnnnnnnnnnnnnnnnnnnnnnnnnnnnnnnnnnnnnnnnnnnnnnnnnnnnnnnnnnnnnnnnnnnnnnnnnnnnnnnnnnnnnnnnnnnnnnnnnnnnnnnnnnnnnnnnnnnnnnnnnnnnnnnnnnnnnnnnnnnnnnnnnnnnnnnnnnnnnnnnnnnnnnnnnnnnnnnnnnnnnnnnnnnnnnnnnnnnnnnnnnnnnnnnnnnnnnnnnnnnnnnnnnnnnnnnnnnnnnnnnnnnnnnnnnnnnnnnnnnnnnnnnnnnnnnnnnnnnnnnnnnnnnnnnnnnnnnnnnnnnnnnnnnnnnnnnnnnnnnnnnnnnnnnnnnnnnnnnnnnnnnnnnnnnnnnnnnnnnnnnnnnnnnnnnnnnnnnnnnnnnnnnnnnnnnnnnnnnnnnnnnnnnnnnnnnnnnnnnnnnnnnnnnnnnnnnnnnnnnnnnnnnnnnnnnnnnnnnnnnnnnnnnnnnnnnnnnnnnnnnnnnnnnnnnnnnnnnnnnnnnnnnnnnnnnnnnnnnnnnnnnnnnnnnnnnnnnnnnnnnnnnnnnnnnnnnnnnnnnnnnnnnnnnnnnnnnnnnnnnnnnnnnnnnnnnnnnnnnnnnnnnnnnnnnnnnnnnnnnnnnnnnnnnnnnnnnnnnnnnnnnnnnnnnnnnnnnnnnnnnnnnnnnnnnnnnnnnnnnnnnnnnnnnnnnnnnnnnnnnnnnnnnnnnnnnnnnnnnnnnnnnnnnnnnnnnnnnnnnnnnnnnnnnnnnnnnnnnnnnnnnnnnnnnnnnnnnnnnnnnnnnnnnnnnnnnnnnnnnnnnnnnnnnnnnnnnnnnnnnnnnnnnnnnnnnnnnnnnnnnnnnnnnnnnnnnnnnnnnnnnnnnnnnnnnnnnnnnnnnnnnnnnnnnnnnnnnnnnnnnnnnnnnnnnnnnnnnnnnnnnnnnnnnnnnnnnnnnnnnnnnnnnnnnnnnnnnnnnnnnnnnnnnnnnnnnnnnnnnnnnnnnnnnnnnnnnnnnnnnnnnnnnnnnnnnnnnnnnnnnnnnnnnnnnnnnnnnnnnnnnnnnnnnnnnnnnnnnnnnnnnnnnnnnnnnnnnnnnnnnnnnnnnnnnnnnnnnnnnnnnnnnnnnnnnnnnnnnnnnnnnnnnnnnnnnnnnnnnnnnnnnnnnnnnnnnnnnnnnnnnnnnnnnnnnnnnnnnnnnnnnnnnnnnnnnnnnnnnnnnnnnnnnnnnnnnnnnnnnnnnnnnnnnnnnnnnnnnnnnnnnnnnnnnnnnnnnnnnnnnnnnnnnnnnnnnnnnnnnnnnnnnnnnnnnnnnnnnnnnnnnnnnnnnnnnnnnnnnnnnnnnnnnnnnnnnnnnnnnnnnnnnnnnnnnnnnnnnnnnnnnnnnnnnnnnnnnnnnnnnnnnnnnnnnnnnnnnnnnnnnnnnnnnnnnnnnnnnnnnnnnnnnnnnnnnnnnnnnnnnnnnnnnnnnnnnnnnnnnnnnnnnnnnnnnnnnnnnnnnnnnnnnnnnnnnnnnnnnnnnnnnnnnnnnnnnnnnnnnnnnnnnnnnnnnnnnnnnnnnnnnnnnnnnnnnnnnnnnnnnnnnnnnnnnnnnnnnnnnnnnnnnnnnnnnnnnnnnnnnnnnnnnnnnnnnnnnnnnnnnnnnnnnnnnnnnnnnnnnnnnnnnnnnnnnnnnnnnnnnnnnnnnnnnnnnnnnnnnnnnnnnnnnnnnnnnnnnnnnnnnnnnnnnnnnnnnnnnnnnnnnnnnnnnnnnnnnnnnnnnnnnnnnnnnnnnnnnnnnnnnnnnnnnnnnnnnnnnnnnnnnnnnnnnnnnnnnnnnnnnnnnnnnnnnnnnnnnnnnnnnnnnnnnnnnnnnnnnnnnnnnnnnnnnnnnnnnnnnnnnnnnnnnnnnnnnnnnnnnnnnnnnnnnnnnnnnnnnnnnnnnnnnnnnnnnnnnnnnnnnnnnnnnnnnnnnnnnnnnnnnnnnnnnnnnnnnnnnnnnnnnnnnnnnnnnnnnnnnnnnnnnnnnnnnnnnnnnnnnnnnnnnnnnnnnnnnnnnnnnnnnnnnnnnnnnnnnnnnnnnnnnnnnnnnnnnnnnnnnnnnnnnnnnnnnnnnnnnnnnnnnnnnnnnnnnnnnnnnnnnnnnnnnnnnnnnnnnnnnnnnnnnnnnnnnnnnnnnnnnnnnnnnnnnnnnnnnnnnnnnnnnnnnnnnnnnnnnnnnnnnnnnnnnnnnnnnnnnnnnnnnnnnnnnnnnnnnnnnnnnnnnnnnnnnnnnnnnnnnnnnnnnnnnnnnnnnnnnnnnnnnnnnnnnnnnnnnnnnnnnnnnnnnnnnnnnnnnnnnnnnnnnnnnnnnnnnnnnnnnnnnnnnnnnnnnnnnnnnnnnnnnnnnnnnnnnnnnnnnnnnnnnnnnnnnnnnnnnnnnnnnnnnnnnnnnnnnnnnnnnnnnnnnnnnnnnnnnnnnnnnnnnnnnnnnnnnnnnnnnnnnnnnnnnnnnnnnnnnnnnnnnnnnnnnnnnnnnnnnnnnnnnnnnnnnnnnnnnnnnnnnnnnnnnnnnnnnnnnnnnnnnnnnnnnnnnnnnnnnnnnnnnnnnnnnnnnnnnnnnnnnnnnnnnnnnnnnnnnnnnnnnnnnnnnnnnnnnnnnnnnnnnnnnnnnnnnnnnnnnnnnnnnnnnnnnnnnnnnnnnnnnnnnnnnnnnnnnnnnnnnnnnnnnnnnnnnnnnnnnnnnnnnnnnnnnnnnnnnnnnnnnnnnnnnnnnnnnnnnnnnnnnnnnnnnnnnnnnnnnnnnnnnnnnnnnnnnnnnnnnnnnnnnnnnnnnnnnnnnnnnnnnnnnnnnnnnnnnnnnnnnnnnnnnnnnnnnnnnnnnnnnnnnnnnnnnnnnnnnnnnnnnnnnnnnnnnnnnnnnnnnnnnnnnnnnnnnnnnnnnnnnnnnnnnnnnnnnnnnnnnnnnnnnnnnnnnnnnnnnnnnnnnnnnnnnnnnnnnnnnnnnnnnnnnnnnnnnnnnnnnnnnnnnnnnnnnnnnnnnnnnnnnnnnnnnnnnnnnnnnnnnnnnnnnnnnnnnnnnnnnnnnnnnnnnnnnnnnnnnnnnnnnnnnnnnnnnnnnnnnnnnnnnnnnnnnnnnnnnnnnnnnnnnnnnnnnnnnnnnnnnnnnnnnnnnnnnnnnnnnnnnnnnnnnnnnnnnnnnnnnnnnnnnnnnnnnnnnnnnnnnnnnnnnnnnnnnnnnnnnnnnnnnnnnnnnnnnnnnnnnnnnnnnnnnnnnnnnnnnnnnnnnnnnnnnnnnnnnnnnnnnnnnnnnnnnnnnnnnnnnnnnnnnnnnnnnnnnnnnnnnnnnnnnnnnnnnnnnnnnnnnnnnnnnnnnnnnnnnnnnnnnnnnnnnnnnnnnnnnnnnnnnnnnnnnnnnnnnnnnnnnnnnnnnnnnnnnnnnnnnnnnnnnnnnnnnnnnnnnnnnnnnnnnnnnnnnnnnnnnnnnnnnnnnnnnnnnnnnnnnnnnnnnnnnnnnnnnnnnnnnnnnnnnnnnnnnnnnnnnnnnnnnnnnnnnnnnnnnnnnnnnnnnnnnnnnnnnnnnnnnnnnnnnnnnnnnnnnnnnnnnnnnnnnnnnnnnnnnnnnnnnnnnnnnnnnnnnnnnnnnnnnnnnnnnnnnnnnnnnnnnnnnnnnnnnnnnnnnnnnnnnnnnnnnnnnnnnnnnnnnnnnnnnnnnnnnnnnnnnnnnnnnnnnnnnnnnnnnnnnnnnnnnnnnnnnnnnnnnnnnnnnnnnnnnnnnnnnnnnnnnnnnnnnnnnnnnnnnnnnnnnnnnnnnnnnnnnnnnnnnnnnnnnnnnnnnnnnnnnnnnnnnnnnnnnnnnnnnnnnnnnnnnnnnnnnnnnnnnnnnnnnnnnnnnnnnnnnnnnnnnnnnnnnnnnnnnnnnnnnnnnnnnnnnnnnnnnnnnnnnnnnnnnnnnnnnnnnnnnnnnnnnnnnnnnnnnnnnnnnnnnnnnnnnnnnnnnnnnnnnnnnnnnnnnnnnnnnnnnnnnnnnnnnnnnnnnnnnnnnnnnnnnnnnnnnnnnnnnnnnnnnnnnnnnnnnnnnnnnnnnnnnnnnnnnnnnnnnnnnnnnnnnnnnnnnnnnnnnnnnnnnnnnnnnnnnnnnnnnnnnnnnnnnnnnnnnnnnnnnnnnnnnnnnnnnnnnnnnnnnnnnnnnnnnnnnnnnnnnnnnnnnnnnnnnnnnnnnnnnnnnnnnnnnnnnnnnnnnnnnnnnnnnnnnnnnnnnnnnnnnnnnnnnnnnnnnnnnnnnnnnnnnnnnnnnnnnnnnnnnnnnnnnnnnnnnnnnnnnnnnnnnnnnnnnnnnnnnnnnnnnnnnnnnnnnnnnnnnnnnnnnnnnnnnnnnnnnnnnnnnnnnnnnnnnnnnnnnnnnnnnnnnnnnnnnnnnnnnnnnnnnnnnnnnnnnnnnnnnnnnnnnnnnnnnnnnnnnnnnnnnnnnnnnnnnnnnnnnnnnnnnnnnnnnnnnnnnnnnnnnnnnnnnnnnnnnnnnnnnnnnnnnnnnnnnnnnnnnnnnnnnnnnnnnnnnnnnnnnnnnnnnnnnnnnnnnnnnnnnnnnnnnnnnnnnnnnnnnnnnnnnnnnnnnnnnnnnnnnnnnnnnnnnnnnnnnnnnnnnnnnnnnnnnnnnnnnnnnnnnnnnnnnnnnnnnnnnnnnnnnnnnnnnnnnnnnnnnnnnnnnnnnnnnnnnnnnnnnnnnnnnnnnnnnnnnnnnnnnnnnnnnnnnnnnnnnnnnnnnnnnnnnnnnnnnnnnnnnnnnnnnnnnnnnnnnnnnnnnnnnnnnnnnnnnnnnnnnnnnnnnnnnnnnnnnnnnnnnnnnnnnnnnnnnnnnnnnnnnnnnnnnnnnnnnnnnnnnnnnnnnnnnnnnnnnnnnnnnnnnnnnnnnnnnnnnnnnnnnnnnnnnnnnnnnnnnnnnnnnnnnnnnnnnnnnnnnnnnnnnnnnnnnnnnnnnnnnnnnnnnnnnnnnnnnnnnnnnnnnnnnnnnnnnnnnnnnnnnnnnnnnnnnnnnnnnnnnnnnnnnnnnnnnnnnnnnnnnnnnnnnnnnnnnnnnnnnnnnnnnnnnnnnnnnnnnnnnnnnnnnnnnnnnnnnnnnnnnnnnnnnnnnnnnnnnnnnnnnnnnnnnnnnnnnnnnnnnnnnnnnnnnnnnnnnnnnnnnnnnnnnnnnnnnnnnnnnnnnnnnnnnnnnnnnnnnnnnnnnnnnnnnnnnnnnnnnnnnnnnnnnnnnnnnnnnnnnnnnnnnnnnnnnnnnnnnnnnnnnnnnnnnnnnnnnnnnnnnnnnnnnnnnnnnnnnnnnnnnnnnnnnnnnnnnnnnnnnnnnnnnnnnnnnnnnnnnnnnnnnnnnnnnnnnnnnnnnnnnnnnnnnnnnnnnnnnnnnnnnnnnnnnnnnnnnnnnnnnnnnnnnnnnnnnnnnnnnnnnnnnnnnnnnnnnnnnnnnnnnnnnnnnnnnnnnnnnnnnnnnnnnnnnnnnnnnnnnnnnnnnnnnnnnnnnnnnnnnnnnnnnnnnnnnnnnnnnnnnnnnnnnnnnnnnnnnnnnnnnnnnnnnnnnnnnnnnnnnnnnnnnnnnnnnnnnnnnnnnnnnnnnnnnnnnnnnnnnnnnnnnnnnnnnnnnnnnnnnnnnnnnnnnnnnnnnnnnnnnnnnnnnnnnnnnnnnnnnnnnnnnnnnnnnnnnnnnnnnnnnnnnnnnnnnnnnnnnnnnnnnnnnnnnnnnnnnnnnnnnnnnnnnnnnnnnnnnnnnnnnnnnnnnnnnnnnnnnnnnnnnnnnnnnnnnnnnnnnnnnnnnnnnnnnnnnnnnnnnnnnnnnnnnnnnnnnnnnnnnnnnnnnnnnnnnnnnnnnnnnnnnnnnnnnnnnnnnnnnnnnnnnnnnnnnnnnnnnnnnnnnnnnnnnnnnnnnnnnnnnnnnnnnnnnnnnnnnnnnnnnnnnnnnnnnnnnnnnnnnnnnnnnnnnnnnnnnnnnnnnnnnnnnnnnnnnnnnnnnnnnnnnnnnnnnnnnnnnnnnnnnnnnnnnnnnnnnnnnnnnnnnnnnnnnnnnnnnnnnnnnnnnnnnnnnnnnnnnnnnnnnnnnnnnnnnnnnnnnnnnnnnnnnnnnnnnnnnnnnnnnnnnnnnnnnnnnnnnnnnnnnnnnnnnnnnnnnnnnnnnnnnnnnnnnnnnnnnnnnnnnnnnnnnnnnnnnnnnnnnnnnnnnnnnnnnnnnnnnnnnnnnnnnnnnnnnnnnnnnnnnnnnnnnnnnnnnnnnnnnnnnnnnnnnnnnnnnnnnnnnnnnnnnnnnnnnnnnnnnnnnnnnnnnnnnnnnnnnnnnnnnnnnnnnnnnnnnnnnnnnnnnnnnnnnnnnnnnnnnnnnnnnnnnnnnnnnnnnnnnnnnnnnnnnnnnnnnnnnnnnnnnnnnnnnnnnnnnnnnnnnnnnnnnnnnnnnnnnnnnnnnnnnnnnnnnnnnnnnnnnnnnnnnnnnnnnnnnnnnnnnnnnnnnnnnnnnnnnnnnnnnnnnnnnnnnnnnnnnnnnnnnnnnnnnnnnnnnnnnnnnnnnnnnnnnnnnnnnnnnnnnnnnnnnnnnnnnnnnnnnnnnnnnnnnnnnnnnnnnnnnnnnnnnnnnnnnnnnnnnnnnnnnnnnnnnnnnnnnnnnnnnnnnnnnnnnnnnnnnnnnnnnnnnnnnnnnnnnnnnnnnnnnnnnnnnnnnnnnnnnnnnnnnnnnnnnnnnnnnnnnnnnnnnnnnnnnnnnnnnnnnnnnnnnnnnnnnnnnnnnnnnnnnnnnnnnnnnnnnnnnnnnnnnnnnnnnnnnnnnnnnnnnnnnnnnnnnnnnnnnnnnnnnnnnnnnnnnnnnnnnnnnnnnnnnnnnnnnnnnnnnnnnnnnnnnnnnnnnnnnnnnnnnnnnnnnnnnnnnnnnnnnnnnnnnnnnnnnnnnnnnnnnnnnnnnnnnnnnnnnnnnnnnnnnnnnnnnnnnnnnnnnnnnnnnnnnnnnnnnnnnnnnnnnnnnnnnnnnnnnnnnnnnnnnnnnnnnnnnnnnnnnnnnnnnnnnnnnnnnnnnnnnnnnnnnnnnnnnnnnnnnnnnnnnnnnnnnnnnnnnnnnnnnnnnnnnnnnnnnnnnnnnnnnnnnnnnnnnnnnnnnnnnnnnnnnnnnnnnnnnnnnnnnnnnnnnnnnnnnnnnnnnnnnnnnnnnnnnnnnnnnnnnnnnnnnnnnnnnnnnnnnnnnnnnnnnnnnnnnnnnnnnnnnnnnnnnnnnnnnnnnnnnnnnnnnnnnnnnnnnnnnnnnnnnnnnnnnnnnnnnnnnnnnnnnnnnnnnnnnnnnnnnnnnnnnnnnnnnnnnnnnnnnnnnnnnnnnnnnnnnnnnnnnnnnnnnnnnnnnnnnnnnnnnnnnnnnnnnnnnnnnnnnnnnnnnnnnnnnnnnnnnnnnnnnnnnnnnnnnnnnnnnnnnnnnnnnnnnnnnnnnnnnnnnnnnnnnnnnnnnnnnnnnnnnnnnnnnnnnnnnnnnnnnnnnnnnnnnnnnnnnnnnnnnnnnnnnnnnnnnnnnnnnnnnnnnnnnnnnnnnnnnnnnnnnnnnnnnnnnnnnnnnnnnnnnnnnnnnnnnnnnnnnnnnnnnnnnnnnnnnnnnnnnnnnnnnnnnnnnnnnnnnnnnnnnnnnnnnnnnnnnnnnnnnnnnnnnnnnnnnnnnnnnnnnnnnnnnnnnnnnnnnnnnnnnnnnnnnnnnnnnnnnnnnnnnnnnnnnnnnnnnnnnnnnnnnnnnnnnnnnnnnnnnnnnnnnnnnnnnnnnnnnnnnnnnnnnnnnnnnnnnnnnnnnnnnnnnnnnnnnnnnnnnnnnnnnnnnnnnnnnnnnnnnnnnnnnnnnnnnnnnnnnnnnnnnnnnnnnnnnnnnnnnnnnnnnnnnnnnnnnnnnnnnnnnnnnnnnnnnnnnnnnnnnnnnnnnnnnnnnnnnnnnnnnnnnnnnnnnnnnnnnnnnnnnnnnnnnnnnnnnnnnnnnnnnnnnnnnnnnnnnnnnnnnnnnnnnnnnnnnnnnnnnnnnnnnnnnnnnnnnnnnnnnnnnnnnnnnnnnnnnnnnnnnnnnnnnnnnnnnnnnnnnnnnnnnnnnnnnnnnnnnnnnnnnnnnnnnnnnnnnnnnnnnnnnnnnnnnnnnnnnnnnnnnnnnnnnnnnnnnnnnnnnnnnnnnnnnnnnnnnnnnnnnnnnnnnnnnnnnnnnnnnnnnnnnnnnnnnnnnnnnnnnnnnnnnnnnnnnnnnnnnnnnnnnnnnnnnnnnnnnnnnnnnnnnnnnnnnnnnnnnnnnnnnnnnnnnnnnnnnnnnnnnnnnnnnnnnnnnnnnnnnnnnnnnnnnnnnnnnnnnnnnnnnnnnnnnnnnnnnnnnnnnnnnnnnnnnnnnnnnnnnnnnnnnnnnnnnnnnnnnnnnnnnnnnnnnnnnnnnnnnnnnnnnnnnnnnnnnnnnnnnngtcctcagtcgtcttctctccctccaagtcgggagatcgcttcctcgttgcacaagcgtgtgtgccgtgtattgggaactgttgtgaacagcgtcccattacattctgttgttccgaacaaagaacgagctcgatgaggcggagaagcagcagtccgaaaggcttgtccctgagggataccgtccagaggtcgtgatcggtctggatccaggcatgcgttccgtgtgtactgcagtgcgcgagcgttttgctccgcggcagatcaagcgagttcgtcggcgttcagtgaggaagaagcgacgacggaaaaggtcgtggattcgacgatacgatggccccaaacgcaagaacggtcgagatatcgtcgaagtgcacgcgaaggagtaccggcatctggccgggttcagaaaacgacgggcgtgggaagaagtactgaagaactccaaccctgagtacgggactgcgattcgggggatgccgtccttcaagacatcaagatacaaggtctacctggaacgtctacattacttctggaagcatgcaggatttctgttggagatctgctggcggaagccgttcctgaagtggaagttctttaacaagcgtagttctcgcatcgcagtggacgcgttggcagcacggattgttcctgatcccagcgtgcagacgtg

SEQ ID NO: 155 - DNA, 20786 bp, unidentified
  misc_feature 1..20786: note = Fanzor polypeptide
  source 1..20786: mol_type = other DNA
gcttctaatgatagaaaagtacttctggacattagtgctatctgctgtgcatttcagttctttttataccgaatatgaattcaaatcaatatttacgtaccatagagtagttgttattttatataacaacagataaatcttggggaagtagttgaaagtagtaaaagttatcaccagccggctgcaagaatcatttaactaatgatgaacaactaaggtagccactgcaattttgttaatataattatggctccctcagagaagaaggtatacaacagtgctagtagcattaactctctataattattcatatacggtgtagaaacaacatgttttgctaacagttaaccttaactcctcacttctttgaaatctttatttatatccagaacatcaactttaaatgatggtaaagaattaatgatgcccgcaaagggtgcatatgcacaatattggattttaatcatgctttccattggaatgcccttcacagaaacggcaaacttcttaagacgtccagtaacaaaaaagacactcctcgctgcatttgttgaacaaaaaaaggacgctgtcatcaggcacatgcagcaatacatgacgaaaaaagaagccctaaaaagtttgcgcaatatgtatgaaaccgagttcaagcgtcgctacccaaagtccaaacggggcccatctatgcgcttgggaagcagtacgttaggcgaactgttaagcactactgcatccatcacacaagtacttgatggtgctgcatcttctatgatcggtagatcaaaaacaagtgctgctccaatagttgatcgcttgagagatgatgatcctgaaagcttcgcgttgctcttagagaagtttcacatttttgttgtatgcaaagcctacgtttaccagcatgtgccagaagactatatgcacatctggctccacacacacaaacacatggactaacagcgtgtgcctggacaagttacattcactttcgctctagccactcgacatgttgtttgtttacatgttgatcatcgtctgtgcactggtaacacccaactcaacgtgctccaaactctttactgtgaagacccactcaatgcgtatacatcacgctcatcacttcatgtgtgtactctacatcagatattccacacccgaacatattaatctcgctgttggattcttgtaattataacaataagaaaagaaaccagtagaaattacgagatacgaaaactaaagttactttattgaacacttcaatttacatctgctattcatactaattctaaaggacacaaatttctttgggacgattgatttgatcgataggcgtgattagctaattgattgaacttatttctatttgacagattgtatcgctcttaccagacacaatctctgggtctctagacttgacaactcacttgtaatacaatgctacacaatactgtacttcatttcctgatttgaaacaaagactttattcttccaattgtatttcaaacatctacttcaatctccaattgaagatgagcttcctaagctacccactattattctggcagaacacgcgcgttccacccatatattcatcttcaatgtactgtcgtttaaaaaactgcgtcacaaaactttgatttacgatcaatactcatataataaaggtatttatgtgaacttactaccaaagaagccacaagcaatagtaccatcaacatgtataatattaacctcctagcttgaagttgattggatactttggcataaatgaaatttttcaacaattataaaaacgtctaattttaatcaatctctgatttcttcgaaaataatttgggaatagcatcaatttcgtttatgcgtctaatgatgtggtcttcccttattctactgtacataaaaaactgagtttggtgcactgactggcttgtacgcttaattcaaaaaccgttccttcaaaaggaagttgtgccctgtagaacgctgtaaatcgctcggatctccttcaaactcaaagagaagctttttgacaaatttagcaatagccttaatttaaaaaactaccaaatccccctgtcaaatatgcagaaacgttaagcggtatggtgaaaatgctaaattttaagaaaggtcctttgattgcgcgccatttttgccaagcaaagtataactaaactgcataaagcttagctttagtacctctgaaacctaactgtagcattttccagacctttatttgcttgattataaccttagcaatgcaaaaatcacgaaatgcacaatttccctgctaatttcccaaaataaatacttctagttgatcagagcttcaggtaattagagatgaaacctcaaaatcctattatacattctttttgggctcttatctaatctcatcatttcaaacctcactgttctcaaggtggtattgcttaaatttgaattatccctagctctcacacctaatatttagtagctcaataatagctaaaaaatgtatttatcactccctaacgaatcagaatgaccgggtctcgtttgaaacttttgcagtcatatagtggcgttttttgcggttttaatgacaccaaaagtgagcaaatccctccagtatatcgctagctatgctcgatttcagttttatgacgcagttttttaaacaacagtagtagtcatatccagggatctactctatttcaatcaagagatgccctgtaataaagaagtctctttgcttttgtttagatacagttgacaactgattgttcatatcgtttcaatcgactttattaacacgaattcatcaaagtagcttttgtgtcctatagatcgacggcaaccgatgctacaggcttggtcaaggccttaaaccatttgtaattttgagactacacgctgattaccatcagacaaagaacgatggaaattttgcgtatgttttacttgaaaaacgctcagaaataccaaaagttctgcttattgtatttcaatgcaacttttactaatggcctatgcctataaaaagtagtgcagtctgctatgcattttaattcttcgtatatcaaatacacaatttgggtggtcgttgttgcataccgtaaaaaatgtgctcctctctacccaatagaaaaaaaaaatggatctacagtttggaatcgaatataattaacactcctcgactactgttgaactacaagaatcgtttatttaatatacacttgacgtagccactgtaagttttgtcggttttttagcctatcattagatgtcaagccaattccataccactgacatttaaatggaattgtagtaccgtgcgcgaaaaaaacgttcaagtgttttcgattttgggacaccttcttcgtagtgtgtatgcatgtatcttttgagcattatgagatacagaaatgagactactatgtttcaaatgagagcagtgtcctcttttgaaagatatattgtacatcaagatatgcccaatttctattggctaagagcaaaatcaaagcgatgttaccgaaaatcaatttaatcagtttagctgagaaacaaaacctattggaaccaaaccaaggttattttaggtattgccgctacagtatcaacgagtcatagaagagacaaaaccaaagcattgctacgcatcagacaggccagctttatacaccccctccaaataaggcattttacattattgcagattaaatcactgaaaggcgctcaaacttgaaacataatatatcatccgaaagccttttttaagcgctacaaacacctgcaatagcagttactaaaaccaactacttctatgttttagataccaaagaaaaaaatgactaaaaatcaagcattttttggggttaaccatttgccggcaaatgcttttaccgagtcgttttgctgaagattttctaccgtgtggcttggcagctaacgttcatgccttaaaatttaggtttccttcagtttcttattattcgcttagtcaaaataacgaaatctaaaaattagccgtttatttcgtctcaaccaatcaaatctggctattccgcattttcaagctagagatagtaagtggcagttatgagcttcaaattggtataattgaaaagatgctagcactgaaactgatgtagtaatacgaccagaaagattttgtcagggcactatcacttgaacgtttttttcgcgcacagtataaatatgttttgaatccaggacacgattgatcctggcttccttttataagaaacataataaagaccctacgttctacgtgatagaattactactgtctttatattttataatttggaaataatagtgatttcgtattacttaaataactctcaagtttgtttatatgcttataaccgcctcagaataaacatacaacaaggttaatatgagctctccaacagtcatatacggcatgatgaaaacacgctttaccgtattttgtccaacaacgcccaaaacagtgttcaacctgtgccactcttgaacaaagcatgctagattcaagcggttttaaataaactgttgcgcaacatcccctctatcagcctgctactactagatactcgtaatcagcagcttttattatggacattgtcataatcagtcatcaaaatgggctgatttcaaaaaaaaaaacaatcatccatccatcaacaccaactcgtccaatccaaaatccaattataccaccatcgtctcttctctcgcacaattccgcttaaaatatcatctactaatctcattattacatcgattgctcaaaatcgatctcgcatgatgacctgaatctgcataccggaaatacctgcatacaagcaagatatagtgtcgagcacaaagatacagtatacagctttaaataaagtgcttttaagtaccccaactgtcaatccgtcaacactagacacatgtcattatccgcctccctcataaatcttgtctacgagaccagtgctcaaatttggattattattttggaaatcgtccacccatcaacggcaacgcctccagatgactaaagcctgaccacaacacaatcgtgttctttgcaaaatctgacataggtacaggtttatcccataagccagatgattgacatatgaagactttgattgatttgataccaataatataataatgcaaaattgtactttttggatgctatgatgaacaggcgtagatttattcaaaattattttttccaggatagtgaatgtatttgatcatgtctgatacttgtggtggtatcgtgggtagttatcttaatccatttgtaccatgcattttgaatgtttaatcgtgcttttctcatttcatttacatttttagtttcaatacgaatgctttatttctctgagctgtctccaaatttgagccaataaaatcgcttaaaaagctattttaaacgccgcgaactttgaaaaattttgccacagctctcccttgtttttttgttaggcggaattttaaacacagccgaatacactagtattaagctacgttatcatcaaaaacccctaaaatgcaagaatatgccttactacacaccccagctgatagcgcatatgcttgagactctcagttagcaccaagtaagtgataccaatcaagtgagggcagcctatctaccccctagcctctgaatcaaatctagttgtgcttcaatgataggcttatccacacaacgaaaaaggagggtcatggctcaaagaaccacaaaaaggaaaaatgtaaggctactccacagcaatagtgcagcactgccagcgatacgatgcatcaaaagatacaccatagcactatggcacagcaacagaaaaatagttgcgtgcagaaaagggggatagaataaatcacaataaagcaaacaaacgaatgcgcagcatcacgagaaagaaaatagtaaaaggttgaatgaatgtaattcatgacaaccaaacccacaacacccaaagccatgacaacccaatccacggcaaccaaaaaaggggaatatacaaaccaaatacaaaccaaacacaatgaataaatatattccaacgaattggtctaaaataaactgtataattagtattactgtatattgtaccgcgaaaagtggcccctatcggctgatacctactgtaacaaacttgaagaatgtcgtcttgagtactggtggttgcaaaggtatgcttcttttgaccaaacacaatgaataagtatattgcaacgaactggtctgaaataaactgtataattagtattactgtatattgtactgcgaaaagtggcccctatcggctgatacttactgtaacaaacttgaaagatgtcgtcttgggtactggtggttgcaaaagtatgcttcttttgtccaaagtggtgttgtattccatcaaaagtaataaaaagtatatggtttaatagaaaaagtgcagtgcaaaaacagggtctgaaaaaaaaaaaagacgcgttgctgagggtgactgcagccaataagctgagcacacagaatttgagtgacgtgtacactgaacattttgcactgtggtgactgtacccaaatgatttttttgtgataatttttttgaatcaaaatcgatataatttgacatttgtaaacatttttgttaaaattagctatagaaagtgtgctcagcgtatactactttctaataaacttaacgggaaaatttgaaggcgcattcaatggtgtcaattttaaagtacttttagaatgaaaagatagagaatttggagaaaatataaaaagcagtttttccaagaaaagttgagatttagcatatacaacgttcaaaatagcagttgcacaggttaccctacatctgtgcggtcattttgattcaatatacatcatagtaaaaagtgtcgttttcgccttcaaaattgcgatcgtttgatttttaacaaaaactttttttttttttttggatgatattgttttattagaatagtaattagaaataaaacaaatgcatcaaagtaatggacaagtgtatgggatcaaagtgacttgccatgttaatctgggtaataaactaatgagaaagggaccgaagattggacaatcttagcagttctgtgcggatgtggcgacaggcttggatggcatcaaagggaataagatcatagaattggcgatagtgatgccgccagatagtgcgcataattgtggcgaagaagtcatagatggtgatgtgcaggtcatggtgataaagatagtattgattcagtttgaaacgcataattgagctgtagatctgttgtgggtctgctgatttggggtagctgaggaactctttgaaggaggagtcccagacatctagtttatggacgcacttgatgagcaggtgaggagcatcttctatttcattgcagagggtacagcggtcggatgcagcatgtttgagatttcgttgggccatagccagttgattagagctttgtttgtgtatcattctataccaaagattgcgggcggagtagtgcatggtgtttttgtaaaaggacttccactgttgtttcgtcaattggttgcagaaatggcgaccgacattgagattggccatgtcaagaatgacaaagcgtagctctctgtttggcaatttgaagattgcacgctgctggtataccatggagtccacaaatggcagaaagtccatctcaccatcgttgttgtggtgcacgaagtggcaaaatgatagctggttgttcgctagggcacgtcgaactttggtctgggtggttggagctgggcattcggaccgaggtcgaaattggaggttctgttggacaggatcgtaggtgaagaagtcgcggacactactgcgcctgactgagtctttgtgcatgaaatccaaatctgtggtagcgtcaaagtggttgaaaaccgccaggaggggaaggctcatgagggtactgactgtgggacggctggtccaatctcgatggtggctgcatgtatccaaagcattgaacatgggtaggaatgggtggaggccattcaacgtattcttgtagcgagcagaagggaacaggagtggcagggcatgatggacggcatcatttgtgagacgaagggcatgtgtaagcaactgataggtaaattcaggcagaggaccacggttgtcagcaagtaggactcgcaagtatctgaactgtagcgccttttgttgagctccaatgtcaatcaggcctaagccgccttgatctcgaggtaagaagaatgaagtccctttgagcggtggaaacagaccggacatgacaaattggtagatagtggatgtgatcttcttcaaatcctcttgagggatggataccacacggataacatgccacagcttggagaggataagcgtgttggcgatgttggccttgccgtagaaagaaacgttcctggacctgtagatgtcggtcatggccttaatggtaccacgtagctcggagacgaagacttcccgttggtggttggcaaaccatatcgggtaacccaagtacttgatgtagcccgtagagtggctgtcgaacgatttttaacaaaaaccatgaggggtacctcatgaaaaatcgtgaattttcgaggatttggatcgatccaaaaaaaataaaaatgaaggtccaggatgtaaatggtgatcaatagcaatcatttggcactattccgagcatctaaaagggcttacaagacgagatattgagggctgaattcggacgatttggctggggaaagtactttttgtagcctgtagatctatagcaactgatgctacagattcgattaagacctcaaataattagtatgtctaggtaataaacactgaaaacaatcagacatagatcaacgtagatttggtatgtgctttactttacaatccccccagaaatacataccaaaatcacacttgttatggctcaatgcagattctgatagcctatattaatagaaaatactgccaaggtagtagtaaagattatatagaatctattaatgtttaacagcaaaacaaccacgaaatagcgaataacagcaggtctcaataatagcagcgtaaataggattatccaccctgttgcccgtttgtatttattgataattaacaattacccctcctgatggatcagcacttctcttaagtcctgatgtgtttgggtaggtttcttttgcaagtaaagtgtcatagcatctatagactacttgttgagtaatcaatttaattgaatcaaaataaaggaaaccacattactatacactataaaagtactgtatgtatgtacagataatggatactgtatgtatgtacagataatggaaggagcgtttgtgagaatctcgtatcagatcaggtatatatattagcgtacgatatggatgaatgtgccatgttacaacaggcaagtgctacggtatgaacaaacaagcatctatgtaaaatgagcgtctgctcaatcatgaaggaagatcttatttgacagtgcagtccattgggacaaaaacctgtataaaaggtgtctgataaattggataccctttttcttttttacctttctctttatcctatgtatttatccgtcatcttgcccatgcagaaacaacaaagagatgagcaaggtaggtcgagcttcgtttacttcacaaggtctgttactaaaaaaaaggatctaagcatatcaggcgctggtgcctctcatggtccacctagtaagtgaaggcagccatgctcttccactcctgaaagacgttgacttgctgtatcatgtagaaaagcaacgagcatctgaagagaacccatcctcatcaacatctactggttttgaagaagcagcttcctctggtagtgtcaacgagtctttctcatctgctgttcaacccattcaagtggatcctgttcagacacctccactccgtggcctgcatgctcgtatttcaagcattgttccaacaagcccagcaagaaggaaacctatttcattgagtagaagtatgaggtattggtgtatatacgtggtgagcgcttaccaaacgaacagcatactcttgatggcaatcttgtctctgccattgctcatcaaaatgcaagagtgcaaggcatagaccccgggcttgtcactatggctactggtgtggccaccacatctcaatgtctgctcaacagcgtgaatcgcttccaagccttggcggacaacaagctggtactacaccccaaggacaaatacctcccgcttgctttaactgcaaaaatggtaaacaatggcgtcggttccaacattgatcgtaagaagatggaaaagaagaagcccagcttaaagcggatccaaaagaacagggtgaaaaggaagacaaggatcaagaagttctaccagagaaaagtaacggatgactgtggaagaaaaggctcctgtattacactcactggtaactggtccgcttcggtccaacacatcaaaggacacacgagaagaagcacaaagcccttctatagcgaattggccgtctctccacaacatcacgttctcagcgtcgatgaaaaccgctcgaccattacatgctcatcatgcttcaaaaaaacatgtaaacagcctctgatcatcaatggcaaactcaagcgagtcgcgggggccgttatttgttacaatacacaatgcccaagacgcctcacaacgaaagcaacgacaaccaaccgcgaccgaaatggtgcgtacaatattgcttcgattgggttttcctcctttgcttccagagatggtttaccgcccccccccttttagaagaagccgcccagcaaacaagtaagcttgccatttttatattaatgctacactgtttctcatgtattccattgcaggtatagcttgtcaaacgaatttctcgcacaccagagcttggtttacaaccaagatggtgtgagaacacccactcaaggtagtgaccaattagaagccccgagcgggtcataatcaaagctaggtcttttgatatgatagcatcgatatttcaaaaacaaaatctttaatggtcaaaacatttgacatgcaaaacacttctgtacatctagtatttggcgcgaaaagatagtagatagctatactccacaaaagtgaactgcatggtggatccatgttcagaatactacatacttgactatagacgcttgataacactgggaagtgggatggccttgtttgtgaggttgatgccgtattggcaatcagcgaatttgcttatactatataccatacatgtttgtagaattgccgagtccgccttttgtagcttccgggaatttatgtcacatagtaaatgccagagtgcaagcaccacactttgatgcaacttcaaaaaggtggcgaacgtatgccattgtattgcttagggccaagctctaaatctagccatcgtgtttccaaagccatgataactcaaactttgcagcaacagtgatactgtatccttttcgaccgaacatcattgccttcatttagcacacttggtaatcttgtggtataatgggcggcagcaacattcagatcaaaccgggattaaacaaaatcaggggtaatgccattatttttcaaccgtcggtaaagagagccaaattggctattgtgcctgtacaggttgtgaacgccaccatcgatataagcaaacctgtataataatactaataacatcacgtggcaaaacgcaaaaaatgttgggcgaacgacgataaaagttgcggtgttacactttcctttccctctagacttttttctttctttttttaactttttcagcatgactaaatcaaccataatgaagcgtattgtcgctttgttcaagaaaacacacgagaaaaaggaagaacatgcatacccctctgaattagagagcacctacaaggtgaccaaaaagacgctaggcgtcggctcatttgctgttgtaaaagaatgcgtacatcgttcaacagggcaatcatttgcgctcaagatcatactgaagaaagccatcgcaggtaagcgagcctcccatctttacacacatgttaccgatactgttgtttttcccaaggcaaggaacatatgcttagtagcgaattgggtaaccatccacgaaagggacaagcaatgccagtctttgacacctttcaatagatattttgaaacaagttagacatccacatattgtatccatgcataatttgtatgaatcgattgatgctgtatacattgtcactgatttggctagtggtggagaactgttccagcaattactgaagaaaggaacctacacagagaaggatgcatcaaacttaacgagacaaatgctagaggggttgcagtatctacacgaaagagatgtaagccagggaagatcatcaaatttagctgatttggtgattaattgttcggttttagattgttcaccgcgatatgaagccagagaacgtacgttcccatcgagtcgctaattgcagttcttgtaccgactaaattgatgtgtagctattattccaaacagctggcgacgattcgaatttgatgattacggattttggtctatcaaagattttgaaagcacaagatgacatcctgactactgcgtgcggcactcctggctatgttgctcctgaagtattgttgcaaaccggtcataacaagccagtagatctatggagtgtgggcgttatactggtaaaggacaagtgcacactttagaaatgctgccaaaaacttatttagattgtctagtttacattactgagtggatatacgccattttggggagaaggtagtatacagcagagattgattgcacgcgagacttatatcacatgtagatcaagcaagcttgtttgagtccatcatgtcagggcagtacgaatacgatgaggaatactggtcggatatctctgattcaggtttgttatgatgtgcacatgtcttgcaatgcagtgtctgatgcagcatctctattaagcccggaacttgattgacaaactattgacattcgatccaaacagccgaattacagcagaggaggcgcttcaacatccgtggataacaggcactggatccaaagaggctggcccgagaacaagcacgaatcttgcacctgctattcgaaaaggctatagtagtagaggcagcattactgcaattgctcttatcaatcagtacaaaacttctgaggattcatccagtgaagaggagagaagaagcgaagaggttaagaaactcgacatcacaacttgaaacattgcggcttcatgctcttttttaaatcaccaaacagagcacttataccttttaatatgccataaaaaatgcttcaacaaccaatacatttcttatactatcagcttccattttaatgttactcgaacgtaataaagaggatcagataagtgagttggttcctgagcggtaattgggacggagttcacctgtcaaaagcagtgatctacgcatcaaaactttctgaaatggatcaatatagacgcggaagacacacaagggtataagaaagaaaaggcaatgcttttgagcatagataatattaaaaatcatggacacagccaagaagagtaagtagtcgagttgttcaattgactttgaatacagtatacagtagccataataccttgcagatttccatattcactcaacaagccggatggtccagattacaacaagtggatttatttacagtacgagaataagagacctcattggaaacaaacaaacagctctacatgtagcaaacccatgatttgcctgtttttctcagagcaggatctaaactatctaattctataatgtcaaagctttcttggggttgatccttgtatttcaatgagaaatcccagcaatacagcctctcttcatagtgtttctgtccgcgcacctcaatggatgcaaacacctttgaatagtcaggcgttagtcgcacgtctgtgattgtgtaatgttggtaaggcttctctagtgtaggcagtagtctgtaagcgatttttccactctgcagatcccagacgttgatacaagcacttgtggatggcatcagttgctcttcctctgtatcgctgcctcctgttttgttgattgattgatagtactggtagagctgataaggcgtcatttgagcaacgggcggcgcagggctgtctgtttcctctatactatcgctcaatttcttgacgtagccggctgacttcttcttttgtctacgttgctgtacaatgttgtttgtgggcggcaccagcttggttgtgctgctatcgttggctacctttccttttgtgagaagaaagaatggtgtgaggcagaggcgggtgaatgcagtgatgtcttcagcagcccattccgacgtctgcactgtttcttcagggacacgcaactcgtagacaagcgagccagtcaaaagcgaaaagaccagaatagggccagacgcatctggagcgcaggcaacgagatgtccattggcggcaatctcgccaacgccttgataccaatcgcttcttcctgataaataggacgagatatcaatcatgcctcgtcgtgtgggtcgatggtgatttgtccacccagtattgctgtttgaactgttgttcttatccaaatcccaaacacgaatcatgctgtctgaaccaccgctgacgacaactaaacaacagacgcatgcagttagttggtattaccatgaccctcgtttgcaagccaagcctaccatcgtcgttcatactgatacacaaaactcgtccccgatgtccctgccacattctgaccagcgtctttgtttccaggttccatactgccactgtgccgttgagaccgcctgtcactagccatttggaattgggttgcgtataatggcagacgatcgagtgagatcttgcagcctcgggccagccaggtatctcgctggttgcagctgtattgtccagaaagaaccgttgctttgtctgtggggattgaattatcaagctttgcgagcctgatggaccatggtaatttggatttgatctcacaatgcggccatcgtttgcaatcgtcaagctggtgaacatgccctgttcttgcggagcgcctataacagtactgggcagcgtgtccattgaggtggaatcgcacacattgggatagaaccccttcacacagcggccgttataccaatttcgtgtgattctgtacatgtcctgccaacttcgctgatttctgtgagccttgggtgagggaaactggagcgaccaccagcgtcgagcactggctctctcaaagtctcgatggcaggcattgggccaaataagctcatcgtaatgagcaatgacttgagcccattgtcggcacacttggctgcaagatgttagtgtcgcaccgtcgagataggcaaagatggctagcaaaagttccgctggaaagggtccattttcacggtgctgttgctggtttgcagtgctggtttccatggtcttgaactagtatataagatggagaaaaagcctcgagaaaggactttttcctgtttaaatgaaggcgacattggggctcacacacacacactatttgctctggcagtcccgctgttttcttttagtctcgactgtttgagaagtaattgaatagatctttctcaagcgagacttgaaacactcttttgaagcatccacagcgtcatggttggcatataaaatcagtcttttattgcttcttgtactttttctcggggcagcacacgctctttccacccgcggcgatcagctctctgcaacatttgtgcaatgcctccagttcttttgcgcatctggcctcttgataatcgtttttccccaggcagtcttggatggcacaggctaatgcattggtgttgttagaagcagcacatgagaagacgctctcgacatttaccgaatttctgacagtgaggaacctggtagccaagcaccgttagcaatatgctgacaacacattgtatggcttacctgttctgatgatgcagtgggcattgagtttgtttgtttaaaatgtagggggttggtcaaaagtaaaaacacttgtgggtaccgtgcggctggcaaatttcgtcccttttgagcaactaaaagggaggacttgtgaggcaacacaaaagttgttgggaggtagagatgaccgtagtccgaaagatagtcctcctcatgtaaattgagtcaagtttaagatgcaagtcttggatccgaagagttctaaattttgtctgttgacatcttcatccctttatttctcaaagcatggctagttgggacttggaaatgaatacagcccacagattaacacccgtagattcagaaacggggacggatcagaaaggagccatgttctggggccgccttctttggcaaagatgtattgagtggccagttcaagaaggttttcgcagctgtagcaaagctccagctgcaggatgtcaagtttgatgtaataaagcaatgcgaatgcttcaagtaggtcatccttccactttggccagacaattcaaacaccagcttgctcgagacaaagtcttgaaatgtgtcaaatggagaagaggcagcattgaggtggaattggagatggagaaaagctcttgaagccatgcccttccatataatagtcattcttgatcaccaccgcgaagtgtgtgatccggcggatgcttgccctattggcagaaagtcctgggtttgtcgaaagaagagcttgaccacctatgtaatgaagcatgtcaaggtacaaaaatctgcatttctcaaaataatattgtaactaaacccactcgtataatactgcacacaaaagacgtcagttttgcaatgatggaagctgaatttgttacacatttcgtcagttgactcagtaggcacataaactgcaaactttatacttaacatccgtatgaaaagtgttcataatagaacattagacccaagcttttgtgaagagaaaactaaagtttgagccaatgccattatggaaaactagctgtcgcacatttggtgatcatagtaaatagacaagaggaggcaatcctagcgcaaagccaaaaacggacatgtacactgtgtttgattgatgctgctgatggcccgtaaatctgtgctactcacgccaccgctcagcgccaaccgttttactcctgaacaagcgaaaagcgttgacccggcgtttgcatgtatggcctttaaatagcccacgcagcagcagatcggcggcatcaatctagggaggatgtctgctcaggacagacacagctaattgagcccgttcaaaatggcatggcctggctaaccgagctactatatatgatttaatataaaatccaattaaagagatcagagttacctagaccacggcagtagcacaagaaccgtgcaatgggtcaacttggattagtgtatattggacacctttctttttttgggtgtccgaatgtaaattgaaacatggtcaataactactcacagcaattgaacgccctttatttggtttctttttctcttattgcacttgttcttcttccctcacgaaaatttttcctgttcctgaagcatcaatacctcttgaatcatgcctgggcaagagatagtttatacggtccacaaattcgaagcagagaatgtggatgaaatctcgatcaatgtcggcgagcaagtcattgttctcgagaaggacgaaggcttcaatgatggctggtggcaggtaaagtagcttttgtacattgccaatgcagagcaagtaaggggggctgcttctaaactatggatttgtcgctgttagggacgcaatgtgcgaggtgaaatcggccttttccccattacatacacagtaaagcatcctcctcctacagtcaccgcctcctcactcgcactagaaaacaagattgattcactggaaaacgctatatccaagatgaaagcacccacatcaacgagtgctccaccgcaatccaagaagacgatcagctccatgtcgtccatgtcatccatctcatcgaaaaacattcattcgaccgtaaatcagtcgctggagaacccgttgctaggcaacaaagtagaggaatggacgtctgaccaagtgtcaacatggctgatcagcgttggattcgataaacagctggcagacaacttcaaaggtatatatacaacggagctcgccctcatgtcagctgtattaaattggagatgcttattttgtccatcatgtcttagatcaggaaatcactggcgacattctattggaattgactctggattctctgaaagaattggatgttactacattcggcaaacgattcaaaatccacaatgccatcaatgctcttcggcagggaaccagaaagcaaaaggtaggtgcacagagtccagttgatgcggttttctgcgaattaattttatatagcaacacacatctccagctgacaattctgtggcaagcaaaaacacagaagcacgggttgcttctccatttccagacttgggcaatcatcgtagtaacaataatgcgctttcgtcatattacaacaacaacaaacaacagcagccgtatcctgacgatgacttggtatcagactacagcactgtccttcgaaactctcaattagcaccgccaaagacagctgctccaaagagctctatgcctccacctcgcccatcgattcccttggacatggatttaattgcgtcctcgcccaggttgtcaagccttgttgagcgtcaaaatacagagcacttgaaaaacagtagtcagatggatcgacaggagcaacaattgcaattgcagatccaacagaatcaatcgcgtctactgcagcaacagcagcagcaaagaattcaatatcttcagcagcagcagcagcagcagcaacaacagagacccatttcacatcaagtcatctcaacgcctacgcacaataatcaagtatcggcagactggaaacgtagcacaatgaacaatatcaagacacaggaggtatgggaagttatcgtgctcgtcgatattgattgctgacacgtgctgttcgcttcattgtagtctttaccagaaggccgatcgtccacgtcgagtcgatatagcttcatgcgttcgtcattgatgccatccggcaacaacaagctgcaaaacatattgcccaccaatgcgccgagtgtgcgtagatcagaggatgtgtcctcgttatcggaagcaactgctgcaccagatatggaaggctggttatacaagcaaggcgacaaatacaagacttggaacaagaggtggtttgtgctcaaagcgaataatctgttctatttcaagagcccaaaggtatgtggcctcacccgtcagtgcgagtgatatgcgtattaaacagtgagattggcgcaggctgtgcgaatgaaaggcatcatcaatttgaagggatacagaatcgaagtggatgagtccattcatccgggaaagtactgcttcatggcgcatcacgagagggagagaaccttctacttttacaccgagtccgaaaagcccatgaaagactggctcaaagcactgatgaaggcaacgattgctagagactttgccagtaaagtagtgcctggattgcaacatgatgcctgtactaatgattattacttgtagcgcctgtcatgtcgtccagcacaattcctaccatttcattggaaatggcccgtcgaatgcgtccccgccctccctccaccatcttcctctctcaaaacgaccccatgcgcgcaagctctcctgcgccgtaccgcaacaatatgaaccagcacttttcgctcatgtcactagacgaacgcgctcagcctattatgcagttttctcaccaacaagacatgtctgtcaacggcggctctcgtgcgccctccgtcatgagtacacggcccatggaccagcaaaaacgcatgctaccagacaacgcatccgattactccatagatcagcgcagccgactaaaagactcgggattcaatagcacacacgggggaaccggactaacacgatctgccacggagagtagccgcagttcatccggccgccaaagcatatccatggcgtccgtgcagcagcaatccgtcaacgacacaccagccactgtgaatggcactgcattttatctcgacgaagaagacgaagatttgattgatccagagcacatgagcgtcattgagtccaaccgtccaaccgctacaacggctgcttacagagacaacacggatcgcttctcacaagtaactgctgtgctcgatacaaggcctacaaagcaagatgcgtatgttgactggatcaatgcccacattcagggcaacatcaagagcttgacagatttgagctcaggcgacgttctgttggagtttctggaggtcttgaccagcaaggaaatactgagacctatcgtgatgcctggccaaacattgaacgctcagcgcatggaccgtgtgattgcagcattcaagtttatgagcctcgaaggtgttgatatggacggttcttgtaccattcgaggtagtgttgttgagaacgcggtatcaatgtttaatttattcacactactactatgatagatgtcttgaatggcaacgagatcaaaatcatgcacatgctggacgctgtggactactggtccaaatcacaaacgagcgaagccaatggcaaaaagatggccagcggtggcacttttggcgaggatgaccagtgcaaactaagagagttggaggaagagtctgaaaacatccttccacccaactcatttgcctctcgataaaccacacgctccc

SEQ ID NO: 156 - DNA, 20870 bp, unidentified
  misc_feature 1..20870: note = Fanzor polypeptide
  source 1..20870: mol_type = other DNA
gcttctaatgatagaaaagtacttctggacattagtgctatctgctgtgcatttcagttctttttataccgaatatgaattcaaatcaatatttacgtaccatagagtagttgttattttatataacaacagataaatcttggggaagtagttgaaagtagtaaaagttatcaccagccggctgcaagaatcatttaactaatgatgaacaactaaggtagccactgcaattttgttaatataattatggctccctcagagaagaaggtatacaacagtgctagtagcattaactctctataattattcatatacggtgtagaaacaacatgttttgctaacagttaaccttaactcctcacttctttgaaatctttatttatatccagaacatcaactttaaatgatggtaaagaattaatgatgcccgcaaagggtgcatatgcacaatattggattttaatcatgctttccattggaatgcccttcacagaaacggcaaacttcttaagacgtccagtaacaaaaaagacactcctcgctgcatttgttgaacaaaaaaaggacgctgtcatcaggcacatgcagcaatacatgacgaaaaaagaagccctaaaaagtttgcgcaatatgtatgaaaccgagttcaagcgtcgctacccaaagtccaaacggggcccatctatgcgcttgggaagcagtacgttaggcgaactgttaagcactactgcatccatcacacaagtacttgatggtgctgcatcttctatgatcggtagatcaaaaacaagtgctgctccaatagttgatcgcttgagagatgatgatcctgaaagcttcgcgttgctcttagagaagtttcacatttttgttgtatgcaaagcctacgtttaccagcatgtgccagaagactatatgcacatctggctccacacacacaaacacatggactaacagcgtgtgcctggacaagttacattcactttcgctctagccactcgacatgttgtttgtttacatgttgatcatcgtctgtgcactggtaacacccaactcaacgtgctccaaactctttactgtgaagacccactcaatgcgtatacatcacgctcatcacttcatgtgtgtactctacatcagatattccacacccgaacatattaatctcgctgttggattcttgtaattataacaataagaaaagaaaccagtagaaattacgagatacgaaaactaaagttactttattgaacacttcaatttacatctgctattcatactaattctaaaggacacaaatttctttgggacgattgatttgatcgataggcgtgattagctaattgattgaacttatttctatttgacagattgtatcgctcttaccagacacaatctctgggtctctagacttgacaactcacttgtaatacaatgctacacaatactgtacttcatttcctgatttgaaacaaagactttattcttccaattgtatttcaaacatctacttcaatctccaattgaagatgagcttcctaagctacccactattattctggcagaacacgcgcgttccacccatatattcatcttcaatgtactgtcgtttaaaaaactgcgtcacaaaactttgatttacgatcaatactcatataataaaggtatttatgtgaacttactaccaaagaagccacaagcaatagtaccatcaacatgtataatattaacctcctagcttgaagttgattggatactttggcataaatgaaatttttcaacaattataaaaacgtctaattttaatcaatctctgatttcttcgaaaataatttgggaatagcatcaatttcgtttatgcgtctaatgatgtggtcttcccttattctactgtacataaaaaactgagtttggtgcactgactggcttgtacgcttaattcaaaaaccgttccttcaaaaggaagttgtgccctgtagaacgctgtaaatcgctcggatctccttcaaactcaaagagaagctttttgacaaatttagcaatagccttaatttaaaaaactaccaaatccccctgtcaaatatgcagaaacgttaagcggtatggtgaaaatgctaaattttaagaaaggtcctttgattgcgcgccatttttgccaagcaaagtataactaaactgcataaagcttagctttagtacctctgaaacctaactgtagcattttccagacctttatttgcttgattataaccttagcaatgcaaaaatcacgaaatgcacaatttccctgctaatttcccaaaataaatacttctagttgatcagagcttcaggtaattagagatgaaacctcaaaatcctattatacattctttttgggctcttatctaatctcatcatttcaaacctcactgttctcaaggtggtattgcttaaatttgaattatccctagctctcacacctaatatttagtagctcaataatagctaaaaaatgtatttatcactccctaacgaatcagaatgaccgggtctcgtttgaaacttttgcagtcatatagtggcgttttttgcggttttaatgacaccaaaagtgagcaaatccctccagtatatcgctagctatgctcgatttcagttttatgacgcagttttttaaacaacagtagtagtcatatccagggatctactctatttcaatcaagagatgccctgtaataaagaagtctctttgcttttgtttagatacagttgacaactgattgttcatatcgtttcaatcgactttattaacacgaattcatcaaagtagcttttgtgtcctatagatcgacggcaaccgatgctacaggcttggtcaaggccttaaaccatttgtaattttgagactacacgctgattaccatcagacaaagaacgatggaaattttgcgtatgttttacttgaaaaacgctcagaaataccaaaagttctgcttattgtatttcaatgcaacttttactaatggcctatgcctataaaaagtagtgcagtctgctatgcattttaattcttcgtatatcaaatacacaatttgggtggtcgttgttgcataccgtaaaaaatgtgctcctctctacccaatagaaaaaaaaaatggatctacagtttggaatcgaatataattaacactcctcgactactgttgaactacaagaatcgtttatttaatatacacttgacgtagccactgtaagttttgtcggttttttagcctatcattagatgtcaagccaattccataccactgacatttaaatggaattgtagtaccgtgcgcgaaaaaaacgttcaagtgttttcgattttgggacaccttcttcgtagtgtgtatgcatgtatcttttgagcattatgagatacagaaatgagactactatgtttcaaatgagagcagtgtcctcttttgaaagatatattgtacatcaagatatgcccaatttctattggctaagagcaaaatcaaagcgatgttaccgaaaatcaatttaatcagtttagctgagaaacaaaacctattggaaccaaaccaaggttattttaggtattgccgctacagtatcaacgagtcatagaagagacaaaaccaaagcattgctacgcatcagacaggccagctttatacaccccctccaaataaggcattttacattattgcagattaaatcactgaaaggcgctcaaacttgaaacataatatatcatccgaaagccttttttaagcgctacaaacacctgcaatagcagttactaaaaccaactacttctatgttttagataccaaagaaaaaaatgactaaaaatcaagcattttttggggttaaccatttgccggcaaatgcttttaccgagtcgttttgctgaagattttctaccgtgtggcttggcagctaacgttcatgccttaaaatttaggtttccttcagtttcttattattcgcttagtcaaaataacgaaatctaaaaattagccgtttatttcgtctcaaccaatcaaatctggctattccgcattttcaagctagagatagtaagtggcagttatgagcttcaaattggtataattgaaaagatgctagcactgaaactgatgtagtaatacgaccagaaagattttgtcagggcactatcacttgaacgtttttttcgcgcacagtataaatatgttttgaatccaggacacgattgatcctggcttccttttataagaaacataataaagaccctacgttctacgtgatagaattactactgtctttatattttataatttggaaataatagtgatttcgtattacttaaataactctcaagtttgtttatatgcttataaccgcctcagaataaacatacaacaaggttaatatgagctctccaacagtcatatacggcatgatgaaaacacgctttaccgtattttgtccaacaacgcccaaaacagtgttcaacctgtgccactcttgaacaaagcatgctagattcaagcggttttaaataaactgttgcgcaacatcccctctatcagcctgctactactagatactcgtaatcagcagcttttattatggacattgtcataatcagtcatcaaaatgggctgatttcaaaaaaaaaaacaatcatccatccatcaacaccaactcgtccaatccaaaatccaattataccaccatcgtctcttctctcgcacaattccgcttaaaatatcatctactaatctcattattacatcgattgctcaaaatcgatctcgcatgatgacctgaatctgcataccggaaatacctgcatacaagcaagatatagtgtcgagcacaaagatacagtatacagctttaaataaagtgcttttaagtaccccaactgtcaatccgtcaacactagacacatgtcattatccgcctccctcataaatcttgtctacgagaccagtgctcaaatttggattattattttggaaatcgtccacccatcaacggcaacgcctccagatgactaaagcctgaccacaacacaatcgtgttctttgcaaaatctgacataggtacaggtttatcccataagccagatgattgacatatgaagactttgattgatttgataccaataatataataatgcaaaattgtactttttggatgctatgatgaacaggcgtagatttattcaaaattattttttccaggatagtgaatgtatttgatcatgtctgatacttgtggtggtatcgtgggtagttatcttaatccatttgtaccatgcattttgaatgtttaatcgtgcttttctcatttcatttacatttttagtttcaatacgaatgctttatttctctgagctgtctccaaatttgagccaataaaatcgcttaaaaagctattttaaacgccgcgaactttgaaaaattttgccacagctctcccttgtttttttgttaggcggaattttaaacacagccgaatacactagtattaagctacgttatcatcaaaaacccctaaaatgcaagaatatgccttactacacaccccagctgatagcgcatatgcttgagactctcagttagcaccaagtaagtgataccaatcaagtgagggcagcctatctaccccctagcctctgaatcaaatctagttgtgcttcaatgataggcttatccacacaacgaaaaaggagggtcatggctcaaagaaccacaaaaaggaaaaatgtaaggctactccacagcaatagtgcagcactgccagcgatacgatgcatcaaaagatacaccatagcactatggcacagcaacagaaaaatagttgcgtgcagaaaagggggatagaataaatcacaataaagcaaacaaacgaatgcgcagcatcacgagaaagaaaatagtaaaaggttgaatgaatgtaattcatgacaaccaaacccacaacacccaaagccatgacaacccaatccacggcaaccaaaaaaggggaatatacaaaccaaatacaaaccaaacacaatgaataaatatattccaacgaattggtctaaaataaactgtataattagtattactgtatattgtaccgcgaaaagtggcccctatcggctgatacctactgtaacaaacttgaagaatgtcgtcttgagtactggtggttgcaaaggtatgcttcttttgaccaaacacaatgaataagtatattgcaacgaactggtctgaaataaactgtataattagtattactgtatattgtactgcgaaaagtggcccctatcggctgatacttactgtaacaaacttgaaagatgtcgtcttgggtactggtggttgcaaaagtatgcttcttttgtccaaagtggtgttgtattccatcaaaagtaataaaaagtatatggtttaatagaaaaagtgcagtgcaaaaacagggtctgaaaaaaaaaaaagacgcgttgctgagggtgactgcagccaataagctgagcacacagaatttgagtgacgtgtacactgaacattttgcactgtggtgactgtacccaaatgatttttttgtgataatttttttgaatcaaaatcgatataatttgacatttgtaaacatttttgttaaaattagctatagaaagtgtgctcagcgtatactactttctaataaacttaacgggaaaatttgaaggcgcattcaatggtgtcaattttaaagtacttttagaatgaaaagatagagaatttggagaaaatataaaaagcagtttttccaagaaaagttgagatttagcatatacaacgttcaaaatagcagttgcacaggttaccctacatctgtgcggtcattttgattcaatatacatcatagtaaaaagtgtcgttttcgccttcaaaattgcgatcgtttgatttttaacaaaaactttttttttttttttggatgatattgttttattagaatagtaattagaaataaaacaaatgcatcaaagtaatggacaagtgtatgggatcaaagtgacttgccatgttaatctgggtaataaactaatgagaaagggaccgaagattggacaatcttagcagttctgtgcggatgtggcgacaggcttggatggcatcaaagggaataagatcatagaattggcgatagtgatgccgccagatagtgcgcataattgtggcgaagaagtcatagatggtgatgtgcaggtcatggtgataaagatagtattgattcagtttgaaacgcataattgagctgtagatctgttgtgggtctgctgatttggggtagctgaggaactctttgaaggaggagtcccagacatctagtttatggacgcacttgatgagcaggtgaggagcatcttctatttcattgcagagggtacagcggtcggatgcagcatgtttgagatttcgttgggccatagccagttgattagagctttgtttgtgtatcattctataccaaagattgcgggcggagtagtgcatggtgtttttgtaaaaggacttccactgttgtttcgtcaattggttgcagaaatggcgaccgacattgagattggccatgtcaagaatgacaaagcgtagctctctgtttggcaatttgaagattgcacgctgctggtataccatggagtccacaaatggcagaaagtccatctcaccatcgttgttgtggtgcacgaagtggcaaaatgatagctggttgttcgctagggcacgtcgaactttggtctgggtggttggagctgggcattcggaccgaggtcgaaattggaggttctgttggacaggatcgtaggtgaagaagtcgcggacactactgcgcctgactgagtctttgtgcatgaaatccaaatctgtggtagcgtcaaagtggttgaaaaccgccaggaggggaaggctcatgagggtactgactgtgggacggctggtccaatctcgatggtggctgcatgtatccaaagcattgaacatgggtaggaatgggtggaggccattcaacgtattcttgtagcgagcagaagggaacaggagtggcagggcatgatggacggcatcatttgtgagacgaagggcatgtgtaagcaactgataggtaaattcaggcagaggaccacggttgtcagcaagtaggactcgcaagtatctgaactgtagcgccttttgttgagctccaatgtcaatcaggcctaagccgccttgatctcgaggtaagaagaatgaagtccctttgagcggtggaaacagaccggacatgacaaattggtagatagtggatgtgatcttcttcaaatcctcttgagggatggataccacacggataacatgccacagcttggagaggataagcgtgttggcgatgttggccttgccgtagaaagaaacgttcctggacctgtagatgtcggtcatggccttaatggtaccacgtagctcggagacgaagacttcccgttggtggttggcaaaccatatcgggtaacccaagtacttgatgtagcccgtagagtggctgtcgaacgatttttaacaaaaaccatgaggggtacctcatgaaaaatcgtgaattttcgaggatttggatcgatccaaaaaaaataaaaatgaaggtccaggatgtaaatggtgatcaatagcaatcatttggcactattccgagcatctaaaagggcttacaagacgagatattgagggctgaattcggacgatttggctggggaaagtactttttgtagcctgtagatctatagcaactgatgctacagattcgattaagacctcaaataattagtatgtctaggtaataaacactgaaaacaatcagacatagatcaacgtagatttggtatgtgctttactttacaatccccccagaaatacataccaaaatcacacttgttatggctcaatgcagattctgatagcctatattaatagaaaatactgccaaggtagtagtaaagattatatagaatctattaatgtttaacagcaaaacaaccacgaaatagcgaataacagcaggtctcaataatagcagcgtaaataggattatccaccctgttgcccgtttgtatttattgataattaacaattacccctcctgatggatcagcacttctcttaagtcctgatgtgtttgggtaggtttcttttgcaagtaaagtgtcatagcatctatagactacttgttgagtaatcaatttaattgaatcaaaataaaggaaaccacattactatacactataaaagtactgtatgtatgtacagataatggatactgtatgtatgtacagataatggaaggagcgtttgtgagaatctcgtatcagatcaggtatatatattagcgtacgatatggatgaatgtgccatgttacaacaggcaagtgctacggtatgaacaaacaagcatctatgtaaaatgagcgtctgctcaatcatgaaggaagatcttatttgacagtgcagtccattgggacaaaaacctgtataaaaggtgtctgataaattggataccctttttcttttttacctttctctttatcctatgtatttatccgtcatcttgcccatgcagaaacaacaaagagatgagcaaggtaggtcgagcttcgtttacttcacaaggtctgttactaaaaaaaaggatctaagcatatcaggcgctggtgcctctcatggtccacctagtaagtgaaggcagccatgctcttccactcctgaaagacgttgacttgctgtatcatgtagaaaagcaacgagcatctgaagagaacccatcctcatcaacatctactggttttgaagaagcagcttcctctggtagtgtcaacgagtctttctcatctgctgttcaacccattcaagtggatcctgttcagacacctccactccgtggcctgcatgctcgtatttcaagcattgttccaacaagcccagcaagaaggaaacctatttcattgagtagaagtatgaggtattggtgtatatacgtggtgagcgcttaccaaacgaacagcatactcttgatggcaatcttgtctctgccattgctcatcaaaatgcaagagtgcaaggcatagaccccgggcttgtcactatggctactggtgtggccaccacatctcaatgtctgctcaacagcgtgaatcgcttccaagccttggcggacaacaagctggtactacaccccaaggacaaatacctcccgcttgctttaactgcaaaaatggtaaacaatggcgtcggttccaacattgatcgtaagaagatggaaaagaagaagcccagcttaaagcggatccaaaagaacagggtgaaaaggaagacaaggatcaagaagttctaccagagaaaagtaacggatgactgtggaagaaaaggctcctgtattacactcactggtaactggtccgcttcggtccaacacatcaaaggacacacgagaagaagcacaaagcccttctatagcgaattggccgtctctccacaacatcacgttctcagcgtcgatgaaaaccgctcgaccattacatgctcatcatgcttcaaaaaaacatgtaaacagcctctgatcatcaatggcaaactcaagcgagtcgcgggggccgttatttgttacaatacacaatgcccaagacgcctcacaacgaaagcaacgacaaccaaccgcgaccgaaatggtgcgtacaatattgcttcgattgggttttcctcctttgcttccagagatggtttaccgccccccccccttttagaagaagccgcccagcaaacaagtaagcttgccatttttatattaatgctacactgtttctcatgtattccattgcaggtatagcttgtcaaacgaatttctcgcacaccagagcttggtttacaaccaagatggtgtgagaacacccactcaaggtagtgaccaattagaagccccgagcgggtcataatcaaagctaggtcttttgatatgatagcatcgatatttcaaaaacaaaatctttaatggtcaaaacatttgacatgcaaaacacttctgtacatctagtatttggcgcgaaaagatagtagatagctatactccacaaaagtgaactgcatggtggatccatgttcagaatactacatacttgactatagacgcttgataacactgggaagtgggatggccttgtttgtgaggttgatgccgtattggcaatcagcgaatttgcttatactatataccatacatgtttgtagaattgccgagtccgccttttgtagcttccgggaatttatgtcacatagtaaatgccagagtgcaagcaccacactttgatgcaacttcaaaaaggtggcgaacgtatgccattgtattgcttagggccaagctctaaatctagccatcgtgtttccaaagccatgataactcaaactttgcagcaacagtgatactgtatccttttcgaccgaacatcattgccttcatttagcacacttggtaatcttgtggtataatgggcggcagcaacattcagatcaaaccgggattaaacaaaatcaggggtaatgccattatttttcaaccgtcggtaaagagagccaaattggctattgtgcctgtacaggttgtgaacgccaccatcgatataagcaaacctgtataataatactaataacatcacgtggcaaaacgcaaaaaatgttgggcgaacgacgataaaagttgcggtgttacactttcctttccctctagacttttttctttctttttttaactttttcagcatgactaaatcaaccataatgaagcgtattgtcgctttgttcaagaaaacacacgagaaaaaggaagaacatgcatacccctctgaattagagagcacctacaaggtgaccaaaaagacgctaggcgtcggctcatttgctgttgtaaaagaatgcgtacatcgttcaacagggcaatcatttgcgctcaagatcatactgaagaaagccatcgcaggtaagcgagcctcccatctttacacacatgttaccgatactgttgtttttcccaaggcaaggaacatatgcttagtagcgaattgggtaaccatccacgaaagggacaagcaatgccagtctttgacacctttcaatagatattttgaaacaagttagacatccacatattgtatccatgcataatttgtatgaatcgattgatgctgtatacattgtcactgatttggctagtggtggagaactgttccagcaattactgaagaaaggaacctacacagagaaggatgcatcaaacttaacgagacaaatgctagaggggttgcagtatctacacgaaagagatgtaagccagggaagatcatcaaatttagctgatttggtgattaattgttcggttttagattgttcaccgcgatatgaagccagagaacgtacgttcccatcgagtcgctaattgcagttcttgtaccgactaaattgatgtgtagctattattccaaacagctggcgacgattcgaatttgatgattacggattttggtctatcaaagattttgaaagcacaagatgacatcctgactactgcgtgcggcactcctggctatgttgctcctgaagtattgttgcaaaccggtcataacaagccagtagatctatggagtgtgggcgttatactggtaaaggacaagtgcacactttagaaatgctgccaaaaacttatttagattgtctagtttacattactgagtggatatacgccattttggggagaaggtagtatacagcagagattgattgcacgcgagacttatatcacatgtagatcaagcaagcttgtttgagtccatcatgtcagggcagtacgaatacgatgaggaatactggtcggatatctctgattcaggtttgttatgatgtgcacatgtcttgcaatgcagtgtctgatgcagcatctctattaagcccggaacttgattgacaaactattgacattcgatccaaacagccgaattacagcagaggaggcgcttcaacatccgtggataacaggcactggatccaaagaggctggcccgagaacaagcacgaatcttgcacctgctattcgaaaaggctatagtagtagaggcagcattactgcaattgctcttatcaatcagtacaaaacttctgaggattcatccagtgaagaggagagaagaagcgaagaggttaagaaactcgacatcacaacttgaaacattgcggcttcatgctcttttttaaatcaccaaacagagcacttataccttttaatatgccataaaaaatgcttcaacaaccaatacatttcttatactatcagcttccattttaatgttactcgaacgtaataaagaggatcagataagtgagttggttcctgagcggtaattgggacggagttcacctgtcaaaagcagtgatctacgcatcaaaactttctgaaatggatcaatatagacgcggaagacacacaagggtataagaaagaaaaggcaatgcttttgagcatagataatattaaaaatcatggacacagccaagaagagtaagtagtcgagttgttcaattgactttgaatacagtatacagtagccataataccttgcagatttccatattcactcaacaagccggatggtccagattacaacaagtggatttatttacagtacgagaataagagacctcattggaaacaaacaaacagctctacatgtagcaaacccatgatttgcctgtttttctcagagcaggatctaaactatctaattctataatgtcaaagctttcttggggttgatccttgtatttcaatgagaaatcccagcaatacagcctctcttcatagtgtttctgtccgcgcacctcaatggatgcaaacacctttgaatagtcaggcgttagtcgcacgtctgtgattgtgtaatgttggtaaggcttctctagtgtaggcagtagtctgtaagcgatttttccactctgcagatcccagacgttgatacaagcacttgtggatggcatcagttgctcttcctctgtatcgctgcctcctgttttgttgattgattgatagtactggtagagctgataaggcgtcatttgagcaacgggcggcgcagggctgtctgtttcctctatactatcgctcaatttcttgacgtagccggctgacttcttcttttgtctacgttgctgtacaatgttgtttgtgggcggcaccagcttggttgtgctgctatcgttggctacctttccttttgtgagaagaaagaatggtgtgaggcagaggcgggtgaatgcagtgatgtcttcagcagcccattccgacgtctgcactgtttcttcagggacacgcaactcgtagacaagcgagccagtcaaaagcgaaaagaccagaatagggccagacgcatctggagcgcaggcaacgagatgtccattggcggcaatctcgccaacgccttgataccaatcgcttcttcctgataaataggacgagatatcaatcatgcctcgtcgtgtgggtcgatggtgatttgtccacccagtattgctgtttgaactgttgttcttatccaaatcccaaacacgaatcatgctgtctgaaccaccgctgacgacaactaaacaacagacgcatgcagttagttggtattaccatgaccctcgtttgcaagccaagcctaccatcgtcgttcatactgatacacaaaactcgtccccgatgtccctgccacattctgaccagcgtctttgtttccaggttccatactgccactgtgccgttgagaccgcctgtcactagccatttggaattgggttgcgtataatggcagacgatcgagtgagatcttgcagcctcgggccagccaggtatctcgctggttgcagctgtattgtccagaaagaaccgttgctttgtctgtggggattgaattatcaagctttgcgagcctgatggaccatggtaatttggatttgatctcacaatgcggccatcgtttgcaatcgtcaagctggtgaacatgccctgttcttgcggagcgcctataacagtactgggcagcgtgtccattgaggtggaatcgcacacattgggatagaaccccttcacacagcggccgttataccaatttcgtgtgattctgtacatgtcctgccaacttcgctgatttctgtgagccttgggtgagggaaactggagcgaccaccagcgtcgagcactggctctctcaaagtctcgatggcaggcattgggccaaataagctcatcgtaatgagcaatgacttgagcccattgtcggcacacttggctgcaagatgttagtgtcgcaccgtcgagataggcaaagatggctagcaaaagttccgctggaaagggtccattttcacggtgctgttgctggtttgcagtgctggtttccatggtcttgaactagtatataagatggagaaaaagcctcgagaaaggactttttcctgtttaaatgaaggcgacattggggctcacacacacacactatttgctctggcagtcccgctgttttcttttagtctcgactgtttgagaagtaattgaatagatctttctcaagcgagacttgaaacactcttttgaagcatccacagcgtcatggttggcatataaaatcagtcttttattgcttcttgtactttttctcggggcagcacacgctctttccacccgcggcgatcagctctctgcaacatttgtgcaatgcctccagttcttttgcgcatctggcctcttgataatcgtttttccccaggcagtcttggatggcacaggctaatgcattggtgttgttagaagcagcacatgagaagacgctctcgacatttaccgaatttctgacagtgaggaacctggtagccaagcaccgttagcaatatgctgacaacacattgtatggcttacctgttctgatgatgcagtgggcattgagtttgtttgtttaaaatgtagggggttggtcaaaagtaaaaacacttgtgggtaccgtgcggctggcaaatttcgtcccttttgagcaactaaaagggaggacttgtgaggcaacacaaaagttgttgggaggtagagatgaccgtagtccgaaagatagtcctcctcatgtaaattgagtcaagtttaagatgcaagtcttggatccgaagagttctaaattttgtctgttgacatcttcatccctttatttctcaaagcatggctagttgggacttggaaatgaatacagcccacagattaacacccgtagattcagaaacggggacggatcagaaaggagccatgttctggggccgccttctttggcaaagatgtattgagtggccagttcaagaaggttttcgcagctgtagcaaagctccagctgcaggatgtcaagtttgatgtaataaagcaatgcgaatgcttcaagtaggtcatccttccactttggccagacaattcaaacaccagcttgctcgagacaaagtcttgaaatgtgtcaaatggagaagaggcagcattgaggtggaattggagatggagaaaagctcttgaagccatgcccttccatataatagtcattcttgatcaccaccgcgaagtgtgtgatccggcggatgcttgccctattggcagaaagtcctgggtttgtcgaaagaagagcttgaccacctatgtaatgaagcatgtcaaggtacaaaaatctgcatttctcaaaataatattgtaactaaacccactcgtataatactgcacacaaaagacgtcagttttgcaatgatggaagctgaatttgttacacatttcgtcagttgactcagtaggcacataaactgcaaactttatacttaacatccgtatgaaaagtgttcataatagaacattagacccaagcttttgtgaagagaaaactaaagtttgagccaatgccattatggaaaactagctgtcgcacatttggtgatcatagtaaatagacaagaggaggcaatcctagcgcaaagccaaaaacggacatgtacactgtgtttgattgatgctgctgatggcccgtaaatctgtgctactcacgccaccgctcagcgccaaccgttttactcctgaacaagcgaaaagcgttgacccggcgtttgcatgtatggcctttaaatagcccacgcagcagcagatcggcggcatcaatctagggaggatgtctgctcaggacagacacagctaattgagcccgttcaaaatggcatggcctggctaaccgagctactatatatgatttaatataaaatccaattaaagagatcagagttacctagaccacggcagtagcacaagaaccgtgcaatgggtcaacttggattagtgtatattggacacctttctttttttgggtgtccgaatgtaaattgaaacatggtcaataactactcacagcaattgaacgccctttatttggtttctttttctcttattgcacttgttcttcttccctcacgaaaatttttcctgttcctgaagcatcaatacctcttgaatcatgcctgggcaagagatagtttatacggtccacaaattcgaagcagagaatgtggatgaaatctcgatcaatgtcggcgagcaagtcattgttctcgagaaggacgaaggcttcaatgatggctggtggcaggtaaagtagcttttgtacattgccaatgcagagcaagtaaggggggctgcttctaaactatggatttgtcgctgttagggacgcaatgtgcgaggtgaaatcggccttttccccattacatacacagtaaagcatcctcctcctacagtcaccgcctcctcactcgcactagaaaacaagattgattcactggaaaacgctatatccaagatgaaagcacccacatcaacgagtgctccaccgcaatccaagaagacgatcagctccatgtcgtccatgtcatccatctcatcgaaaaacattcattcgaccgtaaatcagtcgctggagaacccgttgctaggcaacaaagtagaggaatggacgtctgaccaagtgtcaacatggctgatcagcgttggattcgataaacagctggcagacaacttcaaaggtatatatacaacggagctcgccctcatgtcagctgtattaaattggagatgcttattttgtccatcatgtcttagatcaggaaatcactggcgacattctattggaattgactctggattctctgaaagaattggatgttactacattcggcaaacgattcaaaatccacaatgccatcaatgctcttcggcagggaaccagaaagcaaaaggtaggtgcacagagtccagttgatgcggttttctgcgaattaattttatatagcaacacacatctccagctgacaattctgtggcaagcaaaaacacagaagcacgggttgcttctccatttccagacttgggcaatcatcgtagtaacaataatgcgctttcgtcatattacaacaacaacaaacaacagcagccgtatcctgacgatgacttggtatcagactacagcactgtccttcgaaactctcaattagcaccgccaaagacagctgctccaaagagctctatgcctccacctcgcccatcgattcccttggacatggatttaattgcgtcctcgcccaggttgtcaagccttgttgagcgtcaaaatacagagcacttgaaaaacagtagtcagatggatcgacaggagcaacaattgcaattgcagatccaacagaatcaatcgcgtctactgcagcaacagcagcagcaaagaattcaatatcttcagcagcagcagcagcagcagcaacaacagagacccatttcacatcaagtcatctcaacgcctacgcacaataatcaagtatcggcagactggaaacgtagcacaatgaacaatatcaagacacaggaggtatgggaagttatcgtgctcgtcgatattgattgctgacacgtgctgttcgcttcattgtagtctttaccagaaggccgatcgtccacgtcgagtcgatatagcttcatgcgttcgtcattgatgccatccggcaacaacaagctgcaaaacatattgcccaccaatgcgccgagtgtgcgtagatcagaggatgtgtcctcgttatcggaagcaactgctgcaccagatatggaaggctggttatacaagcaaggcgacaaatacaagacttggaacaagaggtggtttgtgctcaaagcgaataatctgttctatttcaagagcccaaaggtatgtggcctcacccgtcagtgcgagtgatatgcgtattaaacagtgagattggcgcaggctgtgcgaatgaaaggcatcatcaatttgaagggatacagaatcgaagtggatgagtccattcatccgggaaagtactgcttcatggcgcatcacgagagggagagaaccttctacttttacaccgagtccgaaaagcccatgaaagactggctcaaagcactgatgaaggcaacgattgctagagactttgccagtaaagtagtgcctggattgcaacatgatgcctgtactaatgattattacttgtagcgcctgtcatgtcgtccagcacaattcctaccatttcattggaaatggcccgtcgaatgcgtccccgccctccctccaccatcttcctctctcaaaacgaccccatgcgcgcaagctctcctgcgccgtaccgcaacaatatgaaccagcacttttcgctcatgtcactagacgaacgcgctcagcctattatgcagttttctcaccaacaagacatgtctgtcaacggcggctctcgtgcgccctccgtcatgagtacacggcccatggaccagcaaaaacgcatgctaccagacaacgcatccgattactccatagatcagcgcagccgactaaaagactcgggattcaatagcacacacgggggaaccggactaacacgatctgccacggagagtagccgcagttcatccggccgccaaagcatatccatggcgtccgtgcagcagcaatccgtcaacgacacaccagccactgtgaatggcactgcattttatctcgacgaagaagacgaagatttgattgatccagagcacatgagcgtcattgagtccaaccgtccaaccgctacaacggctgcttacagagacaacacggatcgcttctcacaagtaactgctgtgctcgatacaaggcctacaaagcaagatgcgtatgttgactggatcaatgcccacattcagggcaacatcaagagcttgacagatttgagctcaggcgacgttctgttggagtttctggaggtcttgaccagcaaggaaatactgagacctatcgtgatgcctggccaaacattgaacgctcagcgcatggaccgtgtgattgcagcattcaagtttatgagcctcgaaggtgttgatatggacggttcttgtaccattcgaggtagtgttgttgagaacgcggtatcaatgtttaatttattcacactactactatgatagatgtcttgaatggcaacgagatcaaaatcatgcacatgctggacgctgtggactactggtccaaatcacaaacgagcgaagccaatggcaaaaagatggccagcggtggcacttttggcgaggatgaccagtgcaaactaagagagttggaggaagagtctgaaaacatccttccacccaactcatttgcctctcgataaaccacacgctcccctcccttctatacataataacgccctttatacatatatctatacttatctctatcttgctattctattatacactatacacaa

SEQ ID NO: 157 - DNA, 21050 bp, unidentified
  misc_feature 1..21050: note = Fanzor polypeptide
  source 1..21050: mol_type = other DNA
tcgatcacaaatattgggagttccagccctaagcgcagattcttacatggtccattgcgaaacatggatttgaagcggaatggtgattcctcggtggctgagacatcagggtagcgagtcgttccggatgctctaaattctgagtagaaattttaaaaaatccaccgggaggaaggaacgcccattaagttcaacataaagaaaaatgaatgttgtttaccaacaggtacttttttttcattagttaacttggatggaatacccactcgccgatatcgaatcaacccgtcgtgtagcgacaaaaaatagagttggtggcggtcgatgttcggtgcaatgcgctaactgtggccgcactgggcatgtctataagttttgtaagcatcccgtgagttcatttggaatcatttgcttcagggttcacaacagacgactcgaatacctgatggtgcaacgaaagtactccctctgctttgttgagttcgttcgaggcaactacatgctccaaaaccgcacatacatcctcaaattagtgtctaacatgacggacgaggagcgggacatgttgttggatggtccgttcacgcatatctggaacactttctggcacacagaatccgatgacgtgatcgcgtcgtgctttgtaagggaattcaacaagtcatcgtacctgtacggacagcttagcaaaggctactggttgcgcacaggcgaacctccagaaactaaactaaggttttttaacctagagtcagcgattcttgacacacacgccgcttacatcgaacctgaatgggggtttccgaagggacgtcggaacatcaacgagagtgacatcgagtgcgctaaacgagagttcatggaggagacagcgatggacacctctgacattctctttctccataatatcaagccggttgaggaaacattcttcggcatgaaccgtgtcaattaccgccacatttactacgtggcgtccatacctgtacatggaggaggatgcgtatactccgatgcaacaacacagtacaagcagtccgaatcatcttcaaaaatatgtgcacccgattcgatcaaatcttcttgtaaagatgattccttcgccaccagaaaatggtggtatgggtgtgaacacgagattcggcgagtggaatggtttaacgaaaatgacgtgcgtcgacgcatacgacaagagaacaccacccgccttcgcatgttcaatatgttgcatcaacgcatcgcccgcatggtcatgtcgaacattgatttcgttaggaatgtttgatttcgctgcaatctctaagctcttctaggtgacacacatattggttctcgatgtttgggctgattgtcagaagccatagtgtcaatatggcaaacaagattgttccgaataacctgattatcaaaggcattggtgctagagggaccaagcaagccgatgtatcgaatgcctcatagaacatgctcttgtccagctccccgcttttgatgagcataatgactgaacccaggcgtttgacgttttctatcgatgccatgggatccagcttcaccgtcacgtatattgccacaatcacgaacacaagcattatcattaggtacatgacaatctccggcatggacgagaaccgcgagtctgtattgagatagttgcaacgtttgtggttcgtctgtgcctcgtaaaaatatttgattgcgagtttcgcatcttgcatagacgtgtcacccgcagttgtttcctccgggctgcctgtgctagtaccttcaacgttaattcgtctaatgttaaccaaatactctatggttcgggttgttgcgtttatgagatcgaagctgttaacgtcaacgacgtgagactgacggtccaatatcgctaggcttttcttgaacataacttctgtgattcccacaaccgtgatcgctaaacatgtcagaaataccgtgaacaacaccgtatcccagaacggctgcgctaggttcgttatgaacgagtctatgatgaccatgaagctcgaaagcaggatgaacaagacgattgggacgatgtgccctaggatcgctacgcgtgtgagcttatctttagcagggatgtaacgcggaaagatatttttttggtcgcgcattttttcgataatcggaacgacgttcctaagaaacgcgatccactttgtatctgtcatgtcttgaaccttcctacgcaacccgtagtcggagatgagcgacaccaacggcgattttttcattgccaatattttggtatctgcgacccttagtgtgtcgagcataatccgtcttaggtgcctatcgaagtcctccaacgagtacgccttaattaactgcccctcaatgaccttccggaactctagcaagtcaaacgcaaacccgtacttgtgcatgacgtcggagatatcactggcgatgtagtctcgctggtcgagcaataaaaacgcgcacgagcgcgcgttcttcgccatctgttcaaacaacgtgctgacgtccacgcggaggtagaattctttcacgtcatctccgactcgttccccgccagtcagagggaactgcatgaaaaacgaaagcacggatatttcgttggaagactttaacgctttgttttcgaagaccgcgtcgcattctaaggcgtttctgtattgttgaaacacatccctcttgatattggaaatgacgacattgctctttatctcgaaccccatatttgtcaagttagcagtagtgggtacatatcctccaatgaacagccgttctatcgtgttcttaggaggtttcctcatcgccacaaatatggagccgatttcatttttgttttgttccgtgatgaagcactcttcgatagccgcatacgacttgattttaaacaagtacccctcaggcgattgagggcgtgagcaagcgaaaacggcgacaatacaattatcttctgcagccgctgcgaacattctccacgccgcagctttggtttcgcatctcaccggagggctaatgagccactgttttaacggttgctctagaaaagcgccttgttgtagatcctttggtataaattcgtcgcgtaatcgcatatggatgaattccaacactttggggatgaacaatttcccgatttcttctcgaacgatacctgggaccgtagattttgtgacttggttgtcggcaggttgtttctcgaagaagctccgcaatgcggagaatttggagtgtatctctgtccatacggtgagccgatcgaaacgatcgtaagtgtttttgatttgttgcaacgcaacgagcaccccctctttgtctgcagaacacgatttttccacgagagttacaatgggcggagctgttccctgtttttcttggttgcatgcaagagcaagcgtcttcgttgttgagatttcagtgcgtgggaatacttcatccagaacattgtcaatatcttgtcctgtgattttgcttgcggcgagctttatcaatggattgtcgcttagttctgtgcgatagaaactaagaagggtgtgcgtcggttcgttcacctcgaattcgtattgtcgtactcgttctcccatggtgatcatgactacctttgtgagcaaagatgtcacggctaccaggagaaggatgtggaaaatcttttccagtattccgatgatgtttatagagttgtcgatacctttgcacaagagaaatgatagaatgatcgtcactgaaagaagaacgattgagatcatacccatagtggattgaatatccgatttttgcgcattgacgtaagactctgcttttttcacctcctttcccaatcacaactggggggcgatattgttcaaaagccgtacccaacgcgactttgtgagctcgtcgtccgggttgttaagtgtttcgtaccttagagaataaaggtccaaatctcgaagatcctcgtttagctgcctatgaatctcgcgtaaaatagccataggacgcgcaaacaaacccatttctaccttttatttctcgttacaattttaaaaattgtacattcgcacgtttgagaaccacaactacagtcggcggaacgaaagtgtttacgaacatcagtcgttgaaattctttttaactcaaattaaatgtacgacatcgctgacttgtaaatccacatgttcaaatattggtgggtttagggtgggatatgtgaagaagacggacgtcgcttgggttcaaaagtcacaggtaaggagtcctgtgtctctaaaatgtacatcttgaacgcgctcgacatgcaaaattaaaatgttgtttcaagcagttcaatattgtccaaatcgcgacacccgcaactaatgggtggacaaaacggtgtcaaaccaaaaagactcgaaaagtttaaaaatatgttccgtaagaaaaaagggaagaaaggtgatgaaaaaggggagaaaggtgatgaaaaagggaagaaaagtgatgaaaaaggggagaaaggtgatgaaaaggggagaaaggtgatgaaaaagggaagaaaagtgatgaaaaaggggagaaaggtgatgaaaaaggggagaaaggtgatgaaaaaatgaagaatgggatgagtttaggaggattaggaggaatgtttggtggcgatggtggcggtggcgataatggtagtggcggtattgatgaacgttacgacaacgcttctagtcgcgtaagtgttgttgctgcttcattgaaaaaccttgtttcgaaggggctgagcagctccgttttgaaatggttgtgtgaatgtctgaaatctttcgtggtcattgttgtcgtattgttggtggtatacttgatttattacatgtcgactaaaagtcatttacgtatgtttcagttataccgatccgtcaactttgaagattttagtttcaagtatagcaccgatgttttgacatctatagagaatatccaaacgcagctatcggatcccgatgttgcgggtgctctcatcgtgaacgcatcgaaactgtctagttctattttcagtttaatggggtcaaggagtatagatgaggttcggagtgatctgaacacttgctttagatttgagaattccctccgtaagctaactttggccggaaaagctgatatattgtacaacaccgatagattcaccaccgacgggcttgtggacaagagtcttgtggatgagtttttaaagaatgtaggggaccctgttgatgctatattcgatgcgtccaagagtttctctgaacacttcgaggaaaatatgcgcacacacgaagacccttccaccgtcaaaaagacgtacttgttccgatcgcacgtccacaacctaaaactacaagggtcatacttacctcaattgaagagcatcgcgagcatgcgctccaaggggtctggtttggcagtacagtggtttgtacgttacggcaatttgatcaaggattggtggtcggtaaacgtccctaactcattcaaagagttccccacgcgtttaatgaatacgctcaaactaatgctagagaagtggcaatcacttggccagagtcttgctaaaattccttgcaatgtttcctacctggatgatgcagaacgaaagaaaaactgcgaaggatttcagggttccaaagcgaaggatgatggtgacggtaacttgaatgctggtgatgatgatgatgaggaggaggagatcagggaagggttcatcggtttcctaaatcgatcgcagactttttcacttctttggtggacgtagccaaagcgatcgcatcgttgtttgtcaacttcccaaaggaccctgtaggaactatcataggttttttttgcattataatcggtgtcgccgtaggaatcatcctcatcatctcgtacgctataatcacgtcattgggattggcatatgtatttgcattcatgatcgcctggggttgggcccttgtcgtccctgtttttacggtactattttacctactgctgagcatcatatttcttgtcccattccttgtattgttcataattgacctgatgctccagggcgctttgataaggttattcgcgtgcgaaaaaccttccatccgagtgggttgacaatgcgaactacatgtacgacaactactacacgcgatcgatcgcgtacattggattggtcatgacaccgtgtacgcgccgattccggcccgttggcgtattttgcgaacggatgagacctgacatgcccgactactgcccacaccaactaatatacaagatgttttcgggcaacaaacctactgtgtttggacctaccgtgttcgacaggttccggtcatcggatccctacaatgtgcaccaccccgcgacgaagcggaagttcgtttgcgatagctggaagaccaaagtcatgtggaacaaaaaatgtacggacgttttctcggactacaacaacattgtgaaacacgtgtgcttggatccgtcgcagacggcgaccacacctggcgaagaagacacgttgcgatcgctttgtaaggacgccttctgctctactagggatcttgtcaactcaacatctaacaaatcattttgctccgagatcaagtacccatcgaataaggatgacgaatataagatgaatttctcgtccggaacagccgagatattcaagcaaacgtgcagcgtcatgatgttcacgattttagttgtcatcgttatgatgtcgtttttcactatatcgctcgtcatcggggcccaggcaaagagaggggtgaggaaccaatcgtgaattacccggttttaacaaccatctttgcatgcaaaaggataatcaggatgatcaatgggtatgcaatgcggatcagaacatcttgccaccacttaaaattccgcgacatctttacccgatctgaagcgaccttcaagtaaaaaccagcagtgtggtgcaatgaaaccgcgaacagtatggccagagacaaaatgatgagctttccaacactgctacgccgatcccaaaacatcgcaaggtatcccgaagaattaccagcaccaccatgttcagattggtacgttcgctgctccatttcagcgaattgctcctccaacttgcccaactttgataccgcatccgacctctgatgaggagcctgatgaatatgttgttggtggattccttgaacttggatctgattttgcataattcgttgttgttcatagacatgctgcttctgctgctgttgcaactgtgtttgttgttgttgttgttgttgttgttgttgctccaaatgttgttgttgctccaaatgttgttgttgttgcacgttaagatgcacttcgttctctagttgtttggtcagtttcttggcgtcgtgtttctcaataacggtttggtactcttgtttctgttgctctttctgttgtagttgtggtggctctacagttcccaacttttgtgaatattgttgttcctcgacggattgcggatcatatatatttcgtaaaggttacctgtgtctggacttgaaccgctggtaagttccatcatttttttgtggggatattgatgatactgtctgtgggacagtgaagtgaaacatattatcatatggaaataaatgtgcatcgccgttagaaaaatggttgccgactttgatgtattgaaaacttccactcaaccaagtctttgggattgagcgacctctcgcgtttcgccgagttgtgtcccactttatttgagaacaactgtagtatcgtagtggctgttttgaaggtgcttgtacaacgccatgtactctctgaggaagcctgatgatatgtctagtatggcctccccttccacgtatgcggcgtaagccttttcataaagcacacgcgcctcctcgtgtttgccaagacttccgagacaccgcgcgtgcatcgcccagacgtcggggtgcgccgcgaactgggcaccgttcgggctactagataaagacaagacaaactcgttgattgcggcatttagagcttccggtttgccttctgagtttttgcgtgcgtcgaatagcttgcagaatggctggttccatatcagcaggttgttggactgaatggtggacaccgcggccccaatctttgacccgtccacgaatacgttgtgcgaggagacgtacatgcgtagccccagggtgttggcgacgtagtgcaagtgtatgggcgtggggaggcggaccggaagcatagcccttgccattgcctccgcggcctttggtgtcactaggtaagcgtcgcatgcgggaggggtgctgaagagcgtgtccagtgctgggaagctgaggtccttcgttgggggggatgggaggctgatgaacacgacatcggcgtccgcacgcgcctcctgtgtaataggcaaaggttctgggtgaatagcgtgtcatcttccacgacaagcgagaacctcaggttctgtgtgttgtgatgtcgttgtgcgcctatgcgtgtgagtgcggctctgtgttttagagcattagagatccgtcgcaggttgattgcagggggcgtgaacgacctgaacttttcggggatattgttcgagttgatgtccacgtattggtccttgcatgtcagtagaatgcgtttgagttgctctgtcgggtcatggtcgtctatcatctcgatggtgttgttcatgcttaggggccctagcgcggtggacaggagttgcgcggacgatgcgcgtgttttgcgcaacagactgggggcgtgcactaacatcacgctttgtagaatgggaccttctcccggggacgaagccctaccttgttgtgtttcctcgcgctgcatgatgttttcttttctggataagaacaaaaaatgtgaatggagaccaccgcgcatgtgctgctataatttacttagctcttacacgccactccttcaaaaaggatctcgattcaataacaacgaattttgacgactgtaaggagtccgctgccaaagctattgagctttctcgtctaaaagacattcaaaatgacattattaagaatgagtccgctgccaaagctcttgatagtaaaaaatcccaggaccctgttttggctctgaaaacaaattcatacagttgttctcaaataattttgggacactcagtataatttgaatgatatcccctgaaaccaggtacaggtccgtggttcactacaaatattttttgaggagtctcaggaaggtttgtaatatatacaacgtgtccaagagctcactacatagatgggtcaatgctgatcaggtgggtaaaagtaagcgtttaaaacgaaaaaggaaagaattgtccatgcttttacgttccacgatatccaataatattgcagagaaccccttcataacatgcaaggatttggtcggtataatttgcaagagttgtaatgtgagattatcgatcagtacggcatcgagacacataaaacaatgtggattttctaggaagaaggcgtttcccacagttctctacggacattcaaaagaaaatgtagaaatgttttgtgacaagtacagagaaagctctaacgttgtttgtatcaacgaagcaggattttacgctggcgaacacagcaaatatggatacagcaagatcggttctagattaactacgaagacaatgagtaacctccgtcgtgtgaagttcactttattactcgctatttcatctcagggaataatagattatcagttattggagcacaattgtaaaaaagaagatttcattaaattctttaaaactttggtcatcccaaagaacaccacgatcgtcatggataatattcggtttcaccattcttcagaaataaaggatacatccgaatgcaaagggtggaagcttttgtacacccctccttattgccccagagctaatgcgattgaacaaatatttggaagcatgaagagagactacagggcatcatgtccattgacgtcaacctgtaatatcgattacttaatgcaaatatgttgtgttctagaaatgtggaggcttaaagacttgtcaaaatatatgattaatacgagagattgggttaggaatgttcgagagagcctgtctgcagatccagattacatcaaaacgttttcggggtacaatttgtgatggagaatggtatcggcaagtcatcatcgttggtacatgaggctgaccaacatgatgacgttgcagaacttgtcgattatgaaggggaggaagacgaggagtgtgcacctgggcgagcgatttgtgtggtcaagatgaaattgagtacctttattccccatgattggcttcgtaaaaagatagacacactggtactggacatgaacaagttgcttggagaggtttatattttcgcaaatttccacattgctcgtctttttgagaatggtatcgctgtccctcctgtaaatcgcaacttcttctaccggtgccttattgcagtcagtaccaacaaatgtaaggggtcgactcttggcgaagacttcgagagtagtcggcttctgtttgacttgttaagagagccggggcaatccaaagttgacattcgggggaacatgaagaaccagatcattgcagacctgtctattctcatggccacaatggcctctaaccatctttggaccaaccttgagcgacgcataacgacttacttgaagtggaagtacccacagattgcaaagcgcctgcggtctgacatcgtggctgcagtgatcaagtgccctacaaagaatctcgacgtcatcttcaagatgagccctcatacaaccaagctgccaaccaagctgccaacagctagacttcgatcggcaaaaagtgcagttgctcttgcgaagaagagggtcggtaggaaggaaccagaaggatcccctttgcgtattaggttgactaaacttcaagagaggcttgaaaagttgagcgaagcttggctctcctcgaagaaccttagggtggacgcagataacgcgaaacgcttctttgcacgcgacgtggcattctgtctcaggggggttctacctttaccatccggaaacacttttgggtctcgggctcacatgaagaattgggtctcgggctcacatgaagaattgggtctcgggctcacatgaagaattcaacctcagagccgctggccaatatggatttagaagtggtaggggtactgcagatgcatcattcattcttaaccatattgtagataaatatagagaaaagaaaaaaccactctttgtggcttttgttgatttcaagaaggcttatgattgggtcaacagagacttgctatgggattgcttagcaaggctaggagtcaaggacccctatctcattattctgaagtccatgtataatcatgttgttttccaagttcgcctacatggggacattggatcctcctttccatcccttgtaggagttaaacaaggagaccccctatccccactcctattcggtctgttcattgatagaattgaatcgttcctccaatccaagctcccaaatgtaggggctgagcttaggggaaagattctgcaactgttactttatgctgatgacctatctataatggcagaatccccggcagatatgcaagcgatgcttgactgcctgagagatttctgcgaggctactaagatggctgtgaatataaagaaaactgagattgtcgttttcaacaaacaattctgtgatgaggcccgcatggatcctgattacagatttgtctatgatggagcacaactttctacaaagttatcttttatctacttgggatccctctttgtggatggtgactcaagcaatcgtgcaaaagctgctttttctaggatgctcactaaggcccaaaaggcacaccacatgcttcgtaggcgatgccatactatggagatatacaatattgatattctcacccacctgtttgatctcttgtacaacctatcctgaattttggctgtgaggtgtgggctccttctattctgaacaacacacttatctcaaatgaccatgcttgtgagaaatggcatagagatatacttaaacaaatgttgggtgtttgccaatctactacatctaatattatcatggaagagctgggtagaaccccgttgtgttttgcttggcttaaacaagctttgcgcttctggaacaagaccatacataaagaacctgaggatctcattagaatggctcttgaggaatcttttgactccaacactggctgggttcatgacttgcgttgtgctctccacaagctaggatccagtaaaaacatcaacattttggaggctgtcgatgtcgaaggtattgtgtctgaagttttttagtcatggaggtttaagtacccaagtgacatcaatgcagttagagacatccctgatgagagaagggttggctttaaacgcctccgataccaaaaatggttcgcagccaacagcaatgatgagaatggcttgattccctttacatccgccttacataagcaggatcagattcgttctatagcacagtttagaatgggttcccattggctgaacacagaaagaatgagggtggtggatagagcacacatccctcgctcaatgagacactgtcaaatgtgtgggttccaaaaaactgaggatgaaatgcatatgtttgagtgccctttttataatgatattcgcctccgctaccagaatctgtttacagatatttataggcatgtccatgaggataccgacttaaccgtatggaatgtggaattctgcgattccacattcagaacctttatgaatggaaatggcactaagtctttttggagcaacctagccgactatctttctacttgtagaagagcaagacaggaagccctggactgcttagtggcaccgtaatttattatcccttttttttcttcttgagacttctcatttgttagcttcttacctccgccactgtaagtggttgagatctgggtcctgctctaaggggtttaatacctacgccaccaaaacggtggttgggagtttggtttgtttgtcctcgacacacccctgatgtaatgggtttttttgctttgtgggtgctttttctttttgtttaaagcacagagtctcatacaccctcgcggtgtcaagtagactttaacatgtaatgtaatgtaatgtaatgtaatgtaatgtaatgaccctgcctctgtaccacaagatattgtcggagaccatcgaagaaaaacgaaaaacgaaaaacgaaaaacatcgcacattctcgttgttgccttacaaatctggattcactctgtcgcacattccgatttcgaaaatggcatttttctatatggtcaacgagtgccacttcgattcatgcaaggcagacgttgcttccaaaaaccatcaaggaatatgggagcgcttcgcaaacctcaagaaagtggagacagtttctcggaagttcggttaccgcattgtgacagacggctttgcagtcagcatcttgatgaataagcctacgtgtctgacatgttcgatgcctgcagacgcgttctctacgcgggcgcatgagtatgtgacaacagacgagggtggcattgtatccttccttgacaatgtggtcgtggctgcggtagacccgggtgttactgatatcgtgactgtaacaggactcaacggaggtactagatcgtacagcttggcgcaatattatcgcaagggtctgatcttcaagtctcagcgtcaaactgacgtttggaacctcgagacggctgatatcgtcggtggtatcattccggatagagactcttcgagttctgaacagattggtgcgtacgccagattctacatgggtgccgccccaatccttcttgcccatcgtgcttccagggggtaccgaaacctccgctttcgcaggtactgcaagaaacagaaactcattgttgagattgctgacttcgtagctccgagagagaagagcgctaaggtactcgtcgggtttggtgattggaaaggtctgggggcgacgccaatctctaggcggacttgtggccctctccaagctattcgtttcgagcttcgtagccgagaaaacgtcatcatggaggacatcgatgagttcagaacatctcaacgatgcagctgctgtgagaaccatctttgcaacatggtggcactcactcatcgtaagaagcaagacggtacaggttgggaatgtacagaaggacgcaagcggattcataagattctccactgcaaaagcagtcaaagcggagcgccacgccaacagagcggtggtatgcttcactgcgggaagacttgggaccgcgatgtgaacgcttccaggaaatacctaatgcttacacttcaccaagtctttgggagagagcgtcctctcgcgtttcgccgagacgcgccgagaagatcctcgacaaccccacccccaccccttgatactgatatggggacacagacggttgaacggtttaccaaagaggctactcggaatatcttcgagaacctcttcaacctgctgcaccccccaacgttgcccaaaagcaacgatctgcagtctggatgattataaggtgtcccactttatttgagaacaactgtatggtcgtatagtcggagacgcaatttgtgggacgccctaccggtgacccttgaacccaatgggtagatgtattgacaagatcggttacaaatattgaattggtcaacttgtcagaatccccaaaatataatgtgtcccaatatcaaatgtccctagctgtatgatattcatattcattttttttgtgttgatgtacattgtggcaatcgctgctataatttacttagctcttacacgccactccttcaaaaaggatctcgattcaataacaacgaattttgacgactgtaaggagtccgctgccaaagctattgagctttctcgtctaaaagacattcaaaatgacattattaagaaggagtccgctgccaaagctcttgatagtaaaaaatcccaggaccctgttttgggtctgaaaacaaattcatatggtcggatgggtatttcatacaagatgaatagtagtgtaacacataaaataatgatcaatgctcaggacataatcgatttggtgcagaaggatgggtgccaatcctccatgaaagagataatgggggcgattacaaatataggggaaattctcggtgaaaaaccacttccttgtggtctggtgacctctgtgtccgtacaggaaattaatagtttgcaaggacagtttccagcttcaatattgaacaaggttcatgatctggtcaaaattatcattgacggatcgtgcggaaaagatggcatggtcgacgctgacatgatgatgaccattgtgaagaacgtagttgcatcaatatgtgaagtctctgatgcaaatgtaaaatgtccaaatgacattgtcggtatttcttacacaacgaataacgagctcacccgaagaatattgatcagtgcaaatggaattgctgatgcgatgacgaaggaggggtgccgaacctccatgaatgagattatgtcattgattaaacattcaggggagatacttggcgaagtaccactcacttgtgttctgtcgaagtccattttcggacaagaaattgttaaggctttgggtggacaggttgaggttgcagtaatcgagaagattcaaaatatggtcgacactatcattgacggatcatgcgggaaagatggaatggtcaacgttgacactgtgatgaacattatgaagaacgtagtttcatctctgtgttaaaagtcaacggaacaatacaataaaacatatatcagatgacatcgacagaacacaatacagtcggagacgcaatttgtgggacaccctaccggtgacccttgaacccaatgggtagatcagctaaaggcgagtacatatttttgcccttcatctctgtatttcagcatttaagctggccaaaaggataacaaggcaagctgctgacaaacccaggtgggtcggtcggtttagcgctcacactcgcctcgatgaaaactgtggttttggggggaggcgagggaacacagaatgcctcaggtcgctctctcccgttcatccacgttgtcagaagtattctgtcgactgtaatctcttccgttaattcaatgaagtgaacggagaactctaactttttcttgtacatcttcaatgcgacgatcgcaattgcgtacgctggcattacagctacttcgcactcgatcaatgtctgcataatcgatgacgcagcacacttattgattcgtcttggcgtatttggtgaaattgcaaagcgtgaagcatggcgcctaagaaatatagggttcgcgttcattgcgtctcaccacctttcttaacaagttacaaattgtatttttatttacaccattaaatggcaggattagatcacgaaaacgaccatcatccaggcgatgatacctacggggatacaaagtccatgctccctagtctacttctagacggtaccaccacttcgtccgaatagactgtgcgatcatgcggggacgcaacttggtcactatcggacgtctccgagttgttgcgcgaccaggagcttttctctaattccagtgaccaagataaagaagatggtctctttagtggaatggcgaccccccacatttccatgcgcgcatgcggcgctcctatggctctcctgaaggaaatgatagctaccccttcgggagacgcaaccctcctagaagagcttctaagtaaaagcgaatcatcatcatcatcatcatcatcatcatcatcatcatcatcatcatcgtcgtcgtcaacatcatcatcatcatcatcatcatcatcatcatcatcatcatcatcatcatcatcatcatcatcatcatcatcatcatcatcatcatcatcatcatcatcatcatcatcgtcgtcgtcatcatcgtcgtcgtcatcatcatcatcatcatcatcatcatcatcatcatcatcatcatcatcatcatcatcatcatcatcatcatcatcatcatcatcatcatcatcatatcatcatcatcatcatcatcatcatcatcatcatcatcatcatcatcatcatcatcatcatcatcatcatcatcatcatcatcacatcatcatcatcatcatcatcatcatcatcatcatcatcatcatcatcatcatcatcatcatcatcatcatcatcatcatcatcatcatcatcatcatcatcatcagtcatccatcatcatcatcatcatcatcatcatcatcatcatcatcatcatcatcatcatcatcatcatcatcatcatcatcatcatcatcatcatcatcatcatcatcatcatcatcatcatcatcatcatcatcatcatcatcatcatcatcatcatcatcatcatcatcatcatcatcatcatcatcatcatcatcatcatacatcatcatcatcatcatcatcatcatcatcatcatcatcatcatcatcatcatcatcatcatcatcatcatcatcatcatcatcatcatcatcatcatcatcatcatcatcatcatcatcatcatcatcatcatcatcatcatcatcatcatcatatcatcatcatcatcatcatcatcatcatcatcatcatcatcatcatcatcatcatcatcatcatcatcatcatcatcatcatcatcatcatcatcatcatcatcatcatcatcatcatcatcatcatcatcatcatcatcatcatcatcatcatcatcatcatcatcatcatcatcatcatcatcatcatcatcatcatcatcatcatcatcatcatcatcatcatcatcatcatcatcatcatcatcatcatcatcatcatcatcatcatcatcatcatcatcatcatcatcatcatcatcatcatcatcatcatcatcatcatcatcatcatcatcatcatcatcatcatcatcatcatcatcatcatcatcatcatcatcatcatcatcatcatcatcatcatcatcatcatcatcatcatcatcatcatcatcatcatcatcatcatcatcatcatcatcatcatcatcatcatcatcatcatcatcatcatcatcatcatcatcatcatcatcatcatcatcatcatcatcatcatcatcatcatcatcatcatcatcatcatcatcatcatcatcatcatcatcatcatcatcatcatcatcatcatcatcatcatcatcatcatcatcatcatcatcatcatcatcatcatcatcatcatcatcatcatcatcatcatcatcatcatcatcatcatcatcatcatcatcatcatcatcatcatcatcatcatcatcatcatcatcatcatcatcatcatcatcatcatcatcatcatcatcatcatcatcatcatcatcatcatcatcatcatcatcatcatcatcatcatcatcatcatcatcatcatcatcatcatcatcatcatcatcatcagcatcatcatcatcatcatcatcatcatcatcatcatcatcatcatcatcatcacatcatcatcatcatcatcatatcatcatcatcatcatcatcatcatcatcatcatcatcatcatcatcatcatcatctcatcatcatcatcatcatcatcatcatcatcatcatcatcatcatcatcatcatcatcatcatcatcatcatcatcatcatcatcatcatcatcatcatcatcatcatcatcatcatcatcatcatcatcatcatcaatcatcatcatcatcatcatcatcatcatcatcatcatcatcatcatcatcatcatcatcatcatcatcatcatcatcatcatcatcatcatcatcatcatcatcatcatcatcatcatcatcatcatcatcatcatcatcatcatcatcatcatcatcatcatcatcatcatcatcatcatcatcatcatcatcatcatcatcatcatcatcatcatcatcatcatcacatcatcatcatcatcatcatcatcatcatcatcatcatcatcatcatcatcatcatcatcatcatcatcatcatcatcatcatcatcatcatcatcatcatcatcatcatcatcatcatcatcatccatcatcatcatcatcatcatcatcatcatcatcatcatcatcatcatcatcatcatcatcatcatcatcatcatcatcatcatcatcatcaatcatcatcatcatcatcatcatcatcatcatcatcatcatcatcatcatcagcatcatcatcatcatcatcatcatcatcatcatcatcatcagcatcatcatcatcatcatcatcatcatcatcatcatcatcatcatcatcatcatcatcatcatcatcatcatcatcatcatcatcatcatcatcatcatcatcatcatcatcatcatcatcatcatcatcatcatcatcatcatcatcatcatcatcatcatcatcatcatcagcatcatcatcatcatcatcatcatcatcatcatcatcatcatcatcatcatcatcatcatcatcatcatcatcatcatcatcatcatcatatgacctttgctgtatgtgatcgttccttacatcatgttgcgtttcaagttcaagatccgcatcggcctgaccgcatttttgaagatgatgtactcgatcgtctctgcccagctgcaaaaccttagtggtgctcggcaacacatatcgcagtacgtgtccatcggcgtctcgcttgtcttttacttccattgcgtgttctcaagcatgcaggtgtcgcaaatgcttcacggcgtgtgttcaggtgtggcgcagcgtgtttcagccatccgtctgttcgcccgaaataccctagaggcctgggagggcataggcgacgcgtcctcttgggcggaggccgctgcttgctggacgggaccccaattcgcttggtgcgatcctgatgtgcttccgtgcgaacgtgcgttggcgacaagtgtctcccagggacaacttataaaccggtacggaggcgacctcgagttcttccagcggtccgtcatcggtagccgcgaggccatctcgtgcgtgttgaggcgcgcgtacgtgatggacgcattggggaccgtcatgcgcatggtcgggtccctctctctcgcccccgtagaattcttgcattccccttctccatagctgaagatgaccggtctatggcaccccggtgtgaagggcgcggttcctaacgattggtcgttctcaccgtccgagcgaaacgctatcttgactggtcccaacgcgggaggcaagagcactctaatgaagatcacattgttatctgtgctaatggcacagacattatcgtttgtgccttgcaagagcatgcagcttcggcctttcggagcgctgtgcagccacatcaacgtccctgacagccacgtccgcggggagtccctcttccaggccgagatgaaccgcgccaagcggtgcgtgctctctattgaacaggccaggaaataggtctcacatgtctcgttgtgattgacgagatattcagcagcacaaatcctgtcgagggcatagcgggggctgtagctacggcctccaagatcggcgctttcgagaacgctatcaacatcgtcagcacgcactttacacacttggctaaattggcacgcggtcccgaaccttgctacagggcctttaagatgcccgtgaatgtagacaaacaaacaggagcgattacatccgagtacaagctgcatcgcggcgtttccacacagtacgtggctctggagatcatgagggcgtcagacatggacagcgacattgttcgcgaagctattcgagtgaaggaggaattgttgcaagcggcgtcgaggaaacagaagcccgagcctgagatttccacgacatctgaaaaaaaaactcctcatgatcctcaaactcctccatcgtctcccgtgtctcctcgtcattctctttcggacttgaccgtttcatcgccatgatgaatcaagtttccgggagggttcgtctcgaataatgaaacctcgtcaacttctgttccagagtacccagtgtcctcatcctccacattgaaccccgacgcccgacgtagattttcgtttacttggatgcacgcaat

SEQ ID NO: 158 - DNA, 20990 bp, unidentified
  source 1..20990: mol_type = other DNA
  misc_feature 1..20990: note = Fanzor polypeptide
cgacatcatcttgcaaataattcacatcatcactgctactagcgcccgcatcgacgacatcatcttgcaaatcattcacatccgacaatcctacctgatcagtcattacaacttattattattcattggaaacatatatacggctttcgaaacgcacacatttagcggggtgttgagataactttgttggacggaccatccactcatatttcaaatttatttgtgaaaaaaaattgacgagtttttaattcatttaagatgacaacaaccaactattgaaaaatattgaaaacacccatcatgtcttcttcaacttctacacagatcatcaatgaattcgtcaatgagacgggtatcattggtttcctccagattaacagaaagaagatcgtttcgaaggcaacagtctctgaactagagaatgtttgcaacaaattggtttctattgaaatcattccggattgcctcaccgactctgtcggtgcactgaaggtggcgtacgagaagttccttcaaactccccccagtggggggagaaaaggacctctacaagctatgcttctcccggttgccgtcgctacggctgctgccaaggatgctgctctcaatgcagcttctgacactgcagtcggtctcaaagaaactgctgaagtcgacctcccagaggactacgaaagcattgaagctttctctgcttacaaagcatatcttgacaaggcattcgttgccgaagtatctgcttacaaggaagatgtcaacaaggcatccgctgataaagaagctgctctcattgcacaaatcgatcaagtatctgctgtttaccaacaggtaatcgaagctgctacgcatcagtcgccttccccctccagtgggaccacctccacttattgtggagggtcctacactcatacacgcctagactccgacactatcgaggagttcgtcaataagacgaatatcttcggtgtagtgcagaagaaggacaagggtaagatcgcacaaggcgcaacagtcacaattcttcagactgtttgcaaggcagtcatttcattggaaaacgtgcctgagtgcatggccgactctgtcggcgcactcaaggtggcgtacgagaagttccttaaaactccctccaggggtaaaaaggaacctctccaatttatgattctccctgttgcaatcgctgcggcttctgccaccaccaaaatgtagtgcccaacgcgccgcatactttttttttggatcacgttcgtggatttcatgatgtaactcatatacaaactgtacaaagtcgactttcttgcaattgtgatcaaggatcttgtaatgaacgatacctttagcagaaccttcttctgcttctgacttcttctgcttcaagggtcaccggtagggcgtcccacaaattgcgtctccgactgtaaggcacacactccggtgtacactccagaaagcggtttcatttatatgttccgtcgagtgtagtcccatcaattccatgcagtgcatgcaaccttgcgattgtgagagcagaagagcgatctcgaattcggaagacagacttgtgacgcccaaccgtgctgccacggccttgttgtacatgaaccggttgcaccccgcaaactctgccagcatcgatttctgagccttggttgggttcagcttcatttttaaggtcctcaaattgggtttggcatttgactttgtagcgtcttcgacctctttgaaaattcttcccaaggtctcaacacggggaaaaaaataccattttacagtacacataaaacatgggaggaactcaaccaatcgaaattccctcgtccgccgacaagtggcggtactcgctgtacacagcaatcgtgttcatcgtcatctctctgccactgacataccatgccacctcattggtgtacaagggaatcaggaacgcatcgggtggaccaagctacattggcgtgttcctgcactcgatcgtgttcctgataattgtgcgtgcaatgatgggtgtaaaggggctctgatccccaaccaatgatatatcaattcacggccgtcacgccatgaatcgctctcccgaagactcggaaaatgagtcatcgtcatccgcttggaggaacgagatcaacggagcgtgcgacgtcatcagaggctcgcagacgcatatcctgcaaaaggcgaacgagatgctggatctgctccgaccactgaatcactatgcaggaggaggagacaacgactccgataccggtgaaaacgatagtaatagtgtaatagaccggtgctgcgaagcagcgcacggggctgtctttgacaagaaagcgtcggcgtccgaaaaacgcatggtgcaaaaactgctcgagttcctctactacgcacggcacaccacggaaagcctcagggccagtattaccagtcttcgaaacgtcgatagggtacaacaacgtgagagcgacaatgacgaattggtagacgatgaacaaacaaaaaggttgaacgaggacatcatgtccagcgtcgctcgcttctcaccacagagcatcgaaaacgccaacaaggtccagcaactgctcatgtacatcctgaatagcctacaccaaatgggataccgacgctacaacgggggggagtgctacgccgtgaggtacaccgatgacaacttgtgcacgtacgcgtggcgccgggtgtgcaccatcaaggagttcgtctaccagaatacgcagaaggaactcaatttcgacatgtggctcaacctgacaagcgtgaggaccaacatcaacgccgttgtggatcacctcacgtgttgcagggacgtgcagttccccgacctagtgcgcgaccgccatgtcttctcgttcaagggtggtgtgtactttgcccccactgatacttacgtgccctatgaaaaaatgagcgagcggggagatgacgtcgtggcggcgaagtacttcgacctcgactttccatgcgccgaggaagaaaccgaagaggattggcagccaccgacaccctacctacagagcattctcgatttccagaagatgagtcccgatgtcagctggtggatgtacgtcttcattggacggcttatctacgaggtgggtgaacttgatgagtggcaggtcctcccatacctgaagggagccgcgagcaccggcaagagcaccattctcacacgcgtgtgcagggagatctacgacgcacatgacgttggtgtgttatcgaacaacatcgagaagaagttcgggttgtccgcgcttgacgaaaaactcatcttcatcggaccggagatcaaatcggacatcgctctagaacaggcagaattccagagcgtggtgtctggagagactgtacaggtcgccgtgaagtactcgaccgcgcgcaccatccagtggaaggtgcccgggattctagctggcaatgaggttccaggttgggtggacaactccggtagcatcaatcggcgcatcgtgctcttcgaattcgaccactgtgtgaccagaggagacatgctcctggggcagaagctctctcgggagatggggtgcatcctaagacgcaccaacaggtcgtacctcaaggctgtccgattgtacgcgcgtgataacgtttggctccacttgccttcagaattccaccgcgccaaggatgagctcagtgagagcgtcaactcgatgatatccttcctccgtagcggcagactcacctttgaccccgagctgtacatgccgtacgtggacttcatggagacgtacaaggaatactgccgacagacgggacaccgcgccatcgccaaaggagacttcaagaaccacctgaaatcgatgtcgtgcgtgattattaacaagaccacgctcaggtaccccagaggcgcaaccgggacgtttgtcgccaacgccaagtttgtgatgggagtggacctctcggtctactgcgaaaacaacaacgacgtccaggatacaccatcgccacttgagtgaactacacaaaaagttcggtgtacgatatatgtatgaattgctaactctaaaaaaacataatggcaccatccttaacatcccatcaagacatcgcccttttgggattgaagatgtcgcagccagcagtagtagccctagtaggctacatagcactgatcatcattgtgttgctaccctttgatatgtacacctacaatgtaaatgagaagaagtacatcagagtcccctacaactttgcctacagactgctcatcgcccttctcctaatgcttccattcttcctaggcgtctattcgatcaactgcatgatacacggtcactgccacgcatggtcgtggatcgtggcgatcctgaccatcgtgtgggcattcaccatcgcgatagtgaccatctccaagggatccttcacgatcgaccaacttgtttgaacatcattcattatcgcgttcggtcagaagcataaaaaaaaaaaaaaatccagatacttgttgtgtagacaacaaataaacaaacatggatgttttttcaggaattgacctgctttccaactctaaactcgatcaaaccagtatgcatccccccccgccaatgcatatcagtctggtgcacaactcgaacacaaccgataccgcgtacaacgcacccagaccaccacaacagtatcagccaactatcgtatcccgtacatcgtccgtgtgctccatgtccgttcgagatatcggaggagatgcagacagtgtagacgaactgatcgacatgacacacacgaacactaatagtaagccagtcccgataaacacaggtggctttatgaaccacaatattcctagcatcatcggggggggtctcgctgataaaaacagcagcagtgacgacgattgtagcattatgtctgaatctgatgcgtcctcatctcgatcaaaagcttcgcgtattaggagccacgaccgaacacaaatgggtagagagcggggtcgtgcgaactctaatgatagcggaggaggaggctacaacaaacctacgagagaggatgagaccaaaaagaagcagctcatttaccgattggaccgtatggaacagaaaggcgcacaccttccccggcgctacaccatgaacgacccgctagagaatatcgaggcagagtacgagcgtctgaagcagaaccgcgacatagacgtgagcgttcgtttccagaggcgcatgctcgtggcctgtgtcaccggaatagaatttatgaacaacaagttcgaccctttcgacgttaagctgagcggatggtctgattcaatcaacgagaacctggacgactacgacgacgtgttcgaggagctctttttgaagtaccgtggcaaggccaagatggccccggagattaacctgatgatgatggtaggaggcagcgggctcatgttccacttgacaaactcgatgttccgctctagcaacatgcccgatcttggggatgtcatgaagcgcaaccctgacctcatgcgacagttcacaaaggcgacgctcgacaccatgaacaaccctaatgctagtcaagggagtcaccgacctcctcccccaccacgtacgggagggggaggtatcatgggagcgatcggatccatgttcggactaggaggggggggaggaggaggaggaggagacatccgaattaagccacatcatcctcccgcacctccccagaacttcatgcgcggacccaagaacgtggacgaaatcctgcgcgagctacagagcgatgtcttcgaaagcaagagtgatgttgctgtaaaaagcgacgatgtaagaagtaatgatcgagatagactcatcattccgcctacaacaaccacattctcattgtctcctgtgcatagcatggacattggctcaatggacgatcttgtcaaagaaacaatcaaggctcccgcatccaatgcaaagaacgcaacaaaaaccaagaccaaggcgactgggggaaagcgtgccgctgcaggcacacgcaccgcatcgaacaaaaaggccatcgacatttaatgcgaaaaattttcagggcaagtccatccagacccgcctccacctcctgatgacccccaagacaagtgaaccccggacctgtatctggtttcaggggatatcattcaaattatactaagtgtcccaaaattatttgagaacaaagttgtacagtctggatgattataaggtgtgtcccactttatttgagaactactgtaacaaaaggtggcacaacaaccatttataaattgtgtacataaaaatagatatgccatcttttcacgtattgtccgatcttcacctcaagcactttcccgggtttcgcctcgaccctgcgaaaatcgaggcgccgctcctggttctggccggagatgtgggcagtccgtctgacagcgagtacgtcgcattcctagagcactgctctcagctattcgaggaggtgttcgtcgtgatgggtaaccacgaggcgtacggcatgggcactctcgaagacggtattgccgccgtgacactgctgatcgaccgcgaccttcccccaacgtccactttcttaatcgttcagcgcacgatttgcaaatccaaaataccaataataccaaagtaaggattttgggaaccacgctgtggtctcaagtccccgatatggacgcaatacgcgtgcagtgctgcttgtccgactaccgcatgatttccggcttcacagtgcagaagaacaacgccgtccacatcgaagacgttcgctggctcgagggcgaaatctctcgcgcggaaaccgatggcgtcgatcttgtcgtcgtcactcaccacgcgccgagctttcaaggaaccagtcaccccaagacgagagggagcttgctgaacagcgccttcgcaacggacctgcaccatctcctcaagaggagccccggtgaagctgtgggtgcacggacacacgcactactcaaacgaccagaaaataggtcaatgcaaccttgtctccaaccaacgaggctatttgagcaatccggaagaaggacacagattcgatccttacaaggtgtttgaaacataaactacaacaatcagtccggaactcccgtggaggatgagccgaggatcctgaacagctccgattttcctccgggaggctggaacgcccattacatctgtacagatagattatattacattacattacattttggttcggtgaaatcatgtacttcttcaaacaaacaattgacgttaccaccaagaacacggtaataatcctataaatcgttaattcgctgatgtattcttttgcaacgatgtacgatccaatcccaattccaacgagagatgccaaagtgaccattatactaggccaatcgatgtgctcccggtaattgtacaccccgataatagattgaggaagcaactgcatcaccatggccactgctacggcggtttttatgttcacgcaagcgaaagttagaagggtgatcgttaggacacctgcaccaatgcctgtgatacccatcgctaaccctacaacaattccgatcagcgaatacaaaagatacattgtgatgtgatttggtatagttgttcagataatacatccggagacacaaattttgggagcccccccgatagttctcaaataaagtgggacacacccaagtcagcgaccattcttaacgccaattttctaacggcgatgtcgtacatccatatgatatatgtttcattttactgttccgccgactgtttgcggactagctacccccccaaagtattaggcatgtcttattttagctgcctaatacttggcaggaaagtgggccatatataattggcgaaaccaccaatcctcatgactctctgcattgcgcgaatcctccacatgcgcaaacagtccggtctctgcatcttcgagggtggattggagggctgcgagggactctgcgtctcgagtgcgttgttggatcttttcgaactccttctccagataattgagggaacggaaagaaatttgaggctgtcgagcacgccacgctttcattgcggcggcaacgatacactccgccttcagacaaaatacagtttcgcgcaggctttcaggcatgtcagggacctcgtcagggtcgtgtatctcggcccacagcttgatggcggccgatttggcagacacacacatcttatcaggatcgatgtagtcgtctttatcgtcttcatcatcatcttcatcccgggagtctatctctaggagggcgtctctccacttgttgtccagaataagcttgaactcggtgtggtcgaataaaaaccgcatctcgtgcatcgacttggcgatgtccaccaggtttcccacggccaggtcaatgaaggtgcagcacaaacgcgaatccgtacgaagattgcacccacgctctttcaaggcgcgctcgagagtgagcatgcggttgctcgccccaatgatggtcgcggtagccctcgcgacccctccacctctcccggaattcacgtaagcgtcacgggccatgctcgccgcaaaataaaattctgaaaacacgcgcgagtccacaatggacaactccgccaatgtactcgacaacaatacctcgcgcttcgatcatttgaagatagtggggatgtctcctgcttctcgagcgcaacacgagacacgtcgcggacactgtaaagaagcttgggtgtcgctgatttgtacacgagttcgcaacgcagcgtcgagaggtccctctcggttacgcgatactcagacttggccttcgacacacagatgcgagcgtagcgcatagccctcatttcggaacggaatttggcagacaagatgcacccgcgagggggtcgagagacatcttcagcctctttcaacctcctccacaatgctgctttgacaccggaaaccctcaggccacgatcgcgacacgccttcttgagaacattcaccttgcttgtctctgtaagaccctcatcggtaatacgcatcctctcgaacgctgcatcgttcacgaggagtccatcgggctccaacttctcttgcaaacgctaacgaactcgaacgctaagttgcccaccaacatgaggctcgcggcgtcctttgagacatcgcataagcgacggtacttagcatcgctctttgagatatgagacgcgatgatgtagagtgggccttcagggagcagttccatgttttgttaacatggaatcaaaacgtgttctatgtgtataacgtgttcaacgacactttatacaacaaattaagacttggacatgttgtgtgacatttttatcaaaatcatacagttgttctcaaataattttgggacactcagtataatttgaatgatatcccctgaaaccaggtacaggtccgtggttcactacaaatattttttgaggagtctcatgaaggtttgtaatatatacaacgtgtccaagagctcactacatagatgggtcaatgctgatcaggtgggtaaaagtaagcgtttaaaacgaaaaaggaaagaattgtccatgcttttacgttccacgatatccaataatattgcagagaaccccttcataacatgcaaggatttggtcggtataatttgcaagagttgtaatgtgagattatcgatcagtacggcatcgagacacataaaacaatgtggattttctaggaagaaggcgtttcccacagttctctacggacattcaaaagaaaatgtagaaatgttttgtgacaagtacagagaaagctctaccgttgtttgtatcgacgaagcaggattttacgctggcgaacacagcaaatatggatacagcaagatcggttcttgattaactacgaagacaatgagtaacctccgtcgtgtgaagttcactttattactcgctatttcatctcagagaataatagattatcagttattggagcacaattgtaaaaaagaagatttcattaaattctttaaaactttggtcatcccaaagaacaccacgatcgtcatggataatattcggtttcaccattcttcagaaataaaggatatccgaatgcaaagggtggaagcttttgtacacccctccttattgccccagagctaatgcgattgaacaaatatttggaagcatgaagagagactacagggcatcatgtccattgacgtcaacctgtaatttcgattacttaatgcaaatatgttgtgcacctgggcgagcgatttgtgtggtcaagatgaaattgagtacctttattccccatgattggcttcgtaaaaagatagacacactggtactggacatgaacaagttgcttggagagggttatattttcgcaaatttccacattgctcgtctttttgagaatggtatcgttgtccctcctgtaaatcgcaacttcttctaccggtgccttattgcagtcagtaccaacaaatgtaagggttcgactcttggcgaagacttcgagagtagtcggcttctgttcgacttgttaagagagccggggcaatccaaagttgacattcgggggaacgtgaagaaccagatcattgcagacctgtctattctcatggccacaatggcctctaaccatctttggaccaaccttgagcgacgcataacgacttacttgaagtggaagtacccacagattgcaaagcgcctgcggtcggacatcgtggctgcagtgatcaagtgccctacaaagaatctcgacgtcatcttcaagatgagccctcatacaaccaagctaccaaccaagctgccaacagctagacttcgatcggcaaaaagtgcagttgctcttgcgaagaagagggtcggtaggaaggaaccagaaggatcccctttgcgtgttaggttgactgaacttcaagagaggcttgaaaagttgagcgaagcttggctctcctcgaagaaccttagggtggacgcagataacgcgaaacgcttctttgcacgcgacgtggcattctgtctaggggggttctacctttaccatccggaaacacttttgcgtctcgggctcacatgaccctgcctctgtaccacaagatattgtcggagaccatcgaagaaaaacgaaaaactaaaaacgaaaaacatcgcacattctcgttgttgccttacaaatctggattcactctgtcgcacattccgatttcgaaaatggcctttttctatatggtcaacgagtgccacttcgattcatgcaaggcagacgttgcttccaaaaaccatcaaggaatatgggagcgcttcgcaaacctcaagaaagtggagacagtttctcggaagttcggttaccgcattgtgacagacggctttgcagtcagcatcttgatgaataagcctacgtgtctgacatgttcgatgcctgcagacgcgttctctacgcaggcgcatgagtatgtgacaacagacgagggtggcattgtatccttccttgacaatgtggtcgtggctgcggtagacccgggtgttactgatatcgtgactgtaacaggactcaacggaggtaccagatcgtacagctcggcgcaatattatcgcaagggtctgatcttcaagtctcagcgtcaaactgacgtttggaacctcgagacggctgatatcgtcggtggtatcattccggatagagactcttcgagttctgaacagattggtgcgtacgccagattctacatgggtgccgccccaatccttcttgcccatcgtgcttccagggggtaccgaaacctccgctttcgcaggtactgcaagaaacagaaactcattgttgagattgctgacttcgtagctccgagagagaagagcgctaaggtactcgtcgggtttggtgattggaaaggtctgggggcgacgccaatctctaggcggacttgtggccctctccaagctattcgtttcgagcttcgtagccgagaaaacgtcatcatggaggacatcgatgagttcagaaaacgtcatcgtcggtatttagtacttctttgagggtcgtttgaaacaaagaaaatcctgtttgaattgttcgtttgattcattcttagattcaatcggagataaccttgattcaatcgatctttgtttcctgtttgaatcagtcggccatcaaacctaccgattgagatccgtttgaaacaaggttggttgtttcaaacatgactcaaaccatgttcaaatagatcttaatcaagccgtcatcaacgtgccccttgaaaaaggtttgaaacaaggttggttgtttcaaacatgactcaaaccatgttcaaatagatctgtttttttgtaaagcaatgcaagcactgaagactgagggcgcatatttggacagcaggactcttcgatctttgttacagaaattgaaagcaccataatgaatgaatccttagatagttaaacatgatagtaattagtaattgaagagctagatatatatgctactaaggaagtgcagttggccacgaagtagttcctcaggtacgaattgacgaaactccagcatgctgtgcttcttgttcatcaacgacatcgtcttcagcctcaaggtcataagcatccaggcgttctgacgcgagaccagtcgcaagagtgagacctgcagacaaatgttcgttggtgagcgttagttgagatacattggcagcaatgcgcattcttccgactttcaaatagcagccatggttcaaaccaaattcgctatctgaatgcgcacctgttttgcacctcgagcattggaactcttgcggctccatgatgagctggacgataggtcgacttgctgcagctgccttaatgcctgcggaacaactcgaaaaagcgagtcagtcaaagttgagacaaattctggtcaagtaaggcaccacttgacgagacgcaaaacgcagtaccttaaccgcacgcgcgggggcggagaagcaggtcgctacagtcttgggttgaagcacaacaattcccaaagcaaagtaccgctgaagcaaagtgctcgcgcgtgtaggtattgacggatctcagaagtaattcgggaatggctgaagctatgaaagcaagctcagtccaagttaattcaaggaaagcaggcagcatgtcgctatctgactgcgcacctgtttcacacctcgagcattggaactcttgcggctccatgataggtcattttgctgcagctgccttaatgcctgcgacacaactctggtcaagtaaggcaccacttgacgaaacgaaaaatgcagtaccttaaccgcacgcgccggcgtgggcggagaagaaggtcgctacattcttgagttgaagcacaaccattcccaaagcaaagtgccgcggaagcaaagtgctcgcgcgtgtaggtattgacggatctaggaagcaattcgggaatggctgaagctatgaatagatcagtccaagttaattcaaggaaagcaggcagcatggtgcgctattctgcaggaatatcgctgagtcgagaaccaattgacgcgcagtgaacagtgaaagcttgcacagctgctaagttgaagcgctaacccattgcgctgaccagtttgaactgtacagcatgcagtaacgccgtaaccgcacgcgcatgggcggagaagcaggtcgccatatttgaatcggattctcggggcctgcgcctgcggtgcatgcgggatctgcgtcgcaggacctagacaaccctgatgggggtcatgctaatcaaacctgatgaacaatgggggataatgatcccgaaacttctcatgtacccaaatatgattattccgattctggaaaacaaaatatcataaccagattcaaagggacgaggaagttctgagcttagagaactggttacacatccgcgcctttcgaacagcgaccagttgggaccctgcacaccagtaggctatcctccactatgataatggtttctaaacttctcatgtacctatatatgattaattagattcaggaaaacaaaagatcataaccagattcgaagggacgaggaagttctgagcttagagaactggttacagatccgtgcctttcgaacggcgaccaggtgggaccctgcacgccagtaggctatcctacacctagataatggtttctaaacttcttaggtacctatatatgattatatcgattcaggaaaacaaaatatcataaccagaatcgaagggacggggaagttctgagcttagagaactagttacagatccgcgcctttcgaacagctaccagttgggaccctgcacgccagtaggctatcctacactacgataatggtttctaaacttcttaggtacctatatctgataaattagattcaggtaaacaaaatgtcataaccagattcgaagggacggggaagttctgagcttagagaactggttacagatccgcgcctttcgaacagcgcagatcggtaactactgatttaaactcagaagttcctcgttccttcgaatctgcttctgatctttggttttcctgaatcggactgatcacatataggcacctgacaagttcagggaccattttccaactgtaggatagtttatggggttcaggatctcaactggttacggtttaaagagcgcagatcggtaactactgatgtaaactcagaacttcctcgttccttcgaatctgcttctgatctttggttttcctgaatcggactgatcacatataggtacctgacaagttcagggaccattttcctactgtaggatagtttatggggttcaggatctcaactggttacggtttaaacagcgcagatcggtaactactgatttaaactcagaacttcctcgttccttcgaatctgcttctgatctttggttttcctgaatcggactgatcacatgtaggcacctgacaagttcagggaccattttcctactgtaggatagtttatggggttcaggatctcaactggttacggtttaaagagcgcagatcggtaactactgatgtaaactcagaacttcctcgttccttcgaatctgcttctgatctttggttttcctgaatcggactgatcacatataggtacctgacaagttcagggaccattttcctactgtaggatattctatgggggtcaggatctcaactggttacggtttaaacagcgcagatcggtaactactgatttgaactcagaacttcctcgttccttcgaatctgcttctgatctttggttttcctgaatcggactgatcacatataggtacctgacaagttcagggaccattttcctactgtaggatagtctatggggttcaggatctcaactggttacggtttaaacagcgcagatcggtaactactgatttgaactcagaacttcctcgttccttcgaatctgcttctgatctttggttttcctgaatcggactgatcccatatgggtacctgacaagttcagggaccattttcctactgtaggatagtctttgggggtatgttataaacatgttttattacattgatgacctctttgacatatattccaaagcatcccttattcatatctaagtctatgtaacttaaaggaagtacggtatgcaaagatttgaatagttattcattaaataatgcagttgtattcactgctgaaattgggccgaaatacctacggttaataagcaatatagacccttgtgctaaccgtatattccctttcctacccttgctggcccttcaccgttggttcctctcttccctgttccaataaatccgggacgcgaactgttgtagtgctagctggactgttgttccaagcaaccgtgtaccatactcctgtccggctctcagctgtccccgcgcccagtagaagatccctggcaacggagcccacgcacgccaaacccctgaacccacaaactgaaccggccaagtgcaattcgagccaccagattgtaaactcgcattctgaacgctacgctacgatcctcctcttcctctttttttcttcacttcgactggagacaactactaacgaggcaacgatcacaaggcatacatgcatcggtgcgcagccctggtcgccaactgcatcttggccttgtgatcgttgcctcgttagtgcaagctgctcctcgtagttacacgaggctagttcgacaaattgtacaagatttcggaaattacagaatccaagcaggggcaaatttggcccttcaggaagcgacagaggcctacttggtgggcctcttcgagaacactaatctggcggctatacatgccaagcgggtaaccattatgcccaaggatatgcaggtgcgctatctacaggggttgggggtggggtggggggtgggtgggcggggtgtggggtaagagttggatccacacaaaatatgctgcagcttctgggcagatccctaggtgggcagttggcctttggtaaaaatatgctgcagctgctgggacccgtacacgacaaaacacaacagtacactacactacactacacaacagtacacaacactatacaacactacacaacactacacaacactacacaacactatagaacaagggggttgggagggggatgggggggggggggggggggggggggggggactgagctacttgaaacactcactcattcactaactttgatgtctgtttccacttgcagctcgctcggaggattcgaggggagcgaaactaggacttggcaagaagttgtggtgagttatgctttcatgcctgaaccaccctcatgtaacaacttaatgaatgcatgttacttatcaataatatcataatatggcttagctgaacctacccatacagtagcccgataagcgcccttgaggctgcttgctacagaatgggcgggagatacgatttgccttgtatggtatgcctgaaccaccctcatgtaacaacttaattaatgcatgttacttatcaataatatcagaatatggcttagctgaacctacccatactgtagcccgataagcgcccttgaggctgcttgctacagaatgggcgggagatgcgatttgccttgtatggtatgcctgaaccaccctcatgtaacaactcgattaatgcatgttacttatcaataatatcagaatatggcttagctgaacctacccatactgtagcccgataagcgcccttgaggctgcttgctacagaatgggcgggagatgcgatttgctttgtatggtatgcctgaaccaccctcatgtaacaactcgattaatgcatgttacttatcaataatatcagaatatggcttagctgcacctgcccattatgtagccgcataagcgcccttgaggctgcttgctacagaatgggcgggagatgcgatttgccttgtatggtatgcctgaaccaccctcatgtaacaacttaattaatgcatgtcagtaataaaaaaatatggcttagctgcacctgcccattatgtagccgcataagcgcccttgaggctgcttgctacaaaatgggtggtcaatgcgtttagccatgtatgcatccaccaccctctgcacacacttaagtcaccaacatgataagtgcagcacattctaagcagcattatcttactcattctaatgtttttcccttgcaggtcattcatgaatgctggctgttgggagcaagtaaaggacgaatatgcagtagtggagctgcctggaagctgccatcatgtggtgccaagcttagccaatgggatattaaggcatgttagtgccctgaatatatagtagcatggagcagtaatcatagggtgactttagtttgggttttgtttatgagggtttaaaggtactgcctgtccttgttgaccaggacaggcagtacctttaaaccctcatacaaaaaacccaaaaatttaatttgaaatttcaagcacagcagtagataggccaattatcccttccaccaccttggacaatagccgggcctggtagttgacaatatacagccttcttgtgcgatacccacgagagcactgtattgtattcatcaattgtgcgatacccacaacgatgaatactttccctacaactgaattagacctaacttccagccagctccattaggttgtacagcttccagctagctccttaggttgtagaacttccagccagcttcaatagactttcactttgtgtgacaggttgtacagcttctagccagatccattaggttgtacagcttccagccagctgcattaggttgtacagcttctagccagctccattaggttgtagagcttccagccagctccattagactttcacttgtgtggcaggttgtaaagcttccagccagctccataagactttcactttgtgtgccaggttgtatagcttccagccagctccattaggctgtctctctgtatattaggttgttgtgtagcttcgagccagctaagccgtcctcagcaggaaaattaaatatatgacaccaatttgttttctggcattatatttgtttcctttcttgtaaaagtttctttcctaccattgtccaaagtgcgagtacttaaacacgcacacacaccctacttgggctgtttccaaactcctacattcaacttcaacttggttacatagccagacttcaacttggttacatagccagacttcaacttggttacgtagccagacttcaacttggtttacatagccagacttcaacttggttacatagccagttgtgacacttgagattacagccatcatcttgctagcacctacaccccaccctagatttttgtctagccaatgaaagcacaaactaatgtactacaaggtacggatttgtgccggttatcgctaggcgctcgcccgcctcggattcaaagcttcctacctctcggcagcctacatatgggagcttagctacatttcgaagtgcaatatcttcgaccaccttgaattccgtttgatattgtcttgattgacttccgtctgattcaatgaataagctgcttgaattgaatcactgattcaaactgttttcaaggtaccctgattcaaggggaaaaccgcttgataggggttcattgattcaaaccagttgattcaaacgatttcaaaggtctgcctaaataccggcgatcatggaggacatctcaacgatgcagctgctgtgagaaccacctttgcaacatggtggcactcactcatcgtaagaagcaagacggtacaggttgggaatgtacagaaggacgcaagcggattcataagattctccactgcaaaagcagtcaaagcggagcgccacgccaacagagcggtggtatgcttcactgcgggaagacttgggaccgcgatgtgaacgcttccgggaacatcctgatgcttacacttcaccaagtctttgggagagagcgtcctctcgcgtttagccgagacgcgccgagaagttcctcgacaaccccacccccaccccctgatactgatatggggacacagacggttgaacggtttaccaaagaggctactcggaatatcttcgagaacctcttcaacctgctgcaccccccaacgttgcacaaaagcaacgatctgcagtctggatgattataaggtgtcccactttatttgagaacaactgtagactgtataccacaaaataccattcacgttcacagcgacgtttcccttggtcgtcaaagacgagttcaagaaggttgaaacagttgcctcgtttgcgcgtttcagacaccggtctctgcggagctcaaggcccacctggccgagatgatcacatcgaactacttgggtacctgttcatcaacgggctcccgacaaggtcttacttttaagaaacggcaagccccgtcaatgacacgtggccctcgaggggtcaatgtgtaataaaggcaagcaatgcttgaaaatcataatttgtcaaaattatttgaaaacacttgtgtatgagtgcacgatgagcgaagcgcagaggaatgttttcattaaggtttacttcgacctccagaagttcattttcagcaacaagatcatcgtcgctgccgccggattctctatcgccgtggctaccaacgacgcagtaaagaaactgctcaactccattatcctcccattgttcgatttcataaacaatatctccttcgtgagaaaagccctcggtgtgaagatcatctcgatcatattcggtatcatggggacgttgatcatgtggatgctcactatactgctttgctttgtcctgcttgaatactttttgaacaagtctatattcggtatggttacgacgatatccgaagaccacaagacagaattcgtcaaagccaaggaggaggccaagagaaacgataccatttcaaagaaagtagaaaacatcaaaaatgaggaaaatatggttgacgaaatccttaaaatgtcaaagaaagatgacaaaccggtcaaagatattatacgacaagaaatgcacgatgacctcagcaagaagacacaacaaaaacaaaaacaaaaacatgaagaacaacgtaaacagtctcaatattgggatgatgggtcgtacatgcttgtgtaaaaccatctatataatgggcgttcctgcctaccggcagatttttttaaatttctaatcaggatttagagcctccgggacgaatcactagcttgagacatcagcaccaaggaatcacaaatccgctccagaccatgtttcgcaaccagtcaaaatccgccggtaggcagaaacgcccattctgtcttggcaacgatacagcactccgccttcatacaaaagacagttgaacgcaagactcgtacatgtaaaactggttcatgtggtttgttcaacgacatcgcatgtaaatatcgatactaaattcaaaaattcaaaaaatcattgcaaaagatagagtgtaaagccatattttgcaatctggattgtatcgttttgttcattctccctgtgttgtatcgtcgttacattacattacattacatgttaaagtctacttgacaccgcgagggtgtatgagactctgtgctttaaacaaaaagaaaaagcacc

SEQ ID NO: 159 - DNA, 20921 bp, Chlamydomonas sp.
  source 1..20921: mol_type = other DNA
atgggtcagttagcagcttacaattgttatcctctgggccagcttaaatgctgaaatacgggatgaaggacacgaaggattgggaacttgatacaaaacctttagctgacctacccaatcaattgggttcaagggtcaccggtaagggtgtcccacaaattctgtctctgactgtaggccatcaaattgaatgtacagaggacaccaaattcaatatagattcgaatggtgttgttccaccatggataatagcaagttggtgaaccgggaccattacagaggtacgtagcgcataattacaagctggcatgaacgcagtgtcgagcgtagtgagaagacaaaacacatacagtcggactttggggactcgggataaactcaccaagattggatgtcatcaactaccaaggctgctccgaacaatgaagtaccacgcactcgagggatgcagcctttatagcttttcagctttcctcccacctagagacttattagagtccctgagtattctgggttgacttgggcatgttgcctgtgttacgaaaaaatggagcataaatcagtcagtcaggaaggcagtgcagcagcagcatctaacaactatcctgtaagctagatccgaccagctcaactcgatatagcatcctgtaagctatcgaacactcgcgacagtgcaggaaggcagtgcagcagcagcatctaacaactatcctgtaagctagatcccaccagctcaactcgatatagcatcctgtaagctatcgaacactcgcgacagtacaggaaggcagtgcagcagcagcatctaacaactatcctgtaagctagatccgaccagctcaactcgatatagcatcctgtaagctatcgaacactcgcgacagtacaggaaggcagtgcatcagcagcatctaacaactatcctgtaagctagatccgaccagctcaactcgatatagcatcctgtaagctatcgaaaactcgcgacagtgcaggaaggcagtgcagcagcaacatctaacaactatcctgtaagctagatccgacaagctcaactcgatatagcatcctgtaagctatcgaacactcgcgacagtgcaggaaggcagtgcagcagcagcatctaacaactatcctgtaagctatatccgacaagctcaactcgatatagcatcctgtaagctatcgaaaactcgcgacagtgcaggaaggcagtgcagctgcagcatctaacaactatcctgtaagctatatccgaccaacttcacctggttggttgaacaaacgcgattgattgagcgagcaaaagcacttcctgagcaattagcgaacaggcgatgcaactcgtcgcgaaatcctggaagcttccgaatttccaagaattgagtggtaaccagcgaaagatgtggtgcttcctcgctgcaccgagcatataaaccgactaaacccttatcatgtttcagctgaagatcgcgacgttccacacattttggttacatttcaggtaacatttgcggtatgtctatcctgtgacaggtcacctttcaccgatgcgagtgtttgcggtcagccagctgtaaccaggtcagatccgacacgtgtttctgcgagtccgcagctgaattcccatgccccacaccgtgtgtcccgacatatattgtcaagcagaggtctgcttgagacacgtgtcccccatgatgcgcccatgaaaatacgagtgtaaaccgacatgtcatcagatctgccacgtgtttttcgcgcgcctcgaatcttcacacgagtccgcagctgaattccagttccccactcctcgagaccaagtgtcgtctcaagcaggcttctgcttgacaacactatgggaattctgaagggagaccgcatgcccacggagtggggcagtggaatcttctgcttcccaacagttatagaatttacaggttatattttgggtattctttcatacaatgataattagggggtttaaagaaatatagagtctatggtttaatcgatttacacaagatacagaacacaatacagttaaaaaatagaagagccattcattgcaagtacaatttagatacaaaatatgaagtatatgtgatgtgtttagaaacgagatgtccttgatacttcctggattgattgttggcgggttccatgaatcttttgaccgtgatcttctcaccacccacaacgtcacacatattttgaacgttgctacggaatgcaatgtaacggaacgcgtggggctaatatatgctaaagttgatatgccggatgattgcccatcaactgatatttctgttgcgtttagcaaatgcatggatttcataattgcagctcatcaaaaaaaaagttgtgtgtttgtgcactgccttgagggggttagtcgctctgtttgtgtgacgctgtgttatatggtccaacatgttggatggaagtttgagcatgcatttatgcatatacgttcccgaagaccgcatgtcgatcctttcccaaaatacattgctcagacgcgcaattacctcgtgcaaaagcgcgaggagagcaaaagaagcctcatcatcacaatcgatcacgacaatccggtcgagcaaaatgctctctctcaggatgcaacaaaaacaatctgatggagagtgaggtatgtcttaaagtatgcgtgatcagctgtggcaatcatgaatgacatacctggtctccacagttgtcaagcgagtatacagttgttctcaaataattttgggacactcagtataatttgaatgatatcccttgaaaccaggtacaggtccgtggttcactacaaatattttttgaggagtctcaggaaggtttgtaatatatacaacgtgtccaagagctcactacatagatgggtcaatgctgatcaggttggtaaaagtaagcgtttaaaacgaaaaaggaaagaattgtccatgcttttacgttccacgatatccaataatattgcagagaaccccttcataacatgcaaggatttggtcggtataatttgcaagagttgtaatgtgagattatcgatcagtactgcatcgagacacataaaacaatgtggattttctaggaagaaggcgtttcccacagttctctacggacattcaaaagaaaatgtagaaatgttttgtgacaagtacagagaaagctctaacgttgtttgtatcgacgaagcaggattttacgctggagaacacagcaaatatggatacagcaagatcggttctcgattaactacgaagacaatgagtaacctccgtcgtgtgaagttcactttattactcgctatttcatctcagggaataatagattatcagttattggagcacaattgtaaaaaagaagatttcattaaattctttaaaactttggtcatcccaaagaaaaccacgatcgtaaccaaatggtgtagcaacccacggggcagtggaacaccaatacgattttgaatcaacaaattgcagggtgttaacgagaatatcgtggttcttttttagatcacggctctccatcctgcagactccgtatcgttcttttgtcggtactttcgagagtgtccattgaaggaccagccgcacttaagcgatcgactcttccccggtaccgtggcccaaaagaacacggggtctttgttgatgtgcaatgcgtcatgaaaggaggtttcttttctggacgggccattttgtaggaccatccactcgtacactataatgtctgtcgacgccttataccgtttattgggatgtttcattttactgttccgccgactgtaggtagggttttgaccccttcagaattattagagaatataatggaataacagggttttcagagcggagaagattattagagaatattgcaaacgcctgtgtcagatggtaataatatatttgagttcgcactcaattgcccccaatcccatggattatcggggtttgtttgaacaatgtcaaaggtgatgtttgggggaatcccaaattctgaagcgactgatgttcgtaaacacataagttttaaacacaattcagaaaccattcttaacgccaattttctaacggcgatgtcgtacatttattattacattttttatttatttccatctgatatatgtttcatgtttcattttactgttcagctgactgtagcggttgcaccaattgcgcttttcatatacctccaccgtcgtgacgaggcctatcgtgacgatgcctatcgtgctaaggcccgtgctgacaatgcagctactgcccgtcgtgaggctgaggcccgtgctgacaatgaagctactgcccgtcgtgaggctgaggcccgtgctgacaatgaagctactgcccgttgtgcggaagctgctgcccgtcgtgaggctgaggcccgtgctgatgagtctgaggaccatctcaggcaaaagttgttgtcgttatcgcctgatgacgtcgctgctatgactcctgaacacgtttcggagtatatgaaggcgtgtgcctcggttggggtatcagcatttcatttggatcagccggtattgtgataattgtttttttaaatacatacatgtcacacaatcacccacccccgcagcacatctcctcgcatggtttgtcaaggcagcactgaatcctcggaggagccctgtgggttactgaatgtgagagggggggtgggattgcttgaaaatttcacgtttttcagcaaggaactgatgggggacgtggaggttgcaacacgatttgaggagcggcacctccaatatcagaggaagacacaactctacaacaacctttctcgcatacatgaatgatttgaacttcataaccaataattttgagaactttccatttccagcaaaaccatgtcacagttaagtcattggtgatggcatctattaggctcaggcttcggacgggtttcgtgtttttttccatcaacacacgtaattctcgttcatattcttcttggaacattttgacctttcaatatcaaggaagatattcctttatattccaactcgggatcatgtctccaccaagaccagcaggaatgatgatgtcaccattaggaatgttatttcagtgatcagcaagaagtgccgccgtgtgagaatggacaaggatgatgctgactgtgtaataatgtaattcgtcactgtttcggcatgacaactctcagattggtttcagaatggggagcgcgggcagattggattgtattggattcatttgatgactcgcttgaatttattcaatatactgtaacattattgaccggtctgactgaaacgcttgggactttcactgaaacgcttgggaggggggatgtttcattttactgttccgccgactgtaaatgggcgttcctgcctcccggccgattttgactggttgcgaaacatggtatggagcggatttgtgattcctttgtgctgatgtctcaagctagagagtcgttcaggaggctctaaatcctgattagaaatttaaaaaaatcggccgggaggcagatacgcacatttgtagcaaaattttaaaaagaaaaggatatagaattgaacaacatcagacaaagaagggagcttccattttgcagggatgcgtgttgttgatgaggtgtaccgtacactcccaaaagcggtttcattttagtattccgtcgagtgcaggaatcgatcaatgcttggtcaaccacaacgggtcgccatgaattcatttgattgaccgaaaaaatgtatgaagaatgcctgagaatgtctcacatcaatcaatccctattttaaacgtgttcacatgaacacctctgaaaagactctccatcttgggaacaacaattatttcaacaaacaataagaatcatcaaccaatccctattttaaacgtgttcacatgaacacggtctgagtgtaacgtgtcaggagtgagacgtgggccgggtcgtagtagccaatatgccatgtgaatttccgtgtcttcccgccaaactgcaacgcctcgcgtatgaattgtagcgttccaatgggatccgtttggtggcttattttttgccggacggacggtgtggatgcaacagttttccacagttttgcccgtctccctcgagccatgaaaacaacctctacgtcccctcactcctctgccttgccaggcagaacactgctgcctgaaattccctcttctgctcgggtgtcatgttgcgccagacgatggtcaatccatgagggttgatcaacaaaatgctcagggcgttgctggcaaacaccccagacagcccaccgaagtagaacccggatgctggcagcaacaggctagcaataagcttcaacaccgtgggtgccgtatcatccgatatctgcatttcctcttttacactctctattacaacacgggaaaacatcacccacgcatcctccattgatgctggctgtagcgggggcgtgtgttggcggtcatacgcttcacgcttgtcaggatcactcaacgcttcgtaagccgcgcacaacattttgaaacgctcctgagcagcatcccgttggctgtcaggagatgttgcccatttgtccggatgccatttcagagctgcttgccggtatgctcgccgaatctcctctgtcgttgcagtgtctgctgccacccccaacaattcatagtggctgctgaccacgatggcctgcgttgggcatttattgatgtataataatgcccctcctgcaaaccatttttcgaaggattctggagcacgcatgattggtgtgatgtacatgattcactgcatacagtcaatgacattgaatcccgggacaggttgacgcactgtgttgacatcttgtcgcgtttgttgctctcacacactcactcactcttgcgcgggtcatcatcgattcaatggtcgggtacacgaagtccacaatgtcgtccacatccgcacatttggggaggaaaatcgtattctcggtgcctgcgtttgatggcgtggagaagcgcaccacaatgagcgaaattctcctgcttttcattatgcgcacgactccgtttgaaggccccccgccgaaatccagatctcaggatcgaccatattgaacttcgccatttgtttctcgattgagatggccaagtattaaattacattttttattcattcacgatcccctgaatcttgaccaccatgatgtcgtcatctccgttgtttgtcagtcaccactcccatcgagagagtttagggttaacccatcaatcaatccagtgtgtctcatgcatgtgaactgtgggctcccctccggtcgcccacccgctcggttcctcgcggactcctttgtgggggctcccctccggtcgcccccggtcgctccgctgggggataggtgaaaggggctccgccgcttgtttagtgtgatacggttctcctccaattgttggcaacaatataccatgtttcgcaaccagtcaaaatcggccgggatgcagtaacgcccattccaagtcagcgaccattcttaacgccaattttctaacggcgatgtcgtacatttatttccatctgatatatgtttcattttactgttccgcctactgtagtgttcattcggggcggaaaaaagtgtacacatatgtatatagcatggtagagcacattattacatgtagtgatttgaaaacagtaggcgagcggatcgaacacatagtaaatgagatggcttctttatatgaagcgacaggcgtggagtatttcaaagcccatgcatcaggatggtcccaatgggtgtggatgttacaagatagcaagcgccgagagtggcagatcacataccctggggatcctcagggggtgtggaattcaccaaaagaccggttgtaatgagaaagataactgataacaaagcacataagtgttccaaacgtgttcaaaacaacccataataattttatcagtgaggttgccgaatgctaaggaaatcatatcagacacgtgcgtctttgtttcattcggtatgtagttcaaacggtacggtaccggggaagagtcgatcgcttaagtgcggctggtccttcaatggacactctcgaaagtaccgacaaaagaacgatacggagtctgcaggatggagagccgtgatctaaaaaagaaccacgatattctcgttaacatcctgcaatttgttgattcaaaatcgtattggtgttccactgccccgtgggttgctacaccatttggttacaccgtaaggtgtgccgtacactccagaaaacggtttcattttagtattccgtcaagtgtagtgcattggttcttccatgtcatacaaacgctctttgtgttcccctggaattcggccgggaggtaggaacgcccattacttcatgattcttttaaaatgatgagcagaagctaatcaacatcgtgattgttatggtccacatgatgcctgcgcaaatttgaggtaacttctgtttttttgtcatggcaatccatgtgatgatcacacttgtcgaaaccaaccatgctaacatggacaaggcttccaacatgctttgacatgcgcgtcgagcatagacaagaattagagacgaagcgaaagatattgtgataggcaacgctagatacataacgctacagtcaacggaatacttaaatgaaacatcaaaataaacggtacaaggaggcgacagacgtgtatgagtggatggtcctacaaaatggcccgtccagcaaagaaacctccttacatgacgcattgcacatcaacaaagaccccgtgttcttttgggccacggtaccggggaagaggcgatcgcttaagtgcggctggtccttcaatggacactctcgaaagtaccgacaaaagaacgataccgagtctgaaggatggagagccgtgatctaaaaaagaaccacgatattctcgttaacatcctgcaatttgttgattcaaaatcgtattggtgttccactgccccgtgggttgctacaccatttggttacaccgtaaggtgtgccgtacactccagaaaacggtttcattttagtattccgtcaagtgtaataggtcgtgtacgtgcgcatcgatgggtggtgtgcgaatgacgcgctaggctctgaccgggatcgctcttctgctctcacaatcgcaaggctgcactgcatggaattgatgggtctaggacgacctcttccatttgcccacagcagctctgttgttgttgatgaataaaaacttgtattgttgtagacaccactcggtccccctccggtgatcgcgacaacattaggttacaccgcaaggtgtaccgtacactccgtcgagtgtatgtaccatgacttggacagacggtcgattgttgtacacatgtacacattgctgcaaagtttgaggagtatgtaaaacagaaacaatggataacttcaagaagttggatacaagcatgtatgcgtgtttcacagtttcaggcagtacgtggaatggcaaaaattttattttacatggaacggtggtattcgataatgaggacgacgccaagaaatgtttagaaatactcgacctgtacaaagagacattctacttcaggcgtacatcgaacgtgatgaataagactatgttcacgtttgacggcacgacaatccacctattatctggtgacaaaattgagtacgcccagaatgctgctcgattgaagaagattgtagagatagaaaagacgtacacggcaaacgcgtgggaatacatggatccaatattgattatggacgattacgtaaggctattcgggtatcttccgctcaggaaaagggcattctggagctgcttgctgttatgtttttcgtgcagttgtatattctgtatcgatccatgctattacgaagctaaatatcatcgcacgtaggtgagctcatgcaccccccccccaacgtttttccatttccaagcctgcttgatacacacggctttcgtttgagtacatgcggttgcgtaagacccgccgccgtgcgtgtgtgaggatgcggtcgtccgctgccaactttgaggcatgacgtgttgcagcaggagtcagttatcattaaaaaataccgctttgaatacatgacagtcacatgtacattccgtcgtttgaggagtctcaggaaggtttgtaatatatacaacgtatccaagagctcactacatagatgggtcaatgctgatcaggttggtaaaagtaagcgtttaaaacgaaaaaggaaagaattgtccatgcttttacgttccacgatatccaataatattgcagagatcattccggatagagactcttcgagttctgaacagattggtgcgtacgccagattctacatgggtgccgccccaatccttcttgcccatcgtgcttccagggggtaccgaaacctccgctttcgaaggtactgcaagaaacagaaacttattgttgagattgctgacttcgtagctccgagaaagaagagcgctaaggtactcgtcgggtttggtgattggaaaggtctgggggcgacgccaatctctaggcggacttgtggccctctccaagctattcgtttcgagcttcgtagccgagaaaacgtcatcatggaggacatcgatgagttcagaacatctcaacgatgcagctgctgtgagaaccacctttgcaacatggtggcactcactcatcgtaagaagcaagacggtacaggttgggaatgtacagaaggacgaaagcggattcataagattctccactgcaaaagcagtcaaagcggagcgccacgccaacagagcggtggtatgcttcactgcgggaagacttgggaccgcgatgtgaacgttccgccgactgtaatggtctctctctgtgagtcgactcgacatgttccgccgactgtaatggtctctctctgtgagtcgactcgacatgttccgccgtgatgcgagaggtcggtcgccatgtgactcgcgctcaattctttgacaggaccaccgcatcttattgtgtacctggttcctgacaggtatgcgcaactcttttcatgtcagtactccaccaattagggatatctgtcactgccccacactccgccagtttaatggcaaaacttgaagaccacttcccgagcaggaacgtctttttcaaaacacacatgtactgccatggtgtgtagtacggatgtaagctatcgtcacatttgtgacagggtgtattcagctcctttgcatcagttcggtctagcaagttttcgagagctttcatggaatcggtcatcccccaccatgcatctgaatgttgaaccaggatccccttttgttccgactctttgtatgccctcaccagtgcatcttccacgcacctgattccaatacccatgttgctgtagataagtccatcaagcgtgtgctcttgtgatgcgtcgccactttctatgttcttcaaatagttcttgatttcgcttagctgtaataaagccattttccctcaccatatactattttccacctgaaggaaacgtagcgtggcaagtgcccaagttgagccttacgacccgactgcgacaacccaagaagaaatccagcctaaatcctgatggcatgtggcatgtaatgggcgttcctgcctcacggccgatttttttaaatttctaatcaggatttagagcctcctgaaagactcgctagcttgagacatcagcacaaaggaatcacaaatccgctccataccatgtttcgcaaccagtcaaaatcggccgggcggcaggaacgcccattgtagtacgtcaacgaagtgagtccttgaagcggtgatatgtcgtccacgtcggtgttcgaaatgtccaggtgcaccaacgaagtgagtcctgccagtggtgatatgtctttcacacgtgtgcccttcatgttcaggtgaatcaacgaagtgagtcctgccagtggtgatatgtcttccacgtcggtgcccttcatgttcaggtgaatcaacgaagcgagtcctgccagtggtgatatgtctttcacacgtgtgcccttcatgttcaggtgaatcaacgaagcgagtcctgccagcggcgatatgtcgagctccttgctccggcgacaagacgaaatggagccggacatcggtactcggtcttcgaccacacatgtgtacgacatgttcagatgaaccaacgaagtgaggccggacagtactgatatagagggtacacgtgtgccctccatgttcaggtgaagcaacgcagtgataccggacaccggtgagatgtcttcgagcttgtatttgagacgcgaaatgtcgaggtgaatcaaagaattgagggcggacagagatgataggtattccacttcggtgccctccatgttgaggtgaatcaacgaagtgagtcctgccagcggtgataggtcctgttcgcccacccgtgtgtacgccatgttcagatgaaccaactcggtgagtccggaaagcgttgatatgtcttctagtctgtttccgatatgcgaaatgttgaggtgaaccaacgcattgagtcctgaaatcgctgataatgggtgttcgtccacgtacgtgaggtgcgaaatatctaggtgaatcaacgaagtgagaccggacagcgatgatatgtcggtcacaagtgtgtgcgacatgttcaggtgcgtcaacgaagtgagtccggaaagcggtgataataggtcttcgtccacgtaggtgtgcgacatgttcaggtgcgtcaacgaagtgagtccgtacagtggcgatatgtcggtcacgtaggtgttcgatatgtccagctgaaccaacgaagtgaggacggacagcggagatatgtcttggatcttgtcttcgatagccgacattgattggtagggtacgtctttcccccgattgataccgattttcaactcttcgagcctgcaaatgcgtgataatgcgtattccaaactgttataatgtctcaggtggatccttgtgacacaccggggtgcgacgcatctccactgtttgcaaacgagaggcacttgtttgaggtgggattcgttcgaaatcgcattggctagaatgatctccaatacatcttcattgatttcgtcaaaggaactcatttgtttgtgaagtaatgggcgttcctgcctcccggccgatttttttaaatttctaatctggatttagagcctcctgaacgactcgctagcttgagacatcagcacaaaggaatcacaaatccgctccataccatgtttcgcaaccagtcaaaatcggccgggcggcaggaacgcccattaagtgtgctgtgctgatggttgtttatactgaagaatggttgtttacacttcattcgaggacgatgatccgccaccgcattcgtgtgtcatgaatggacggacggtgtggatgcgacagtttgtacgtgtacagtcagagacagaatttgtgggacacccttaccggtgacccttgaacccaattgattgggtaggtcagctaaaggttttgtatcaatgtcccaatccttcgtgtccttcatcccgtatttcagcatttaagctggcccagaggataacaattaatgggcgttcctgtctcccggccgattttttaaaatttctaatcaggatttagagcctccggaaatactcgctagcttgagacatcagcaccaatgaatcacaattctgctccataccatgtttcgcaaccagtcaaaatcggccgggaggcaggaacgcccattaattgtaagctgctaactgacccaggtgggtcggttggttgagcgcccacatttgcctctccggaagctggggttttagggggggggggggggcgagggaacacagaatacatccggtcgctccacgttatcagaagcagaagaaggttcagcagagttcacgtctaggttccaggctgtatgatgacttgacatgtttctgcaactaaattctccttcccaactccgcgagggcagagatccccccttttcggttaatcaggtgacgttccaggtccgtctcttgctgtaggagaaggaccaggtccgtgtccgtctcttctcttaggtgacgttccaggtccattcccgtgtccgggatggccgcagagacgtgctcttcgacgaacatagccacggcgtcgttcgcgttcaagtacgtcgcactggtcttctttaacgaatcgggcatatcgaacttgtactcgtatgcaaacgcgtgtagaagggtgcgtaggaactccatgcgcatcgctccgtctgccttgaatgcctctacaagccctgcgtctcgtgggaagaggaatttggcggcgtccgcctcatccgcgcccacaaaccgactgatgtagtcgagttttcgtatccgtcgttggactcccttgtcagaaccgtcgaccatcggcggggagttgcatatcatgtgtatattgtgttgcgggcggaagtgtacgatgtcgctggagtgcaagaggcggtaggtgatgccttccccaccggtcatatccttgaggactccggaatttaagacttcgtcgtggtttggctctgtgcaatacataatgcggacccccttccacgtcgcaaactctggcatcgggcgacctggatcgatgcgttgcttgcttgtcagcatttccacgtcgaatttccggatgtagtctcccaatacgatctccatgactttgaagaacttggtcttcccgttagaggcggacgcgttggcgccggcgtgtatgtgaaagagctcttgtccgctgtctccgtacagctgtctagcaaatgtgtggatgaggtattctcgttggtatatatcggggtgcatcgtgtcccagtatttccgcacgcggtctgctgattccacgcacacttcgccattgtaatcgaatcccacggacatggagaccatgtcctccggatgcccttgacggaagacgccgtttttgaggtcccacacgccgttgttgaaccctaagaggtttgggtcggcgtcgaggttcttcatgaagtccgggtcgtaaaagtactcgagcatctcttgcaggacgttattcttgaaggtcgcgtcctggaggcgcgcggtgatgtgcgctagccggtcggcgtcgagtttcttaatgaattccggtttgtaaaagtactcgagcatgtctttcagtacgttattcttgaaagtcgctgactggaggcgggcggtgatgtgcgctatgtaggcggagtcttcctttgtgctctcctcgttgctctgcatgtcgtaatcgctttgggacgctctctccctgttcatagcgataatgaagtgctctagaacaacggtggacagctcgtgcttgacgtggatcgcgtcgacgtccttcttccatcgcccgtcgaatacgtaccataatagctttccgttcgttctcgcggcggcagcgatgcggtttccaattatttttttcgcgatgcgcgcgatctcgttatgactcccgttgcacgcgacgacgtcatcatcaatgtgtatgaccatgacttttaataaaagctaagaaattggaaaagttataataaactcagttccaacagttctcttctattgtttaagtatagtttgtgtctttctggctgtgaagaggataataaggttagttaaatggtcttctgcgttgtttacaccagactggtcccgacagttgtagtgggactcagattgagatcgtggattacagactgatcaacggtggacagctcgtgcttgacttggaacttggtcgtgtgatgtgactcgactctacaggttccgccgtgatgcgagaggtcgctctgttatgtgaattgacacagattctgccgcctgatgcgagaggtcgccatgtaatgtgactcgacaggtgccaccgtgtgtcccgcgattcctctttcatactcctgacatagttgtcaagcagaattctgcttgagacgacacatcggaaacgcccaattgttacagtgatttttttacaaacaacatacacattgtgtaagacttgacagttacactcgacggaatactaaaatgaaaccgcctcctggagtgtacggtacaccttatggtgtaacctttatggtgtagcaacccacggggcagtggaacaccatcatgtttttttgtagcccatcaaccatcaataaaaacaatttcaacaattttctaacggcgatgtcgtacatttatttccatctgatatatgtttcattttactgttctgccgactgtagttatcatggacatctcttgtcccgaaagggcagctgcggcgtgaggtcagtgctcagaagacgaagtttcacgagctcgagcatacggcagacactctcagggcacaggaggtagttcctctcctcctgagttctctttcccttgacctgcacccgcttggtcacgcttggtcacgctcaccatatccagacccacggcgttcaggatcatcttcacagccttggacaccttgcgcaggtcccacccgtcgcgaacgccgcacgatgcatggctgaacagcctagcggtgttgttcacatcatgttgtagccgcagaacatctgtgttcccttgagcttttcgtcgaacaccgtcatcatattccttctctcgctcattctcgcgttccttctctcgctcaacaacggcaaagctggggggggctggcggcacgtcctcggtgccgcaatcaaggctatcgtatgtatattctgagacagacttgatagacatgtcgacgccacctgtccccacgtactggaatacgacatcggccatctcctgaaagacggcacctgaatcacctgcgtcaagttggtagtactcgtacccaacgtcgccacggggcttgactcgagggtctcctcgaaggtaccggagcaggacagtctcagactccacacaagcaagcggattaagtacgtggatttcgaagataatctttgagttcttcgggtactgagaaagtcgcttaccaaagggcttcgacgtccagcccaccttgacgacgatctcatttttctgaatgaacttgttctcaaccaacgcgtacacgaccaacttgtgcgccatgatctctgtcgagctgctcctgtacaattcgttgtgaagaaagaatctgtgaagaagacggacttcgttgcatttattgaatcattgagtttgtgcaataattcagtagcaataatcctatatattgttctcctctctcttcattcgaacacgaccgaccgacatcttcctcctttccatgagcagcatcatatttataatgaagccgccgtggcgtgcgtgagaatgatcaaaattaccgcttaatgggcgttcctgcctcccggccgattttgactggttgcgaaacatggtatggagcggatttgtgattcctttgtgctgatgtctcaagccagcgagtcgttcaggaggctctaaatcctgattagaaatttaaaaaaatcggccgggaggcaggaacgcccattgcttgacacattttcatcaccattttctaatgagtcaggttacaattagcatggtgaacagttggaagagaaacaccagtagaactacactcaaaagattgttgtattgtacacagtttacactcgacggaatactaaaatgaaaccgctttctggagtgtatgctacaccttaaggtgtagcaacccaccttgcagtggaacaccatcatgtttttttgtagcccatcatcaacaacacgcatccctgcaaaatggaagcggtctcccttgacacaacagttccatgcagtgcagccttgcgattgtgggggctgtcaatgggaggtgttagatgatggtcaacgaatgttttttgtagaggtactcctctacaccgagcatctccgcgtttgtgagttccctgtcgaaaacgatgacttctgcacaagcccaatctgacgactcgacggctacaaaatctccataatttatcgttagtcttgtagaattcccattaacaattaggttgtttcgttgtaccttgttcgacctgtaaagctgtttagtatcacatgagacaacccactcatctccatgcaaattttcttgtggagtaaaccaggtaccatgataagctaaaccactaccacctatatgaaatccagacaaccaattgttacccaaaccatcaaacatacgctttcgtattccgcctgtagagtatcgagcgagatggaagagggtgtatgtttcaggtagcacatctgctggaaaccttatacccgagccagtaccacccgatatgcatgttatagatctccccaagggatctgtagagtctccaactgttatggttcccgccctggtttcggtggcgtgcctcccgtttcctgatatatcattccaactctttgtgccgacatcccatctctctggtgtgtaccacgcgtatagcccgatcacgtccgcggggctctcgatgagccctgctccgcggaagtcggcgaatgatatgcgagtcggctcggtcgccgctaacgggatcctcgtgatggacgagatgtaattaggtgtacgagagcccctaaacaacttgtccatggcgtaaggattctcgcctgatgaccctccagggtccacgaagtcgagaatcgatttaatgctcaatgggcctagggtagggatggagtcgccgaagtgcttgatgcgcatgtaagacacgacattggaaagttgagaatctgtgagggaaaggtcgtagaaggccatctcgcgaacatctagacaactataactagaactactagtggatttagcgatcgaattgtcagtggtagtgcgcgacgagtaatttgtgatagttccatttccagtgactttgttatccaataggtatgaagacggatctataaatgcttccactaggttcgcacttggaatcctcaacacaaggagcatccatgacccataagtgaaattttgatgagaagttgatatattctgggtattgcctgaataaacaagactacctaaagtgtttatgacactctgtctgtataatagaaaagaggatggcgaccccgccgatccaaaatcgaatatcctttgaaattgtttgttctcgtaaaatctcacaacgcccacgaaagtgaacccgttctggaggttccatgtttgtgtcccaagattcaaataatttccctttgaatgattagcgtcggtcgtcccgaagcgcacatacctgttgggttcattggtcctgagtttgggtagccccgcgcctccaacctcggcggtcgcgaacgagttccacgaggatacattggtgttatcaatagaaagctgtggcaattgggatgcatccaaatgaatattgcgaatggggaccttgcgaagcagcgggtcgctgaagtatttgtcgtggaggtgccctacgacatcggaaagttcagaatctgtgagagaacggtcgtagaaggccatctcgcggacgtcgagacatgcgtaggaatctgatgaccaattggatctccctatccagttgttagtgagagtgcgtgccgcgtaacttgtgatagttccagtcccagtgactttgttgtctatgaggtttgaagaaggatctttccatgtttctaggaggtttgcgttcgttacacgtatcacaatgaccatccatgaacctggaacaaaattcattgcagtgagtatttggggcgaacctcctgaaaaaacatgactaataagacgcgaaccatctggatgcgtgcaaaataaattgttgttagctataccgttaccaaaatcgaatattctttgccaactctttgattcataaatcctcagaacgcccacgaaagtgaacccgttctggaggttccatgtttgtgtcccaagattcaaataatttccctttacatgattagcgtcggtcgtcccgaagcgcacatacctgtccgtctcgtccgtcttcagtgtgggcaatccggctccgccgacctcgacggtcgcgaacgagttccattcggaaacgtctccccctcctgcgggaagctgtgacgtgtccaggtatatcttcggagccgtcagaatcaaggggtttctgaagttctgcatataatttttttacataagttctgcatacaattttttacataagttctgcatataatttttttacataagttctgtatacagttgttctaaaatatttttgggacactcttaaatgtccctagatttatacgttgaaaaaagagaatgcaaatccgaatgacacgcctgtgacgactgagatcgtcattgcgttgcgcaggatggacaccatttctttatttttcccctcttctggagagtaggaaagtgtaaataccgctgtcactcctgcggctagtactagaaactttctgaagacttcgaacgtcgtccacgaatcgtgtccgatagtgagccaacggatatttgtatatttctgatcgattttaccaaggacaaagctgataacggctactagcccgatctgcaaagcggctatgattactttaatgttctttatgttcgttttgggtaagacgtactttgcgagggagaacattacatgaataggcaagatcatagcacccacgaaccacggtacggcacggatgtctatgggattgggtacaatccatggaattttacaacaaatattgttccacttggtgcatagggattcttctgctgacttgatgataatgttaaactgtctaaacagcaaaagattaatatcattgaatggataaagcaaaaatgggggaaaaatgtggataaactgttgacgtgtatgctatcacgacatctgtgctactttggtgatgtaccctccgaaagtttcctactttttttttcattttctgcgagatgaaagaaatagatgtttttacctagaatcgcgaaaacgatcttcttgaagcacccttctacctgttcgatctcggcagacat

SEQ ID NO: 160 - DNA, 21386 bp, Chlamydomonas sp.
  source 1..21386: mol_type = other DNA
tccaatgaaattggaggctgacttctatgctgcatactcaatttctgatctagctccgtgcatgcgcccgatttgcctcgatgaggtccatgaccaacgtgttgtagcgttccgacataagagacgacggatatggggaacccttttccatccggagtcaatctgcgctcataccgagctgatattgaataacttcatacagacagtacaaaaatgggcacccccgaagacctctgaaaagactctccatctcgggaacaacactaaaaaaaaaaaaaaaaaaatgaagaatgccggaggatcacatcaatccctattttaaacgtgttcacatgaacacctctgaaaatacctgttgttgtcctgtgttgggaaaattaacaataatatggctgatctcaataagatgcatatcgataacttgttcaaagtgtgcgacaatctttacctatcagaccaagaagcagctctcaaccaccaactttgtaaaacgttgcaattcaagcttgttgtgaactgcacaaaccacacaccgtatataaaaccaaggaacccaaacacaacatacattaaggttgctgttgaagacaactgcaggcaaaaagaggtcacgaaactcatatcctatctaccatatattgttgaggtgatgcatggagtgttaagtcaaaacaatgtcgtgcttgtgcattgtaggttgggaagacaacggtctgcaacagttgttgctgcttatctgatgtgggaaagatgcattacgatgacagatgcgatcaagcacattcaaaggttgaaccccaccgcattccaaccagaagccaactttaaacggtcccttgaaatgtttgaagttcacctgaggggcaaggtcatccatggcggtgcatccttgtcccatcaagatgacaaccatgaacaagatcctcgtgaattccattgccccactactggggggcgagattcccctttcataacagttgaatccattcaagatccaagttactacactcagaccggtcaataatgttacagtatacttgcgaatgtaacataattcccttgtccgagtgtatacatagagaattggaattgattcaataacattattggaattggaattgattcaataacattattgaccgccgggatgtgtgtaattacagatttatggagacaacaaaacaactaaccgacataattgctgcctttttcgagcaatgtgagaagaagtcaggcgcatacatggattacaaaattttaaagattgcttttttgcagtacatgcacaagcattgtgttccgctgccagatcactttgacaatttttttatcactctgttgggaaaggaaggggtatcgacatatggatatgacccgacagttgtagtgggactcagattgagatcgtggattacagactgatcatgccggaaacagcaattgcacgatgttgcatcacagggcttctcggaggatgaggttacaccataaggtgtaccgtacactccagaaagcggtttcattttagtattccgtcgagtgtagcactccttcgcgctttccatgctgataattgtttagggttatattgtatatttcaaaacacgatcttcagacatggattgcttaccttaccagaatcccacgtacactgtagggtccattgtaccgtagacaacccaacaacgcacaacgacttggataagacaacaagtatcgtgggaatagtgtacgaggcttacattcacaagggatttccgatgtatggtgtgctgatgagaaagaacaatgcgtgctatgacatgaaaaaattcaagcaatcaacatcatgcttgtcaagtgatatatgttgccaacacttggatgagaaccgtatcagtcaaaatcggccgggaggcaggaacgcccagtacttgtgagtacttttgaaaaatgcaacaacacctcttgcggttgtgcattgagttgacaataaaatttcaacaaaccttttttatatttgaattatactacactcttttctgttcttaagatgggtctttttgaatttgtgtacggaacatccaagccgcagctgggttccttgcttgatggtgccacatgggataagtcagtgagtcagcagctcaattccactgtcccccctccgcgggacccgctatccccccttaagaattcccatagtattcttaagaaggagccttcttgatacaatacggtttctttggatgaccggaccatagtgaatgaggttgcgaaagacgcgacacacattaatccgcggtggtgtcttttggagacgatgacatgtttccgccgtttgcatgtggagtcagatgtttttcgatcgtcgtcgtcagtgttcctccgtttgcgggtgttcgttcgtacggaggggtggcttacgcttgaggggcaccatccagattggtatgaatgttccaaaaactcagacatctgggtgatcttaatcagatgactccgacgtctcgccaaattgtataaagggtgtcccacgaataacgtcagaacgttttgtatgaaaaatcaaatatggacaaatgtctcatggtaattcaagcatccactcaacgtgttgctgatgtggatagagttgtttcacgtgaagaatgctataatatacctgtgagtctgagcaatgagatctgtgaagacttcaaagacatagaaattaatctgcctcacatgcgaacaactggagaaccagggagattgttggtaaataaggaaagttatttcttgcaggcaatttgtaacatgagtcacacatttccatgtgacatcgaaacagccctcatatatgttgacatctttggactacatccagatgaactacacttccttcaggtttgcaataaacataaattgcatttgaacaagtatctattcacaaattagtctccttgtacctactacaaaattcattgacaagtggaactaagaactgtccacggagtttgctcctttttcttgtaaaaccaatgagttttatgaaacgttacactgttttagttgataatcgtacattgtgagtacttttgaaaaaaacaacaacgcctcttgcggttatgcattgagttgacaataaaacgattttaacaaatccttattcgtctcaaaaatgttgcttacaaattcacgtcgtcagcgaccattcttaacgccaattttctaacggcgatgtcgtacatttatttccatctgatatatgtttcattttactgttctgccgactgtagaggcaaggtctccgggtcgaccagttgttggagcttagccaccttgtggttagcagtgttcagttgccggcgcaagcgagcaatgagctcatccttttccagtacggaggtctttaactctgcgttctcctccaggacgtcccaataacagttttgcagcttagcgacttgctcgcgagtcgggggatccattgctctgcaatatcacagcaataaattcatgatgattcaaacgtatggcgcacaatcaggggggggtgtttatttgattacaggaacgctttgaaaatattattaatgctcacatcgtgagcactttgacttttcatgctactgtacatcttatttacgtgaatcgtgttacaacccattttttcttcttcgtcgaggcaccagggaatatgtcgttcaggagcccacgcgacttcgacgagctctttcttcatcatcttgttccgaagaaggatgcgcattttcgaacacgacgcctgtgtgttcgatatcgctgtctccaagtcttgcttgatcgtttgaaacttggagtgcgtatcagagtcgccgttgaaacgttcgagtgcgacagtcaacgcatcgacgatttcgtgaagacaatgcatctctacattgtcgtgcagttgtcgtttgcacagcgtgtcgaccatgacccgagggactctcacgatctgaggttcgctgtacgcaaccatgctcaatgtttcgatttcaggaactcgctccgtaagcgccaggacgtattcgaatggaaagtcatcgtcattgcacccttcctcctgcttaaatcgaaagaaaccgtgccatttggggcagaatggataagtgtacaagcgtcgatcagtggtccacatggttgacgtcttttaccagagtggagtacgcttttccgaacacagcacatttcatttatatcgttttttgaggaacgggcggcaaagatcccgtggcacaaaagaacacgggatctttgttgatgtgccctagaagtctacttgaggcggcacatctacaatgccgagacctgtatggatcaaagttgtttacactcgttttttagttgctaatctgtcaacggtagactcggtacctccagcggcgatatgtcttggatcttgtcttcgatagccgacattgattggtagggtacgtattccccccgattgacacctattttcaactctttgagcctgcaaatgcgtgataatgcgtattccaaacttttataatgtcttaggtggatccttgtgaagcaccggggtgtgacgcatctccactttccgcaaacgagcgacatcttcattgatttcgtcaaaggaactcattcgttcccctccggtcgcccacccactcggttcctcgcggactcctttatgggggctcccttccggtcgcccccggtcgctccgctgggggggaataggtgaaaggggatccgccacttgtttaatgtggtacggtggttctcatccaagtgttggcgacatatatcacttgacaagcagttttgaggttggttggttaaggatgagaacaaccgtgatgtcttttttacgccccccttgttcttcatctgccggtggaattaccactttactgtccccgctttcctcgagatacatgtggaacaaggcaacctgaaatcttcctcaaaaaacaaaacttaaattataacacgatggccaacaacatttcaagaaaaatagctttctggatagggtgcataggaatcaggacagctttcgtgattcttgcctttctcgcgacacctatgtatctaaggtacatgggcgtcttggcccttgtgccagcaatagggttctttgtcatatactttggaggccttcggaaaacggggatagaggtggcgccaggtggcgggaagatctggtggtcgaaacttcgccccgttcatggcacgttatacctattgtttgcaatccttgcgctctcccgctggcaaagacatgcatgggtcgccttggctgtcgatgtattcatcggtgtcctcgctaaactgtgtttcgttgtgggttataagtctactcgtggtattcagtaatcagtatgcaccgcgctcctccattcagattggtgcgcgctggtcctcgaattcgtcgtgaatgtgaatgaatgtatgcgcagcacatttttttattcgaaaaccagactaagataaaaggagaagcagaaaaaacacatcatacatgcagactttgggggatttatatcggtgcgtcatggctagagacaaaataataaagcattccattattatggcgtgtgcaaatatacaatcagtacaaacatttgatggcaggataatcttggctataatatgggtggatcaaattcgccgaggtgcttacatgtttgaaaataccatacttcaacttatttgcactgacgaggaaacgactcccgccgttgcatcttcaataggaattgggccctcgtttcagatggttcgtgaattacacaagacattaaacaacatgcaagaaccttctgacaaagacaaagacaaacacaaactgtatgacggagcaaaggcttggctaaaaaacatcatgggtcattggttccgttgtggatacgaattggaatggttgcattccatcaggtactcgcaagtgggccccttcccttccctttgtatctggacccctacagtcaacggaatacttaaatgaaaccgcttcgtgtacggcacaccttgcggtgtaactatttttcttgtcaaaagttgccatgtgatttatcaaagatttgaatctattgcaacaacgcaaagcctgttctttctacgcacccatcgctaataatgggcgttcctgcttcccggccgattttttttaaatttctaatcaggatttagagcctcctgaacgactcgctagcttgagacatcagcaccaaggaatcacaaatccgctgcataccatgtttcgcaaccagtcaaaatcggccgggaggcaggaacgcccatttaatcttaaagaaatccgatgtcttgtaattagaatgtctcccaataatatgaaactccaatatgaactatgtgcgcaaagcatattgggaaacttggacactgtcgattcattattccatgcgggtgctgaaccattcgaccgtgttggaggctgtggtgcattatgttacgcagcattctacgaccaccagaacatagttttaaaggttgtatgtttttggtcttcgtatacaacggacctgacaatctaccaagagccagatgttgcagaaatgattgatcttgcattattcctagctcagatgaaaaagaaccaattcatagctaattatttgaaagatattcacacacatatttgtaaatctcaaaaattctgtacccagaagaaactaaattttgaacttgtgcttcaatgcggactaggagacataatggcagttaaacggttgctcaatgatggtgcggatccatgttatcaacatggtattccattgatgtttgccatatcaaataggcatgattgcgttgtaagttgtttgatgaaacatgatgcataccatgctaaccaatcgatcttcgaaatggcattgcatttggcaaaccgtttgcataatctgagactttgtttttacatcgaaaacatcattaagaatcaataataaatgttgtcgcgaccaccggaggttggaacaggttagggtcaagcaggaacagaaacaaagcactgtcgagtcagtcacactctcatcaaggacggcagcggcacacgtcgagtcgagccactcacagggagacctctctcatctcatcaaggacggcggcggcacccgtggcttacattcgcaagtatagccactctcctcaaacttttcagcaatgtgtaaatgtgtacaacaatcgaccgtctgtccaagttgtacatagagaattggaattgattcaatatactgtaacattattgaccggtctggctgtaacatgaccaggttgcggataaacttggatgatggtgttgacccggtggacgtcggtgctgcagtggagatgctagaccaggcagtgtatgccaaggtgtcaccattggtagtgaagctgattggattcagtcaggacggaatcctagttggtcagttcagcggcttcatgcatggggaagtcatcgtggcagcaggacacatgcaggggttctgcggcaagaccctaggtagtacatcaccggctgtggcctttaaggcaaggtacccaaccgacggctttgaggaggatttggaggtcgtggccccctcacctccaggcaatgtgcctgacctcattctgttgaagggttcccgctctgccacgagcctttggtccactgatcttgaaatcatggcgtcagtgtacgcactggggtacacaggcacagagaacaagcccagttgctccaagggatcactatccagcaccatgcctggatcagtggccatcactgcacacgcagatgacgggttttcaggcggaccagtggtcgacaagcatggccgcctgctgggggtcgtgaagggcgcacttggcaccacaatcatgcgcatcggcatcacccccaactacgaccttcacacctacctgcttcaatcaggatatccaggcttgatctaagcccatgtttgcaagcaccagtggcatgatgcaggatgcctattttggacccatgtagcagagtgcataagcggtgatacacagtcaacggaatactaaactgaaaccacttcgtgtacggcacaccttacggtgtatacagttgttctcaaataattttgggacactcagtataatttgaatgatatcccttgaaaccaggtacaggtccgtggttcactacaaatattttttgaggagtctcaggaaggtttgtaatatatacaacgtgtccaagagctcactacatagatgggtcaatgctgatcaggttggtaaaagtaagcgtttaaaacgaaaaaggaaagaattgtccatgcttttacgttccacgatatccaataatattgcagagaaccccttcataacatgcaaggatttggtcggtataatttgcaagagttgtaatgtgagattatcgatcagtgctgcatcgagacacataaaacaatgtggattttctaggaagaaggcgtttcccacagttctctacggacattcaaaagaaaatgtagaaatgttttgtgacaagtacagagaaagctctaacgttgtttgtatcgacgaagcaggattttacgctggagaacacagcaaatatggatacagcaagatcggttctcgattaactacgaagacaatgagtaacctccgtcgtgtgaagttcactttattactcgctatttcatctcagggaataatagattatcagttattggagcacaattgtaaaaaagaagatttcattaaattctttaaaactttggtcatcccaaagaaaaccacgatcgtcatggataatcggtttcaccattcttcagaaatcaaggatatatccgaatgcaaagggtggaagcttttgtacacccctccttattgccccagagctaatgcgattgaacaaatatttggaagcatgaagagagactacagggcatcatgtccattgacgtcaacctgtaatttcgattacttaatgcaaatatgttgtgttctagaaatgtggaggtataaagacttgtcaaaatatatgattaatacgagagattgggttaggaatgttcgagagagcctgtctgcagatccagattacatcaaaacgttttcggggtacaatttgtgatggagaatgggatcggcgagtcatcatcgttggtacatgaggctgaccaacatgatgacgttgcagaacttgtcgattatgaaggggaggaagacggggagtgtgcacctgggcgagcgatttgtgtggtcaagatgaaattgagtacctttattccccatgattggcttcgtaacaagatagacacactggtactggacatgaacaagttgcttggagagggttacattttcgcaaatttccacattgctcgtctttttgagaatggtatcgctgtccttcctgtaaatcacaacttcttctaccggtgccttattgcagtcagtaccaacaaatgtaaggggtcgactcttggagaagacttcgagagtagtcggcttctgttcgacttgttaagagagccggggcaatccaaagttgacattcgggggagagtgaagaaccagatcattgcagacctgtctattctcatggccacaatggcctctaaccatctttggaccaaccttgagcgacgcataacgacttacttgaagtggaagtacccacagattgcaaagcgcctgcggtcggacatcgtggctgcattgatcaagtgccctacaaagaatctcgacgtcatcttcaagatgagccctcatacaacaaagctgccaaccaagcttccaacatctagacttcgatcggcaaaaagtgcagttgctcttgcgaagaagagggtcggtaggaaggaaccagaaggatcccctttgcgtgttaggttgactaaacttcaagagaggcttgaaaagttgagcgaagcttggctctcctcgaagaaccttagggtggacgcagataacgcgaaacgcttctttgcacgcgaagtggcattctgtctcaggggggttctacctttaccatccggaaacacttttgcgtctcgggctcacatgaccctgcctctgtaccacaagatattgtcggagaccatcgaagaaaaacgaaaaacgaaaaacgaaaaacgaaaaacatcgcacattctcgttgttgccttacaaatctggattcactctgtcgcacattccgatttcgaaaatggcctttttctatatggtcaacgagtgccactttaattcatgcaaggcagacgttgcttccaaaaaccatcaaggaatatgggagcgcttcgcaaacctcaagaaagtggagacagtttctcggaagttcggttaccgcattgtgacagacggctttgcagtcagcatcttgatgaataagcctacgtgtctgacatgttcgatgcctgcagacgcgttctctacgcgggcgcatgagtacgtgacaacagacgagggtggcattgtatccttccttgacaatgtggtcgtggctgcggtagacccgggtgttactgatatcgtgactgtaacaggactcaacggaggtaccagatcgtacagctcggcgaaatattatcgcaagggtctgatcttcaagtcccagcgtcaaactgacgtttggaacctcgagacggctgatatcgtcggtggtatcattccggatagagactcttcgagttctgaacagattggtgcgtacgccagattctacatgggtaccgccccaatccttcttgcccatcgtgcttccagggggtaccgaaacctccgctttcgaaggtactgcaagaaacagaaacttattgttgagattgctgacttcgtagctccgagaaagaagagcgctaaggtactcgtcgggtttggtgattggaaaggtctgggggcgacgccaatctctaggcggacttgtggccctctccaagctattcgtttcgagcttcgtagccgagaaaacgtcatcatggaggacatcgatgagttcagaacatctcaacgatgcagctgctgtgagaaccacctttgcaacatggtggcactcactcatcgtaagaagcaagacggtacaggttgggaatgtacagaaggacgcaagcggattcataagattctccactgcaaaagcagtcaaagcggagcgccacgccaacagagcggtggtatgcttcactgcgggaagacttggaaccgcgatgtgaacgcttccagaaacatcctgatgcttacacttcaccaagtctttgggagagagcgtcctctcgcgtttcgccgagacgcgccgagaagttcctcgacaaccccacccccaccccctgatactgatatggggacacagacggttgaacggtttaccaaagaggctactcggaatatcttcgagaacctcttcaaccttctgcaccccccaacgttgcccaaaagcaacgatctgcagtctggatgattataaagtgtcccactttatttgagaacaactgtagccagggtttagaatatacccctgtcttttgaggcttttgaaaagttgaccaaccgcgcgagagtcacttcctctcacgatgtccactgacgttctgttgttttctgggctaatacccggatgtttcaatctgttgaccgtccagtgcaggtatacactcatccacgctgtcgtgaatgcacctcgaacccgcacgttacatgatgagtccccaaaagtccgcgtgtatgtgttttccccgcacgcgcaagagcacacaagccgcccatgcatgcatcatcataaaataatcggagcataaagatacttgtggatctattactatctattactatctattactatctattactatctattactatctattactatctattactatctattactatctataataatgatttcagtggaaataaataaccacatctcaagacgggtcaaatgtatggaatacaagtggtattggagtttattgagctcaaaccccaatatcacatgggatatcatcgaatccaatcccaacaaaccatgggattggaactggttcagcagaaaccccaacatcacatgggagattatacaagccaacccagataaaccatgggactggtattatatcagcagaaaccctacaataacgattgatattgtcattacaacccccagtaaaccttgggattggggtgggttgagcataaaccccaacatcacatgggaaattatacaagccaacccagataaaccatgggactggtattatatcagcagaaaaccctacatcacgtgggaaatgatcgaagccaaccccgacaaaccgtggaattggtattggatcagcagaaacccatgcattaaatgggatattgtcattacaaacccagacaaaccgtgggaatggggtggattgagttcacacccgaacatcacactagatattatacaaaccaacccagataaaccatgggactggttttttatcagtaaaaaccccagtatcacatgggatattatacaagccaacccagataaaccatgggactggtttttgatcagtaaaaaccccagtatcacatgggatattatacaagccaatccagatataccatgggactggtattttatcagcagaaaaccctacatcacgtgggaaatgatcgaagccaatccagataaaccatggaactggaactggatcagcaaaaaccctgtcataacgatggatattatcgaaaccaacccagacaaaccgtggaattggggtggaatgagcgaaaaccccaacatcacgtgggagattatacaaaccaacccagataaaccatgggactggtatgagttgagcagaaaccccaatatgttgctatcttcccaagacatatgtgatctcatacgtagatacagatcagcaagaactatacaaaaaatatggcgccatgtcaatactaacccaagttataatgcatgtcaacacagactctatagagaatataatgaaatggtttaaaattaaccccgttacactcagggagaggggcgtgccgattccagaggaactaagagctcacttgacagaaaagtaattgtccgagtgtatttcctgacatgttcattatttgtaagcttgaatttccattttctcttcaaatgtaaagctcgtacggacatggattcacgcaaggtgtgccgtacacgaagcttccgttgactgtattggcgagaacgaatccgttcatgatcacatgagcgagggtcacgtttatgatggttgcgggcgttttttccgttcttcgcgcggtttatcatttcacaaatgaacgtgtggctctggctcgacgacttgtgcttcaaggaggggcgaccccgtgtgacgacacctcctcgacttgtacaggcgctttcaaggtgactttcgaagcccagcactcatcctcgatcgcttcaacacgacgatagttttcagcgacctgcaccaaatcaactttgccttccattttggcaatagtgttccgctgggttgcgaatttgatttgctgttcgctgtcctgctccaattttaatattctgcgttcaagtacttctttcttgtgcatgaaatggtcatggatggattcaatctccttttgaagctttgcatcgtagtcgacagtgccaacatcttttaatggtgttcgtttgatgcaacgacgacgaaggtaatgaggagtgatcgtgatcgctgagtgatcgttcatgtttgattacttatcccaatcatgatgcatgatgtttttatactcaataatgcaacttgcaagcagtagcagtagcaggcgggtgtatgtcctcagttgttgagtttagtgatacacctgtcccccttgcaactctgtctgaacagtgcagccaacccgataccgaatatgattgaaatgattgatgaccccgtcttggtatcgaatgctttggtaatcatgacatttcgtacgatacgaggcgaggcgatgagggacgagaatccgccaccgcatccgtgcactgaatattaatgaatggccccgacaatgaattctacagagagagattcgagtttgtatggctgtaataatctgtatggattttgcgttgtttacactcgtttttcgaggcgcacatggaacacttgtcgtagattcgttcgccatcctgttcggttgaacctgggtaggacgactcctgcatgttggggagggggattccgtattgtttgcaaagatcctcattgagacgcctgtcattatcgttcagggaattccattgctcgatagtcatgcttgacagatcgtacctcagtagcttctcaagcgcttctgcgcgctcagtctcaagctcaatctccatactattcactcgagcagcatctgccttctttcgaacgcgctcagtctcaagctcaatcttcagtcgagcattctcaagctcaatctccatactattcactcgagcattctcaagctcaatctccatactattcactcgagcagcatctgccttctttcgaacgcgctcagtctcaagctcaatcttcagtcgagccatgtaaataatagcgaaggtagagatgcagataagtagttgagaattgtcaatcattgtttataaattctgatgattgtttcttaagtcgtgtgttacgcaatctcaatctctgggccatgtactgtagtgtaccaccactccggcaaaagacatacaaagtgataaattaaaacaatgtcaacacaagttacagtcagaccggtcaataatgttacagtatattgaataaattccaattctctatgtacaacttggacagacggtcgattgttgtacacaatgccggaggctcacatcaatccctattttaaacgtgttcacatgaacacatctgaaaagactctccatctctgtatcctggggtagaaatcgaaccctgtctgatgagaatgataccatgtttatttttcacaagtaatgggcgttcctgcctcccggccgattttgactggttgcgaaacatggtatggagcggatttgtgattccttggtgcttatgtctcaaggtagcgagtcgttcaataccaatgggtggtattacaactatagtctaatttgtatttgtcttggccacttggaccaagaggctctaaatcctgattagaaatttaaaaaaatcctcaacgttgcccaaaagcaacgatctgcagtctggatgattataaggtgtgtcccactttatttgagaactactgtaaggctccaccgacacctgtatgttagtcgaatgccggccttcattccatttcccccgatccagcagttcagaaacgtcctgaaagagttgccatacatcttcggaatattgtgtataaacattgtgtatgaatgaataccaggcattaatgatgctattagcgggtaagcggccacacctattggtgtcctaccaggtatgcttgagctgcgacaaatttctccgaagggaaagcaatggggagtcatatctacaatacgaactgcctagagagggtgatgtggtgcgcaacatcacattggctggcatggggatccaacatataaagtgggtgcggatcaatataggagatgttgatgcatggacatggaaagctagcttgtcagttgtaggaaaaatccgaccgataacaattcctatagcaatcaatatgatggcgattggaaaccacacttgtgcactacagatttgtatgcatcaaaccacagacgtgttgtggatgcaactacagtatgaactgtacaatgacgaggaacggtaccacctggctacactcgacggaatactaaaatgaaaccgcttttgggagtgtacggtacaccttgcggtgtaacctaatgttgtcgcgaccaccggagggggaccgagtggtgtctacaacaatacgagtttttattcatcaacaacaacagagctgctgtgggcaaatggaagaggtcgtcctagacccatcaattccatgcagtgcagccttgcgattgtgagagcagaagagcgatcccggtccgagtaaatgcatgtttctggagagaatcgcagtcctcgtacctctgggtaccgctcgatcgatttttgagaatcgacaagggaagtggcgaagccacccctcctgtgcttctcttgtgcgcctttacgtttattgtacaaccttacccctaagtggtcgcaatcagcgacctttggcatcgttttcgatttcgtgtgaccaaaacgttcaccacccaacctaagcttcacgtatgctgaacaaacacttgggatcttgtaaacacgttctttttctttacccgtctcccaagacataagagtcgttttgaactcatctgtcacagaaacgtcctctttgaaaattcttttacacgatgcgaacatggccccagtgggaactgcaacttctcccggtccagtaggcttcagtttcgtgatggcagatccgtaggccacgcaaaccttcatatcaggaagttctttcatcatgcaccgcttgatacccgcccagaaagagtcttttacctttcgttttccgatgtaacgctgcaagttgtcacgggattctcggcgtcgcaaagccaatctccaccactcgtcagaaaacttagcgtaatttgacaagtacgcggagatcttatccgtcctcgatgtactcaaagctgctccattttcacgcagagactcccacataggaatcatgtcagcaaaacgcagttccttctgccttgtctgcttcttgatacccgaattgtggtaaaatgcaccacgtgtcagcttccatgtcttatttttatcgtctgccaaatacgttaccgtagcgatgttgctccgtcctgggtccacacccaggacgacgatacccatatcgggcaatatcgttttaagtgagccgtcgtatttttctgcgatcttgataccttcttctttacgagggttcttacaggtcttcttcagatctgagacaaggacctgtactgtcttgctgtactgcatgctcaaggagactccgtcagtacagatgctgcagtcgaaaacccacccattcttgacaggtggtttcttgaagaaggaacctgcgactgtttttcgggcgttcacaagcgtgtcatacaaaccctttgcatgtatgtactcgtcagtagccttgatatccttaacatcatcatcgtactgcttcatgaccgacttgtatgcatcccattcaccaggaccacatgattttttcttcttctgtgctggcctctgggacaacatgaagctgtcgggattctttacatgttcccacttggaaagctcaacgatgttctggtcattggggaacatgtgcctgaacaggtttacgagggtcttcaggtcaaggcgaacatgcacccgttggacattgaagatgggcatcaatcggatacgacgtgcatccatatcctccaaccgtgtctgtatccaataattaaaccggaccatggtcggaaagtccatgtctttgccatagttatcataaactcgacttccatctggaacactcagcatctccctaacttcattgacgaactcttgaacagactctggccatccctccatgttttggacttcttgctgaatagcctgcatcacgtcgtatccccgaatgatcttcgatgtgtccagcgtcttcggggcatttaatttatttaaagtggtggaagtgagtctggccagacgtggtatcaaaggaacccatgcgttgtttgacacgacagtgctcaatgtgtgacctgcatagttcaatacctgatcgaaatagatcggataagacttgatgtagtcagcgtcgtcattaccaattacatcgccgatggagtccttcacagcttcgtacgatatcttgctttcctcatcagggaagattccgtctaccccgatacggagccaatccttccagtaggtatctttcatgttgtacaggtctggaatatccagacctttctctaatagactcgtgatgtggaaagtcagcacaagactggaccgccgtaacatgcggctcaccacattgacgagctggtccacatgctccctaaacttaccgaattcttcatcgtcaagactcattgccttcttcagggcgcatttcacgacacacatcttttccaccgtcttgtattctggagggggtctggcgatgagaccattgtcttcgcataaacggacaatatcgtccttcttgtcctttgatgagtatgctacttcggccaattttagtagctccttcaatttcgcgactgtcggaggtttcgttgccatcttacataatttatacatcacagaactctttatacaaacatcacatacgtgttccatacgtggtcaaaacaacccataatgattttatcagtgaggttgctaaatgctaaggaaatcatatcagacacgtgcgtctttgtatcgtttggtatatagttcaatcgacgaaagtccttcttcaccttagcgaagcacagctcaatagcattgaattctggactgtaaggaggagtgtaacaaatatttacggggcttctgaggaccaagttcttatggatactggcgttgtccattattactactgaattattgcacaaactcaaagagtcaataaatgcagcgaagtccgtcttcttcacagatcctttcttcacaacgaactccttcctaccatctgaaaaaactgccatcaacaaactatggtgtacccacccaccagtagttttaacgataacaggttttcctacaggggaatacccataatgtggcttgagacgctcactaaaaccacattcgtcaactgatactaaaattttccagcattgattgtatccttgtatctactacaaaattcagtgacaagtggaactaagtcccctttacactgtccacggagtttgctcctttttcttgtaaaaccaatgagttttatgaaacgatacactgttttagttgataatcttaaattgtgagtacttttggaaaatgcaacaacacctcttgcggttgtgcattgagttgacaataaaaaaaaattcaacaactcttttgttcgtctcaaaaagtttgcttacaaattcacgtcgttttcgatttacaccaaagcgtttccatctccacagagtagaacgactgatgttcgtaaacacagaagtttttaacacacccaagtcagcgaccattcttaacgccaattttctatcggcgatgtcgtacatttatttccatctgatatatgtttcattttactgttccgccgactgtagaagtcgatggtacgagacggtaaaagttcgtacgaagaatgataccgtagtggcgaatgtgggtcacttggtggcagacaaatcaccagctccaacatagatgttcttgtatccattctggataacataccatccaatctagcagatgtaagtgcattcactacatccatcatgctcacgtctacagtcggcggaacagtaaacgtgttcacatgaacacctatgaaaagactctccatctctggaacaacaattatttcaacaaaaaataagaatcatcaatcaatccctattttctggaagaggctgtgcctctgcctcgttccttgggtgggtctctgacatacaaaggggcatgtgtaggggatacctcagttacatctgctggcattgtattgtcccagtcgagcgggttcaacacttcaaacatttgatgatcggtaaaagacattgattgataaaggaagtgcatttgcgcgttcactgtgccacataatttcccccacatacatggaaagcgattgcttgcctttcttttcctcgcaggatgatggtcaacaacatgtacccaacccttattatagcggttgcaacaaacattgctcttttcatatacctccaccgtcgtgacgaggcctatcgtgacgaggcctatcgtgctaaggccccgtgctgacaatgaagctactgcccgtcgtgaggctgaggcccgtgctgacaatgaaatatactgcccgtcgtgaggctgaggcccgtgctgacatgcatactgccgtcgtgaggctgaggcccgtgctgacaatgaatctactgcccgtcgtgaggctgaggacccgtgctggacaattgaagctactgcccgttgtgcggaagctactgcccgtcgtgaggctgaggcccgtgctgcggaggctaaggccaagtctcaggcaagagttgttgtcgttatcgcctgatgacgtcgctgctatgactcctgaacacgctgcggagtatatgacggcgtgtgcctcggttggggtatcagcatttcatttggatcagccggtattgtgataatgctttttttaaatacatacatgtcacacaatcacccacccccgcagcacatctcctcgcagggtttgtcaaggcagcactgaatcctcggaggagccctgtgggttactgaatgtgagagggggtgtgggattgctttttaatgggcgttcctgcctcccggccgatttttttaaaaattctaatcaggatttagagcctcctgaacgactcgctagcttgagacatcagcacgaaggaatcacaaatccgctccataccatgtttcgcaaccagtcaaaatcggccgggaggcaggaacgcccattttgtcacgtttttcagcaaggaactgatggggggacgtggaggttgcaaaacgatttgaggagcggcacctccaagatgaagagtccagatagatacatccgcttcttggcactgtttattgcattatgtgctcttgtgtcgggattgtttcagaacgcaacatctcttactggatgggcaacattgggtatttcattgattggttttgccacaagcacttcttgagaagcttccgatatcagaggaagacacaactctacaacaacctttctcgcatacatgaatgatttggacttcataaccaataattttgagaactttccattccagcaaaaccatgtcacagttaagtcattggtgatggcatctattaggctcaggcttcggacgggtttcgtgttttttttccatcaacacacgtaattctcgttcatattcttcttggaacattttgaccttcaatatcaaggaagatattcctttatattccaactcgggatcatgtctccaccaagaccagcaggaatgatgatgtcaccattaggaatgttatttcagtgatcagcaagaagtgccgccgtgtgagaatggacaaggatgatgctgactgtgtaataatgtaattcgtcactgttttcggcatgacaactctcagattggttcagaatgggagcgcgggcagattggatgtattggattcatttgatgactcgcttgaatttattcaatatactgtaacattattgaccggtctgactgaaacgcttgggactttcactgaaacgcttgggagggggga

SEQ ID NO: 161 - DNA, 13594 bp, unidentified
  misc_feature 1..13594: note = Fanzor polypeptide
  source 1..13594: mol_type = other DNA
ctccgagaaaagctcagctatgatgatcgaaaacggggtcaacgtatttcacgcaaaggccccaaactcatgcactggaagatggtctgttgccttgcaaaacaactggaaaggtgagatacccgcggtactgttcatctgtagcccacatacacacacaggacagggttctgcaacttgagcttttgcgcttatgcacaatcgccacaataaacggagctgttctgcgtggcggcttggagcttcggccgagtggctggctcaagagtttgtctgcagtgagaacgagagagaaatgtagaggagatgaaggtgctccgaggttttcgggatcccgagttttggagttttggatcgcccggtgctacactgctttcgtccggaccggtaagaaggacatcaaggccatctgcgaggagcacccgggctggaatcgacggacggtcgcgcattactacgccatgtacgaaaatggagagagtttgcagcccaggtgtggcattgtggcaccggtcgagcattctgaaggcgcgtgcagaaggctgcaccattcgcatgatcgtcgacgagcgaagcgcgctccaaaagaaaaaaaacatgacttgggtacgcaagtgcggggatcccggtcaagactggacgcgtggccagcttcatggtccacaacaagtggaccatcgtcaacggcgagttcattttacaaggcacgggcaactacagcgcggttgcgttcgatggagcccgccacgcagagacctttgagacgcgcacgggtcaggcgcaccttgattcgatcaagcgcgagttcgagcagctctgggaagaaggacgggtgcttcaatgggcctcgaggcgtactgcttgcttcatgtacttgggggaggacgaggatgaaacgaaaatgtacccccccccggggagagcaggacgaggacgaggacgtttatgtgtaggatatggttgaacgtgcaagccagtaagtaactttgttggtgcccactttgacttgggcttacattggccgtgcaggagtgccatcgtagttacaatagagctcgaggatcatgatgagtcctctcagtccttaccagccaaaaaaggcaaactgcacctagcgcattgagctggcaacggcagccccatcgacggcggctccagctacaacgggatctccgtcacttgactcgtcccttcagtccactgttgcttcttcgtcgctcgacaatttgatcgcgtctgctggatcgggttcgttcattgatccgagttcagtagtggtaaacggcgagctgctaccagcgagatcaagtcgacgtaccgcaactgggtggggcctcgcgccgtctcccccgacgccgcgtgctaccgtgaagcactcatcatggacgcatgcccgccaacttcgaccagaacgaggttaccaacacgtgctgggccgagtgcccgatcgcctacccggtcgagtgcggcatggaatgcatccgtcagaacgatgactgtgctatggaggtgcttaacaaggtcggtgctgttgctagcacgtctagtcatcgctaccgttggtgcgtctcagaaactgtggcagctttcaaagggtgcgacgcgcgcattcgactgcgctaacatgatgatcggtacgatgagatccatcatccgttacgtgcgtaacatcaagaccacggacccgcaggcctcgacggacaagattctcaacatcctgtaccagtcgaacaacatcgtgacggacctgccgatggccatttacatttgcatgggctgggacttgccgaggcctctcgatgtctcgggtcgtgtgcttacgacgatgaactggatcttgctaaacgccatcgggtacaaggacgacctcgtgtctagctggagcaagttcaaggctttcttgatcggcgccaacttcacggaggccgccaacaagatcaacgagacggagatcaggacgctgagtgacgccctgaaggccaactccacctgcggctacgacttgcgagtgatgacggaccgcacgtgacgaggaaacgcagcataatgcgggtcaagatgagaacgtgatacttgccctcatgctgtccacatcgtgcacacggacggatgctgagtctgtcggtgttgatgcactttcagtcgtcgaccgtaatcgcttccagtttttgagggacgcgaacatttttcttgagtcagggaagaagctggtgttttacctggtgcgtcttcgttatcgagctccgattctccggcagaacgaccagtcggaagtgaaacaattgatgcagagcatgatctggtattcgatcaccggcgcgaagatcgacggtggcaagttgcacgatgccgagtggaccaagaagctggatttcttgaatcctgccaacgaaacactgtcgcagctgtgggaaagtggagagagaagcaccagctcggagcacgaacgttttgcacttattggctggcctgcttccgccgacataatgaacgcagtcgcattgtttggaaaagtgtcctgtgtgcctgtaattcttgcacagtgctacaacgctccgaatgcttctcagcgccgaacttgatgaaaatggatgccatttcgctcaaactctcaaaatcttcgagaagagcaatgcatctgttgagtttgtacccctttgccgggagctaggtgctgccatcgttgacttgggtgacactacactgatccaggcgtttttcaagaagtatgttgcccagctgaaagacaaggacagacagttatttctccaatggcttccagctctcgtgcgcgcatttggatgggcatacgttagtgctgccacactgaatgccatcgacgtgcaatcaactgaaattcgctcggatcgagctttggaactcgcaaacacactccatgacaacgatgctgcacttctagctctcgtagagtttgcgctgaagaaagctcacgcacggtgctctggccacgccgatgcattcgtatcttcgggtaagatcatcacacttttaaagcttgcgctggcgtgtggaaaccctcaaatatttgccggtctatcaaccatactgaacaagatcgatggcaatcttctccacacagtgattaatgcgctctcgaaatacgtcaatgactcgagtttacctgaacaacgtgctacgctggcctcacttgcagcgagacgtcgtgaatggctattcgctgagatcgaagacacgaagcaaccactggacttgacgaagcgcgagatctaggcaatgctagccgacaacacaatcggctccgcgaagtacttttcaatcgtcgctgactttttgaaggtgtcaccgatgagcacgagattcctggggttaaggctctacctagtggacacatcgttcgagttcaagtcggtactcttggggactcgccatttcgcgcctcagtatgggggaccagatggcggaatacgcggaccactttaccggtggattggtgacgtcctggggggggggggggggggggctttggtttgagtcgccataaccttttcggggctacaacagtgatgtcaaatggatgatgagggacggtctaaagttgtagcgggagtagtgcgtgccgcacttcatgcatgcggcaaccaatactgttttcggcatcgtcggtgacaacagctcgtccaagaacccagccatgaccgacatccttcggcgcatcatcaaaacgatgtacaaaacgcagcacgtcgaaggaaagggcactctattaagcgagttatgcagcgttatgaacccggagggtgtgcatccacgctagctcttaaacttccgcacgcatcgattcctgggactcacgcgcgtcgtccgacgcattcttctactctgggatccattggtgcaatggtacgaggagcgggccacaaaagcccgacgtgagaacgtgatgccgccggagtccttcccactagctcgggaaaagatggaatgctctcactgctggagccgatctcgaaactaaatcagattggacaggccgagtcggggggaccaatgcaacgtgcttcttggactctacaagctccgaatatccttgttggacatcaccacagccttgaaggactgaagacggagaatcggttcttccgaccggatgagctgtacgatctcgcatcgacaacccgttcgctacttcacaaagggtttcgtcgggttttcttccggcggtacaccgatcgtgataccatgaacgtctgctcctttgcctttgagatgcaactatttcttcaccccaacttcaagcatccatatggagcgctgataaaggtgttaccaaggtcaatatacaggcaggtgcctcccagcaggtagctgaccgacactacacgaagattcgacgcattatcattgacagcgtccgcagcatcatgacagcggctgacgccgagccgacgtcgactgatatcgttgccccaccgccagctactgggttatcagaggacttcgtggagctcttcacggagacagcgaacgaggtggcaccaccacatagactgcggtgcacgagcaacgcatcgacgatgagctcgaccgctggctgacaacgcctacttcgcttcaagcgattcaacccggtgcgtttgactcagttctgagcttctggaagcgccagcaagagctgggcaacttcctgcttcttcccttggttgcgcgcgtgctgttctcaatgccctcatcatcggcccaaattgaacgcgactttgggatggcaggcaggatggtgacccccaccgcagctcgatggcgccttacaacgtggacatggccacatttctgagctgcagcagaacttacgtgggtatcacccagtacccaaagttgtcgtcgagcacagcaaaggatcaagtaccgtcaaacgccatggtgagcatggagcgagagttggacgacgagttcggatcgttgatgaacaaaggcatcgagttgggactctccgacgacgaaaacgacggtattaccgaaatgtagcgggagcgggctggggcggacgaaaacgtgagagaacgggagcacgtgtggaagtggaaacgggctatagctgccgtggtagagttctagccatgcatgtgcacgaaatgagtgtctttacttttcatcaacacgttctgaccgtgtttggtgttagcttcgctatgcagcatatgtaaatagtatttcgctttcaccttgctttcgtgctggtcgtttgattactagcaactctgtaacacgcattgcagcgcgtacacggatcgcctcctgtgtttcaagctagattcgctcgatttgagatcgatctcgcagtattcgcgaccgtgggcacacaggcgggttgctggaccgggtggaagctgctgaaacccgcgtagttggtgtcctggctgccgctgcttcttttctgcggtttgctccagcggctcgtgataatgcggtggtggagcctcgcgtgcttgcagttgcttctgtagggcccatcgctgcacctgttgaggaagttggcgtcggcgcgaacgttgggacgatggccgtggacttgtctcgacttgatacagatattcacatcggtgttcttgaggacatcactgtattatgctggtcctgtggtacgaactcagagtgccatcagttcacggggttttgtctcggcagtcttcttggccaccacgatggctgggcgaaaccgttcgcctgggtggttgttagccctctcttgctcctgatcctgacgcatgcgaatcgcgatgtcgtgttgatctagcccgccgttgatcagctctactacgcgaacctctgtacgagcggttgttgcctcttgcactacttcaaatttgcaaatgtcgtggcgctcttacgcagcacgcttgtgctcctcctctaccaggttgtgttgcttgaccctggaagactgcaatgtgacttgcaaaacgcctggtgaggagatcaaaagagatcatctttgaccaataaaacgagatcttgtttgccaataaaaaaagcaatttgcagagcgaaccaagttctcgccctagctcggttcgaatgaaaagtaagcgaaccaagccccccccccccccccccccccctccggttcaggtaaaaaagaaaagaagggtgaaaccgtggttccagttcagttcgtcccaggggtgggaaattcacgaagtgtaggaaagtgtaatagacttgcgaggagagctgctggtctttctactcagtccacaaatggaaagttctgtccgtgcagctctctcaagtctaacctaaagctctacactgccagtcatactgtacaccactcgtacaattgcctctctcacattgatggtcgcacgctcttcaattgttttcgtgaacccagcagccgcagtcaacggcaattcgaagatgtcgttgggtacgccccgaggcttcactgctccagcaagttctcacttttcctttcgcaccgtcaagcgcagtcactgtctccaacctccatcgcctgttagtagcgttgtatcaagccctatgtcggggaagggtgcgccaggaaagcgcaagcgcaagtgacacccatttgatgacgggaagagcgatagaaatggcactgaaggtgcatgcccgaactcggagggcgatgatgacctcgatgaggatgacgtagattatgaggacgcccaaccagtaacgacacgtccaagcaagaggcctgacgtcgcggagtgcatgaagggcaacaagaataccagcctcgtatatgtgaagatgtcactaggttccttcttgacaggcgaggagaaactgttgctgtcattcgatggcattctcgtagacttgagcattggattgttaaatgcctacgcgctgctgaacatccacatgatacggtgtgtgacaaaggacttcccattcctcgatttgagcagaacttcgtttgccaatgcttgacagacgtaatgtttaacgacagcaacgtgcacatagacgctgaactacatatatcgttggagctatacaatttgttgagaggctctaacgcttctcacgggcgtcgcgctggtatcaagaacgggtggcaacaggcgcagctcgggagatgatgaccgctatccagcatgcactcaaaaatgagtttccttcgccggtttaataaggtgctgcgggtatggtgtagacagaagcactggtagcacacattattgccccagagttcgagcggactccacccgacattcctgatcgtcagcgcctcgacaacgtagtcaacgagtggcgtggagaagtccctcagcgtcggagtgagctggtcaacttcacggcccaccgactggtgcttctgacttatcgactcctgcaaatgattgaggagcgtaacgacagagttgagcaaagcgtttgcgctgtttaagtgacaggggcgtctgattttgaagttagactaatccaagctgaagttatgaagacgttcactgttctaccaacaaagcttggatttggaattagtcacctcacgatagatttgattagtttccgggaactattagtccgcaacgacattgctgttcctccgtacagatcgaagtggaatgaggtgagatacatttattggagacggttcttccgtattgacaaagtggagactatagagtttggtcatcgcagattcacacgagagatctcggcggacggcaagtcggtgaacatcaagattcggaagcccgaacgtgggccttccgagcccaatgcaaatgacctccaagctgccgacattggctctagatgggggttggatgcgagtaaatgcaacctattggtcaccacaaaccaggacgacgaaacggttgtgtgctctggcaaagagtatcgcgaagacgcttacattacgaagagcagccagaagcatttgagatggatacgggatcgtccgggcactggagctgcttttgcgagcatgccgacgaagaggagcatgttgctaaagcggtggcgggagtacgtcccatttatgacgcagcacctgcatctgctagtgacccccgtgcagcacaaatcgtaccgtcgccatcgacttcgaaggagcttctttaaaaagaagaagctatgtgagctctaccagaaacttgtatgtcacggagagcgaatttttatcgtcattgacaaccggagtaacggcgatccaaatggagcgatcaaagggaagccatcggcactcgtgcagaaattggcgctggagttgtcaaagacgtcgaactgtacggtcatcattattgccgagttccggatcagcaaagtgcactttggttaccaacaagaactgtccaagcaatacccgtatcgaaaggccgctgtccacgtacgcgcagtccacgaaagacgagccacgtacccagtttacggcttactccatttcagaaacaaaggttgttctggtatgagtgtgaacagggacgtgaatgcttcgaagaatatgctgcgcctgctcgattgtgaactcaacgagactcgcccagtcacctacacgcatcaagcaaacagatagataacaatacatttctagtgtcgctgtgtgcctatctaggggtgaggaagattacattgtgatagccggctcagaaattagcccttttggaatctgtaggctacgtacctataggacacccttaggagaataatgggttaaagaaaggctcaatgaagcctggttgatttctgcatgaaatatttttcaaaacggtgatgtcctcctgtggatgaatatacttgtctttccgacagatagctcagcacgattgttgtctgctcgctttgcaggccattttgaccaattttaacacgtaaagccttaattgtgtccaattaaaatggttaaatgtaggtttgacattctgacaccttccgacaaatatgtgtctgaagtatttccaaaatatcaatatcttcatgcaaacaacaactgtaaaacgtatttttcaaatataccagccattcgtacaatgaggagtggccctaatgtaggaacactgaagaagatgaggtcgttggttgggtgtccaccgttggtgtccactttaccagaagagtaacgtagccatggatcgtgcgtgatgcgtgggacataagcaaaataaacaaaggctgtgcttatgtcttcaatatgccacgggaagaccgcaaggtagcctgagtgctgtgcagctggaataaagagatcgcgcctcacgttgtggacgtcgcgacgctggaccatccgacgcgggagcggcttgaacgcttgcaggagctcctgtttagcacatgcacaggacgcaaggaacaccggttcaacgtgagtagaaaagtgcttagcgcttacctggtacggtactactcgcagcttaaagcgctagttcctgcagtgccgatcatcatcctgcttagtatctgcgggcatatcgtcaactgcattgcttgagtggtctgtagctggcggctccacctgctcaagaccaagaacaaactcaagacaaggcgcacacgttgccgagaagatggccaccttttggctgtgagtgatgggcttatcgcctcgaacaaggtcatggctgcatcgtcgaggcggtactactaaataataagggtccacacgcaacaacggaagaaggacaactgcaagagccatcagatcaagaaccaaatcccaagcacagaaaaaagctgcgaacctgtcggccacatggcttgcgtggtacaagaggataccacgcgtgtgggactcaaccgatagaagtcggagtgtcgccacgtggtcgcctccatgaagctctccctcgacgatagcttcgttatgaatgtcacagcggaagaattcaaaaaccaagtcctcaacaccagccgcgcggaaattggactgctggagtttctaaagctagcggcgtcaacgaagggagccgggagtatcctgcgtgcgctgcacccgctgcatatgtccggtatattggacgagcaaatcatggtctacaggcaccaactcgtcataggaagcaccgaagaccctgcacatatcgacgcgcaagacatgctcggcattgtaggtcatgtgtgagaacggtgaagttaattcattccaatatatgtattcattcgacataacatcgctgcttaacaagacaacatattcatgtgtacacatccacgcgcgcaggtcacctaatcaaagcgtaggctgcacaccgcacgatcgcaccgcgctcactcacccaccacatgcacagatcctcagcaatactgcacggttcaaagcactgatcccgacccaatcttgatcataaataccggccaaaacgtggctgttgacgaagctagtattgcgtgtcgttcgcaatacgctcgccatattatagttttctatccccaaaaccagacagggaaatatcacttcaagctgtatgcttgttgctgctcgacatcatggtatgtcgtgagtttcaaattgcactgtgcaagtgaacaaatagaccgtttggacggcgtggttccaagtccagaggtattacagcttgttgatctgacagcgaagtcctttgaaatttgttcccacgtaattgcagttgtggagtctttgaaaggatctaatcgcgttgtcaataccgataatatctacacctcctgcctgctactagaatcactaaggtcgattggcatgtatggtcgtggtacagtgcgcacatccagcaaacacttcccccacttcacaatgatccgaaaagctgatggaaagcctagaggctacatgaaacaaggcgtgtgcttagagaaacatatcgtagcggccagttggatagatggctctattgtgaaagtagtctctaatgctgacgcctcctcttcctctacggtatatcgtcgcataaaggaggaacgtgttgcgtttaaagccccgacctgcatcggtgaatacaacgcggggatgcagggagtcaaccgtcatgatcagcttcgcggtcggatttcgcttgccgatggtcactcatttcagaagtggcataaaaaattagcaatggctatgattgatatcacgagatgtaatgcgtatgtatgcgataacttggcacgtgatacaagcgagatggatgttgcacagcctcgcaataatgcaagggcaagcgcccgtgacgatcaccgggcgtttgtcattccacttgtgcgagaattattcaatggagattggaagaagtgcattgacagtgatgacgtaattgtgtacacttcgaacacaaaacccatgaccactgctgccaatttgaccagaaatacgaatgagttagaaacgccagcacatacatgtgtagcaaaagagtcgtagcttgtgttacaaggaaggagtcgggcaatgcacaaatggactgtatgtaagttcgagggcagggatgacacccagaaaacggattattgcgagacgcatcgagttgcactctgcaagcgtacctatcctactgaccacagaaaaccgcacttgtgtcagcagcaaaattggacgtgctggcaaaagtatcatttgttctacttgccaaaacaggtctatacagttgacggaaatctgagaaggtcgtctccaatttgtaaagcccagtgttcgttcttgaaggagcgtcgagaccaagataatactgaagagatcagcaaccacgactagcattcggctcatatatggtactgaaggtaaaagtaggcactcaatacattgtgtgcacttgaactacgactgaaaaccagccagttacttgtactcacagcatcctccctccttgtacattgaccagtgcaatgtgcgccgctttggtgcctttcgtctaattatagagctcatgcatggtgctgcatgttaccctcagcaccaatgtctcgatgctccctctctaggcggctccagaacctcgatgtcacgtagaattctgtcgccgggcccgtgatgtcgagatcgccttgcggtgaacccgaggcgttccacgagctgtcgctgtcgctagttcgcccctgcaacgggcgccgtctgaaattctgtgtccttgctgcctttcgccttgtagggttgcgccatcatctcgttctgtcggtgtctagcgtatggctgctgcatcgggcgccgttgtgccgcacatgtgcatgatgtagcacaataatgtcgggataggcgccaagcgttacgttcttgttggtgtcggcgcgagtaacttgagagacacaatagcatgggcgcgccgtgtctgatcaggatttagatcccacgttgtgattggcagtcaacgctgacattttcctagagaggcgcaaaaattgttgatcaaaagtcggtgccgtatcttaacttcactataggctagattagtctgctaccttcttttggaaaaatatcttcatgtatcattctggtatcgatagggttaaaccactagtgctacgcgaaggctggaataggatacagataatccgatctacactagtgacaataaagaaacgtaagtacgactctgttgcaagcccacagcattcatctagagaacgggtgtagctctaaagtcatcgaagttcttggcgtcgaagtaagctttattgccttcgaactccgtgacacggcacgcttgcagagccactgttttgtattggtgcctcgtggctacagcgtcaacaaatccccccccccggagtgtgcagcacacctcgcttttggtgctatcaatcatcaaacaactgatctaatcgttctctggtctgtcgaccatcatcgccattgagtacctcatcgccaaatgcaaaacccttcgggtcggcaacacagcaatagtaatagaccaacgcgataggagggtgtcttgtaccagtgttgagcctttcccataaatcgaacctcctcatccgtaaaattaacacaggacagagcgcgaccttcaagctctccaagtctatcctgaataccccgttgtttttgcgcgcggcgggcgcgggccttgccgttcgctctcgaggtgctgctcccgttcctgcaaactttcattggctctttgggtacggcgcttcttgctgcggtcttcagtgtcggccattgccttcccacgttgttattggtcgtcagccctctacaaaacaaactgttggataaagcctaaatcatacggcgccatgctcccccgactacaccaatttgaatgcgctcccattagtatagtcactacaaattatccatacaatcatgtagcaaaatccccatctatgctgcccgagtgtccagtacccaaatcgattcaccggtaaaactatcccgtcgcattgagatttttgaggcattttgctcgatggttcgcgaaagggttaacacgctgatggcgcatttcttgaagcctgtcggcggcagtaccgacagcacaaactgcgtgtcgtggtcggtccaacggcactggcgaattccagttcaacgtgcttcgtgtcggcccactgcttcgtgcagctcggacagtgcgtgtgttgctgatgtccttgcagcatatgtgactcgcaatccgttcctcatcaacaagctcatcaacatggcttgtgcacattgcagggcagagccgccgtctttccc

SEQ ID NO: 162 - DNA, 9732 bp, unidentified
  variation 2514..2783: note = n is any nucleotide
  misc_feature 1..9732: note = Fanzor polypeptide
  source 1..9732: mol_type = other DNA
caacaagatcaacgagacggagatcgggacgctgagtgacgccctgaaggccaactccacctgcggctacgacttgcgagtgatgacggaccgcacgtgacgaggaaccgcagcataatgcgggtcaagatgagaacgtgatacttgccctcatgttgtccacatcgtgcacacggacggatgctgagtctgtcggtgttgatgcactttcagtcgtcgaccgtaatcgcttccagtttttgagggacgcgaacatttttcttgagtcagggaagaagctggtgttttacctggtgcgtcttcgttatcgagctccgattctccggcagaacgaccagtcggaagtgaaacaattgatgcagagcatgatctggtattcgatcaccggcgcgaagatcgacggtggcaagttgcacgatgccgagtggaccaagaagctggatttcttgaatcctgccaacgaaacactgtcgcagctgtgggaaagtggagagagaagcaccagctcggggcacgaacgttttgcacttattggctggcctgcttccgccgacataatgaacgcagtcgcattgtttggagaagtgtcctgtgtgcctgtaattcttgcacagtgctacaacgctccgaatgcttctcagcgccgaacttgatgaaaatggatgccatttcgctcaaactctcaaaatcttcgagaagagcaatgcatctgttgagtttgtacccctttgccgggagctaggtgctgccatcgttgacttgggtgacactacactgatccaggcgtttttcaagaagtatgttgcccagctgaaagacaaggacagacagttatttctccaatggcttccagctctcgtgcgcgcatttggatgggcatacgttagtgctgccacactgaatgccatcgacgtgcaatcaactgaaattcgctcggatcgagctttggagctcgcaaacacactccatgacaacgatgctgcacttctagctctcgtagagtttgcgctgaagaaagctcacgcacggtgctctggccacgccgatgcattcgtatcttcgggtaagatcatcacacttttaaagcttgcgctggcgtgtggaaaccctcaaatatttgccggtctatcaaccatactgaacaagatcgatggcaatcttctccacacagtgattaatgcgctctcgaaatacgtcaatgactcgagtttacctgaacagcgtgctacgctggcctcacttgcagcgagacgtcgtgaatggctattcgctgagatcgaagacacgaagcaaccactggacttgacgaagcgcgagatctaggcaatgctagccgacaacacaatcggctccgcgaagtacttttcaatcgtcgctgactttttgaaggtgtcatcgatgagcacgagattcctggggttaaggctctacctagtggacacatcgttcgagttcaagtcggtactcttggggactcgccatttcgcgcctcagtatgggggaccagatggcggaatacgcggaccactttaccggtggattggtgacgtcctggggggggggctttggtttgagtcgccataaccttttcggggctacaagcgacggaggcagtgatgtcaaatggatgatgagggacggtctaaagttgtagcgggagtggtgcgtgccgcacttcatgcatgcggcaaccaatactgttttcggcatcgtcggtgacaacagctcgtccaagaacccagccatgaccgacatccttcgacgcatcaccaaaacgatgtacaaaacgcagcacgtcgaaggaaagggcactctattaagcgagttatgcagcgttatgaacccggagggtgtgcatccacgctagctcttaaacttccgcacgcatcgattcctgggactcacgcgcgtcgtccgacgcattcttctactctgggatccattggtgcaatggtacgaggagcgggccacaaaagcccgacgtgagaacgtgatgccgccggagtccttcccactagctcgggaaaagatggaactcattcaggtgctctcactggtggagccgatctcgaaactaaatcagattggacaggccgagtcggggggaccaatgcaacgtgcttcttggactctacaagctccgaatatccttgttggacatcaccacagccttgaaggactgaagacggagaatcggttcttccgaccggatgagctgtacgatctcgcatcgacaacccgttcgctacttcacaaagggtttcgtcgggttttcttccggcggtacaccgatcgtgataccatgaacgtctgctcctttgcctttgagatgcaactatttcttcaccccaacttcaagcatccatatggagcgctgacaactatttcttcaccccaacttcaagcatccatatggagcgctgataaaggtgttaccaaggtcaatatacaggcaggtaggtagctgaccgacactacacgaagattcgacgcattatcattgacagcgtccgnnnnnnnnnnnnnnnnnnnnnnnnnnnnnnnnnnnnnnnnnnnnnnnnnnnnnnnnnnnnnnnnnnnnnnnnnnnnnnnnnnnnnnnnnnnnnnnnnnnnnnnnnnnnnnnnnnnnnnnnnnnnnnnnnnnnnnnnnnnnnnnnnnnnnnnnnnnnnnnnnnnnnnnnnnnnnnnnnnnnnnnnnnnnnnnnnnnnnnnnnnnnnnnnnnnnnnnnnnnnnnnnnnnnnnnnnnnnnnnnnnnnnnnnnnnnnnnnnnnnnnnnnnnnnnctgcttcttcccttggttgcgcgcgtgctgttctcaatgccctcatcatcggcccaaattgaacgcgactttgggatggcaggcaggatggtgacccccaccgcagctcgatggcgccttacaacgtggacatggccacatttctgagctgcagcagaacttacgtgggtatcacccagtacccaaagttgtcgtcgagcacagcaaaggatcaagtaccgtcaaacgccatggtgagcatggagcgagagttggacgacgagttcggatcgttgatgaacaaaggcatcgagttgggactctccgacgacgaaaacgacggtattaccgaaatgtagcgggagcgggctggggcggacgaaaacgtgagagaacgggagcacgtgtggaagtggaaacgggctatagctgccgtggtagagttctagccatgcatgtgcacgaaatgagtgtctttacttttcatcaacacgttctgaccgttgttggtgttagcttcgctatgcagcttatgtaaatagtattttgttttcacctatgctttcgtgctggtcgtttgattactagcaactctgtaacacgcattgcagcgcgtacacggatcgcctcctgtgtttcaagctagattcgctcgatttgggatcgatctcgcagtattcgcgaccgtgggcacacaggcgggttgctggaccgggtggcagctgctgaaacccgcgtagttggtgtcctggctgccgctgcttcttttctgcggtttgctccagcggctcgtgataatgcggtggtggagcctcgcgtgcttgcagttgcttctgtagggcccatcgctgctcctgttgaggaagttggcgtcggcgcgaacgttgggacgatggccgtggacttgtcttgacttgatacagatattcacatcggtgttcttgaggacatcactgtattatgctggtcctgtggtacgaactcggagtgccatcagttcacggggttttgtctcggcagtcttcttggccaccacgatggctgggcgaaaccgttcgcctgggtggttgttagccctctcttgctcctgatcctgacgcatgcgaatcgcgatgtcgtgttgatctagcccgccgttgatcagctctactacgcgaacctctgtacgagcggttgttgcctcttgcactacttcaaatttgcaaatgtcgtggcgctcttacgcagcacgcttgtgctcctcctctaccaggttgtgttgcttgaccctggaagactgcaatgtgactcgcaaaacgcctggtgaggagatcaaaagagatcatctttgaccaataaaacgagatcttgtttgccaataaaaaaagcaatttgcagagcgaaccaagttctcgccctagctcggttcgaatgaaaagtaagcgaaccaagcccccccccccctccggttcaggtaaaaaagaaaagaagggtgaaaccgtggttccagttcagttcgtcctaggggtgggaaattcacgaagtgtaggaaagtgtaatagacttgcgaggagagctgctggtctttctactcagtccacaaatggaaagttctgtccgtgcagctctctcaagtctaacctaaagctctacactgccagtcatactgtacaccactcgtacaattgcctctctcacattgatggtcgcacgctcttcaattgttttcgtgaacccagcagccgcagtcaacggcaattcgaagatgtcgttgggtacgccccgaggcttcactgctccagcaagttctcacttttcctttcgcaccgtcaagcgcagtcactggtctccaacctccatcgcctgttagcagcgttgtatcaagccctatgtcggggaagggtgcgccaggaaagcgcaagcgcaagtgacacccatttgatgacgggaagagcgatagaaatggcactgaaggcgcatgcccgaactcggagggcgatgatgacctcgatgaggatgacgtagattatgaggacgcccaaccagtaacgacacgtccaagcaagaggcctgacgtcgcggagcgcatgaagggcaacaagaataccagcctcgtatatgtgaagatgtcactaggttccttcttgacaggcgaggagaaactgttgctgtcattcgatggcattctcgtagacttgagcattggattgttaaatgcctacgcgctgctgaacatccacatgatacggtgtgtgacaaaggacttcccattcctcgatttgagcagaacttcgtttgccaatgcttgacagacgtaatgtttaacgacagcaacgtgcacatagacgctgaactacatatatcgttggagctatacaatttgttgagaggctctaacgcttctcacgggcgtcgcgctggtatcaagaacgggtggcaacaggcgcagctcgggagatgatgaccgctatccagcatgcactcaaaaatgagtttccttcgccggtttaataaggtgctgcgggtatggtgtagacagaagcactggtagcacacattattgccccagagtttgagcggactccacccgacattcctgatcgtcagcgcctcgacaacgtagtcaacgagtggcgtggagaagtccctcagcgtcggagtgagctggtcaacttcacggcccaccgactggtgcttctgacttatcgactcctgcaaatgattgaggagcgtaacgacagagttgagcaaagcgtttgcgctgtttaagtgacaggggcgtctgattttgaagttagactaatccaagctgaagttatgaagacgttcactgttctaccaacaaagcaaggatttggaattagtcacctcacgatagatttgattggtttccgggaactattagtccgcaacgacattgctgttcctccgtacagatcgaagtggaatgaggtgagatacatttattggagacggttcttccgtattgacaaagtggagactatagagtttggtcatctcagattcacacgagagatctcgacggacggcaagtcggtgaacatcaagattcggaagcccgaacgtgggccttccgagcccaatgcaaatgacctccaagctgccgacattggctctagatgggggttggatgcgagtaaatgcaacctcttggtcaccacaaaccaggacgacgaaacggttgtgtgctctggcaaagagtatcgcgaagacgcttacattacgaagagcagccagaagcaattgagatggatacgggatcgtccggacactggagctgcctttgcgagcatgccgacgaagaggagcatgttgctaaagcggtggcgggagtacgtcccatttatgacgcagcacctgcatctgctagtgacccccatgcagcacaaatcgtacagtcgccatcgacttcgaaggagcttctttaaaaagaagaacctatgtgagctctaccagaaacttgtatgtcgcggagagcgaatttttatcgtcattgacaaccggagtaacggcgatccaaatggagcgatcaaagggaagccatccgcactcgtgcagaaattggcgctggagttgtcaaagacgtcgaactgtacggtcatcattattgccgagttccggatcagcaaagtgcactttggttaccaacaagaactgtccaagcaatacccgtatcgaaaggccgctgtccacgtacgcgcagtccacgaaagacgagccacgtacccagtttacggcttactccatttcagaaacaaaggttgttctggtatgagtgtgaactgggacgtgaatgcttcgaagaatatgctgcgcctgctcgattgtgaactcaacgagactcgcccagtcacctacacgcatcaagcaaacagatagataacaatacatttctagtgtcgctgtgtgcctatctaggggtgaggaagattacattgtgatagccggctcagaaattagcccttttggactctgtaggctacgtatctataggacacccttaggagaataatgggttaaacaaaggctcaatgaagcctggttgatttctgcatgaaatatttttcaaaacggtgatgtcctcctgtggatgaatatacttgtctttccgacagatagctcagcacgattgttgtctgctcgctttgcaggccattttgaccaattttaacacgtaaagccttaattgtgtccaattaaaatggttaaatgtaggtttgacattctgacaccttccgacaaatatgtgtctgaagtatttccaaaatatcaatatcttcatgcaaacaacaactgtaaaacgtatttttcaaatataccagccattcgtacaatgaggagtggccctaatgtaggaacactgaagaggatgaggtcgttggttggatgtccaccgttggtgtacactttaccagaagagtaacgtagccatagatcgtgcgtgatgcgtgggacataagcaaaataaacaaaggctgtgcttatgtcttcaatatgccacgggaagaccgcaaggtagcctgagtgctgtgcagctggaataaagagatcgcgcctcacgttgtggacgtcgcgacgctggaccatctgacgcgggagcggcttgaacgcttgcaggagctcctgtttagcacatgcacaggacgcaaggaacaccggttcaacgtgagtagaaaagtgcttggcgcttacctggtacggtactactcgcagcttaaagcgctagttcctgcagtgccgatcatcatcctgcttagtatctgcgggcatctcgtcaactgcattgcttgagtggtctgtagctggcggctccacctgctcaagaccaagaacaaactcaagacaaggcgcacacgttgccgagaagatggccaccttttggctgtgattgatgggcttatcgcctcgaacaaggtcatggctgcatcgtcgaggcggtactactaaataataagggtccacacgcaacaacggaagaaggacaactgcaagagccatcagatcaagaaccaaatcgcaagcacagaaaaaagctgcgaacctgtcggccacatggcttgcgtggtacaagaggataccacgcgtgtgggactcaaccgatagaagtcggagtgtcgccacgtggtcgcctccatgaagctctccctcgacgatagcttcgttgtgaatgtcacagcggaagaattcaagaaccaagtcctcaacaccggccgcgcggaaattggactgctggagtttctaaagctagcggcgtcaacgaagggagccgggagtatcctgtgtgcgctgcacccgctgcatatgtccggtatattggacgagcaaatcatggtctacaggcaccaactcgtcataggaagcaccgaagaccctgcacatatcgacgcgcaagacatgctcggcattgtaggttatgtgtgagaacggtgaagttaattcattccaatatatgtattcattcgacataacatcgctgcttaacaagacaacatattcatgtgtacacatccacgcgcgcaggtcacctaatcaaagcgtaggctgcacaccgcacgatcgcaccgcgctcactcacccaccacatgcacagatcctcagcaatactgcacggtttaaagcactgatcccgacccaatcttgatcataaacaccggccaaaacgtggctgttgacgaagctagtattgcgtgtcgttcgcaatacgctcgccatattatacttttctatccccaaaaccagacagggaaatatcacttcaagctgtatgcttgttgctgctcgacatcatggtatgtcgtgagtttcaaattgcactgtgcaagtgaacaaatagaccgtttggacggcgtggttccaagtccagaggtattacagcttgttgatctgacagcgaagtcctttgaaatttgttcccacgtaattgaagttgtggagtctttgaaaggatctaatcgcgttgtcaataccgataatatctacacctcctgcctgctactagaatcactaaggtcgattggcatgtatggtcgtggtacagtgctcacatccagcaaacacttcccccacttcacaatgatccgaaaagctgatggaaagcctagaggctacatgaaacatggcgtgtgcttagagtaacatatcgtagcggccagttggatagatggctctattgtgaatacagtctctaatgttgacgcctcctcttcctctacggtatatcgtcgcataaaggaggaacatgttgcgtttaacgtcccgacctgcctcggtgaatacaacgcggggatgcagggagtcaaccgtcatgatcagcttcgcggtcggatttcgcttgccgatggtcactcatttcagaagtggcataaaaaattagcaatggctatgattgatatcacgagatgtaatgcgtatgtatgcgataacttggcacgtgatacaagcgagatggatgttgcacagcctcgcaataatgcaagggcaagcgcccgtgacggtcaccgggcgtttgtcattccacttgtgcgagaattattcaatggagattggaagaagtccattgacagtgatgacgtaattgtgtacacttcgaacacaaaacccatgacaacagctgccaatttgaccagaaatacgaatgagttagaaacgccagcacatacatgtgtagcaaacgaatcgtggcttgtgttacaaggaaggagtcgggcaatgcacaaacggactgtatgtaaattcgagggcagggatgacacccagaaaacggattattgcgagacgcatcgagttgcactctgcaagcgtacctatcctactgaccacagaaaaccgcacttgtgtcagcagcaaaactggacgtgctggcaaaaatatcgtttgttctacttgccaaaacaggtctatacagttgacggaaatctgagaaggtcgtctccaatttgtaaagcccagtgttcgttcttgaaggagcgtc

SEQ ID NO: 163 - DNA, 8421 bp, unidentified
  source 1..8421: mol_type = other DNA
  misc_feature 1..8421: note = Fanzor polypeptide
  variation 1427..1809: note = n is any nucleotide
ctagctctcgtagagtttgcgctgaagaaagctcacgcacggtgctctggccacgccgatgcattcgtatcttcgggtaagatcatcacacttttaaagcttgcgctggcgtgtggaaaccctcaaatatttgccggtctatcaaccatactgaacaagatcgatggcaatcttctccacacagtgattaatgcgctctcgaaatacgtcaatgactcgagtttacctgaacagcgtgctacgctggcctcacttgcagcgagacgtcgtgaatggctattcgctgagatcgaagacacgaagcaaccactggacttgacgaagcgcgagatctaggcaatgctagccgacaacacaatcggctccgcgaagtacttttcaatcgtcgctgactttttgaaggtgtcatcgatgagcacgagattcctggggttaaggctctacctagtggacacatcgttcgagttcaagtcggtactcttggggactcgccatttcgcgcctcagtatgggggaccagatggcggaatacgcggaccactttaccggtggattggtgacgtcctggggggggggctttggtttgagtcgccataaccttttcggggctacaagcgacggaggcagtgatgtcaaatggatgatgagggacggtctaaagttgtagcgggagtggtgcgtgccgcacttcatgcatgcggcaaccaatactgttttcggcatcgtcggtgacaacagctcgtccaagaacccagccatgaccgacatccttcgacgcatcaccaaaacgatgtacaaaacgcagcacgtcgaaggaaagggcactctattaagcgagttatgcagcgttatgaacccggagggtgtgcatccacgctagctcttaaacttccgcacgcatcgattcctgggactcacgcgcgtcgtccgacgcattcttctactctgggatccattggtgcaatggtacgaggagcgggccacaaaagcccgacgtgagaacgtgatgccgccggagtccttcccactagctcgggaaaagatggaactcattcaggtgctctcactgctggagccgatctcgaaactaaatcagattggacaggccgagtcggggggaccaatgcaacgtgcttcttggactctacaagctccgaatatccttgttggacatcaccacagccttgaaggactgaagacggagaatcggttcttccgaccggatgagctgtacaatctcgcatcgacaacccgttcgctacttcacaaagggtttcgtcgggttttcttccggcggtacaccgatcgtgataccatgaacgtctgctcctttgcctttgagatgcaactatttcttcaccccaacttcaagcatccatatggagcgctgataaaggtgttaccaaggtcaatatacaggcaggtannnnnnnnnnnnnnnnnnnnnnnnnnnnnnnnnnnnnnnnnnnnnnnnnnnnnnnnnnnnnnnnnnnnnnnnnnnnnnnnnnnnnnnnnnnnnnnnnnnnnnnnnnnnnnnnnnnnnnnnnnnnnnnnnnnnnnnnnnnnnnnnnnnnnnnnnnnnnnnnnnnnnnnnnnnnnnnnnnnnnnnnnnnnnnnnnnnnnnnnnnnnnnnnnnnnnnnnnnnnnnnnnnnnnnnnnnnnnnnnnnnnnnnnnnnnnnnnnnnnnnnnnnnnnnnnnnnnnnnnnnnnnnnnnnnnnnnnnnnnnnnnnnnnnnnnnnnnnnnnnnnnnnnnnnnnnnnnnnnnnnnnnnnnnnnnnnnnnnnnnnnnnnnnnnnnnnnnnnnnnnncggccctcatcatcggcccaaattgaacgcgactttgggatggcaggcaggatggtgacccccaccgcagctcgatggcgccttacaacgtggacatggccacatttctgagctgcagcagaacttacgtgggtatcacccagtacccaaagttgtcgtcgagcacagcaaaggatcaagtaccgtcaaacgccatggtgagcatggagcgagagttggacgacgagttcggatcgttgatgaacaaaggcatcgagttgggactctccgacgacgaaaacgacggtattaccgaaatgtagcgggagcgggctggggcggacgaaaacgtgagagaacgggagcacgtgtggaagtggaaacgggctatagctgccgtggtagagttctagccatgcatgtgcacgaaatgagtgtctttacttttcatcaacacgttctgaccgttgttggtgttagcttcgctatgcagcatatgtaaatagtattttgctttcacctatgctttcgtgctggtcgtttgattactagcaactctgtaacacgcattgcagcgcgtacacggatcgcctcctgtgtttcaagctagattcgctcgatttgggatcgatctcgcagtattcgcgaccgtgggcacacaggcgggttgctggaccgggtggcagctgctgaaacccgcgtagttggtgtcctggctgccgctgcttcttttctgcggtttgctccagcggctcgtgataatgcggtggtggagcctcgcgtgcttgcagttgcttctgtagggcccatcgctgctcctgttgaggaagttggcgtcggcgcgaacgttgggacgatggccgtggacttgtcttgacttgatacagatattcacatcggtgttcttgaggacatcactgtattatgctggtcctgtggtacgaactcggagtgccatcagttcacggggttttgtctcggcagtcttcttggccaccacgatggctgggcgaaaccgttcgcctgggtggttgttagccctctcttgctcctgatcctgacgcatgcgaatcgcgatgtcgtgttgatctagcccgccgttgatcagctctactacgcgaacctctgtacgagcggttgttgcctcttgcactacttcaaatttgcaaatgtcgtggcgctcttacgcagcacgcttgtgctcctcctctaccaggttgtgttgcttgaccctggaagactgcaatgtgactcgcaaaacgcctggtgaggagatcaaaagagatcatctttgaccaataaaacgagatcttgtttgccaataaaaaaagcaatttgcagagcgaaccaagttctcgccctagctcggttcgaatgaaaagtaagcgaaccaagcccccccccccctccggttcaggtaaaaaagaaaagaagggtgaaaccgtggttccagttcagttcgtcctaggggtgggaaattcacgaagtgtaggaaagtgtaatagacttgcgaggagagctgctggtctttctactcagtccacaaatggaaagttctgtccgtgcagctctctcaagtctaacctaaagctctacactgccagtcatactgtacaccactcgtacaattgcctctctcacattgatggtcgcacgctcttcaattgttttcgtgaacccagcagccgcagtcaacggcaattcgaagatgtcgttgggtacgccccgaggcttcactgctccagcaagttctcacttttcctttcgcaccgtcaagcgcagtcactggtctccaacctccatcgcctgttagtagcgttgtatcaagccctatgtcggggaagggtgcgccaggaaagcgcaagcgcaagtgacacccatttgatgacgggaagagcgatagaaatggcactgaaggcgcatgcccgaactcggagggcgatgatgacctcgatgaggatgacgtagattatgaggacgcccaaccagtaacgacacgtccaagcaagaggcctgacgtcgcggagcgcatgaagggcaacaagaataccagcctcgtatatgtgaagatgtcactaggttccttcttgacaggcgaggagaaactgttgctgtcattcgatggcattctcgtagacttgagcattggattgttaaatgcctacgcgctgctgaacatccacatgatacggtgtgtgacaaaggacttcccattcctcgatttgagcagaacttcgtttgccaatgcttgacagacgtaatgtttaacgacagcaacgtgcacatagacgctgaactacatatatcgttggagctatacaatttgttgagaggctctaacgcttctcacgggcgtcgcgctggtatcaagaacgggtggcaacaggcgcagctcgggagatgatgaccgctatccagcatgcactcaaaaatgagtttccttcgccggtttaataaggtgctgcgggtatggtgtagacagaagcactggtagcacacattattgccccagagtttgagcggactccacccgacattcctgatcgtcagcgcctcgacaacgtagtcaacgagtggcgtggagaagtccctcagcgtcggagtgagctggtcaacttcacggcccaccgactggtgcttctgacttatcgactcctgcaaatgattgaggagcgtaacgacagagttgagcaaagcgtttgcgctgtttaagtgacaggggcgtctgatttgaagttagactaatccaagctgaagttatgaagacgttcactgttctaccaacaaagcaaggatttggaattagtcacctcacgatagatttgattggttaccgggaactattagtccgcaacgacattgctgttcctccgtacagatcgaagtggaatgaggtgagatacatttattggagacggttcttccgtattgacaaagtggagactatagagtttggtcatctcagattcacacgagagatctcgacggacggcaagtcggtgaacatcaagattcggaagcccgaacgtgggccttccgagcccaatgcaaatgacctccaagctgccgacattggctctagatgggggttggatgcgagtaaatgcaacctcttggtcaccacaaaccaggacgacgaaacggttgtgtgctctggcaaagagtatcgcgaagacgcttacattacgaagagcagccagaagcaattgagatggatacgggatcgtccggacactggagctgcctttgcgagcatgccgacgaagaggagcatgttgctaaagcggtggcgggagtacgtcccatttatgacgcagcacctgcatctgctagtgacccccatgcagcacaaatcgtacagtcgccatcgacttcgaaggagcttctttaaaaagaagaacctatgtgagctctaccagaaacttgtatgtcacggagagcgaatttttatcgtcattgacaaccggagtaacggcgatccaaatggagcgatcaaagggaagccatccgcactcgtgcagaaattggcgctggagttgtcaaagacgtcgaactgtacggtcatcattattgccgagttccggatcagcaaagtgcactttggttaccaacaagaactgtccaagcaatacccgtatcgaaaggccgctgtccacgtacgcgcagtccacgaaagacgagccacgtacccagtttacggcttactccatttcagaaacaaaggttgttctggtatgagtgtgaactgggacgtgaatgcttcgaagaatatgctgcgcctgctcgattgtgaactcaacgagactcgcccagtcacctacacgcatcaagcaaacagatagataacaatacctttctagtgtcgctgtgtgcctatctaggggtgaggaagattacattgtgatagccggctcagaaattagcccttttggactctgtaggctacgtacctataggacacccttaggagaataatgggttaaacaaaggctcaatgaagcctggttgatttctgcatgaaatatttttcaaaacggtgatgtcctcctgtggatgaatatacttgtctttccgacagatagctcagcacgattgttgtctgctcgctttgcagaccattttgaccaattttaacacgtaaagccttaattgtgtccaattaaaatggttaaatgtaggtttgacattctgacaccttccgacaaatatgtgtctgaagtatttccaaaatatcaatatcttcatgcaaacaacaacggtaaaacgtatttttcaaatataccagccattcgtacaatgaggagtggccctaatgtaggaacactgaagaagatgaggtcgttggttggatgtccaccgttggtgtacactttaccagaagagtaacgtagccatagatcgtgcgtgatgcgtgggacataagcaaaataaacaaaggctgtgcttatgtcttcaatatgccacgggaagaccgcaaggtagcctgagtgctgtgcagctggaataaagagatcgcgcctcacgttgtggacgtcgcgacgctggaccatctgacgcgggagcggcttgaacgcttgcaggagctcctgtttagcacatgcacaggacgcaaggaacaccggttcaacgtgagtagaaaagtgcttggcgcttacctggtacggtactactcgcagcttaaagcgctagttcctgcagtgccgatcatcatcctgcttagtatctgcgggcatctcgtcaactgcattgcttgagtggtctgtagctggcggctccacctgctcaaaaccaagaacaaactcaagacaaggcgcacacgttgccgagaagatggccaccttttggctgtgattgatgggcttgtcgcctcgaacaaggtcatggctgcatcgtcgaggcggtactactaaataataagggtccacacgcaacaacggaagaaggacaactgcaagagccatcagatcaagaaccaaatcgcaagcacagaaaaaagctgcgaacctgtcggccacatggcttgcgtggtacaagaggataccacgcgtgtgggactcaaccgatagaagtcggagtgtcgccacgtggtcgcctccatgaagctctccctcgacgatagcttcgttgtgaatgtcacagcggaagaattcaagaaccaagtcctcaacaccggccgcgcggaaattggactgctggagtttctaaagctagcggcgtcaacgaagggagccgggagtatcctgtgtgcgctgcacccgctgcatattccggtatattggacgagcaaatcatggtctacaggcaccaactcgtcataggaagcaccgaagaccctgcacatatcgacgcgcaagacatgctcggcattgtaggtcatgtgtgagaacggtgaagttaattcattccaatatatgtattcattcgacataacatcgctgcttaacaagacaacatattcatgtgtacacatccacgcgcgcaggtcacctaatcaaagcgtaggctgcacaccgcacgatcgcaccgcgctcactcacccaccacatgcacagatcctcagcaatactgcacggtttaaagcactgatcccgacccaatcttgatcataaacaccggccaaaacgtggctgttgacgaagctagtattgcgtgtcgttcgcaatacgctcgccatattatacttttctatccccaaaaccagacagggaaatatcacttcaagctgtatgcttgttgctgctcgacatcatggtatgtcgtgagtttcaaattgcactgtgcaagtgaacaaatagaccgtttggacggcgtggttccaagtccagaggtattacagcttgttgatctgacagcgaagtcctttgaaatttgttcccacgtaattgaagttgtggagtctttgaaaggatctaatcgcgttgtcaataccgataatatctacacctcctgcctgctactagaatcactaaggtcgattggcatgtatggtcgtggtacagtgctcacatccagcaaacacttcccccacttcacaatgatccgaaaagctgatggaaagcctagaggctacatgaaacaaggcgtgtgcttagagtaacatattgtagcggccagttggatagattgctctattgtgaatacagtctctaatgttgacgcctcctcttcctctacggtatatcatcgcataaaggaggaacatgttgcgtttaacgtcccggcctgcctcggtgaatacaacgcggggatgcagggagtcaaccgtcatgatcagcttcgcggtcggatttcgcttgccgatggtcactcatttcagaagtggcataaaaaattagcaatggctatgattgatatcgcgagatgtaatgcgtatgtatgcgataacttggcacgtgatacaagcgagatggatgttgcacagcctcgcaataatgcaagggcaagcgcccgtgacggtcaccgggcgtttgtcattccacttgtgcgagaattattcaatggagattggaagaagtccattgacagtgatgacgtaattgtgtacacttcgaacacaaaacccatgacaacagctgccaatttgaccagaaatacgaatgagttagaaacgccagcacatacatgtgtagcaaa

SEQ ID NO: 164 - DNA, 9306 bp, Phytophthora sp.
  source 1..9306: mol_type = other DNA
ttgttcaccgagagcttacgctctctagcacttcctctgtgcaaggtgctgtgtgtgccccgtcacactcatacacgtgcgcacacgtgtaagcttaagtagtgggtctaagcagacccattacagcaacagtgcgtcagaaattcagccatgacagacttgcttcgcacaatcatcaaaaacatctaccatactcagcacgtggaagacatagtgttttatttcatgagctgatggctttcatagacttggaaggtgagcatccgcagaaactgctcaattccggacgattcctaggcctcactcgtgtcgttcgacgaattctcctgctgtgggacccgctcgtcgaatggtacgacgagcgtattgcaaaagctcacccgaaaatgtggttccgcccgcggcgtttcccctggtacgagacaaaatggagatggtgcaggttctttccctgctcgagcctatttcgattctgaatcaagctgggcatggtgagaattgtatccagtgcaatgtgttactggaactatgcaaacaacggatctcacttcttcacaccacacagccgtgaaaggactgccgtttgaccaaggatgaacagcgattttccgtccagaggactggtatctacgacacgtacgttgctgcacaaaatgtttcaccgggtcttttcaggtgataaacagaccgttatgtcatggacaaatgctcctacacgttcgagatgcaactcctcctacatcctaacttcaagaacccagatggtgcgctcaagcggattgtcatcttgtgcaacctgcaggctggagcatctcagcaggtgacagagcgccattacaccaaggttcgccgcattgtcctggatggtgtgcgaaagatcatggtcgccgtggactcaacaccgaacacgcccgaagtcatcgctcccccaccagccgtcgtcttctccgacgacgtcatgacgctttttgcagacacagcagatgagatacttccacagccactaacgacgttgacggctttacacgagcagcggatcgacgacgagtttgagcgttggttgacgacgccaaccacacttcgaggggctagcttcagtgattttgagtcagtgctcaccttttggaaacgccagcaagacatggacaccttccgcctgctgcctctggtggcgcgcgtggtcttctcactgccatcttcgtcggcccagatcgagggacttcgggacagcaagtagaatggtagtgatgcctcagcgcgactcgttggcgccacacaatgtgaacatgctgacgttcctcaactccaacagaagctacgtgaatattgcgcagtgtactaagctctcagctggcactgcgtcggggcgcgtctcacccaacgtgatggtcaacattctgcaggagcaagacgacaattggaattctctcgcggagtttttccccgctgccagtttcgacttgggactctccgatgaagaagacggcggtaccggaagagatagtcagtattggttacttggcgacagagatggtttgttttgactgagcttgcaatttgttgaatgtgcgctcgactatgtgatgatgttgatgtcttggtgacagcgtcgtgcgacttgccgaatgcaatgtgaatcttggtgctgctgctgccggtatggaggcccctgaaatggactctcagaggtggcagcggcttggtcacggttcaggcggacttttcggctgtcaaaaaggttgtgatatattaatatatgatcaccaatgtgcatactcacttacacgtcacggtaatcaatgatcatgcccatctacgcgtcctgctcaaccttttctgcttctgtcgcagcagctcggtagcgcattcttggatggcacactgtgtgtcttgctggatttgctggatatcagcgcgagctcgcgtcttccgacgtcttgcctctgtctgttgcgcgggagctttgggtgctggtgatcgcgcgagtctgcgtggttgatgaggaggtgctttaggtgacatagcccgcgccgacaccttaaactgtcgaatctcgatttgtattgggtctccggttgatctcacccagacccgcttcgcgttgccgttccgccatatctgcatcaacatttaggttgagtggtgagccacagaagggggtgcggcgtcggaaacgtgaatcgccatgagctcgcgggcctcggtttctgcgacttttttcgcgacaataactgtttgtcgtaagctgtcctcgatagggtcgtggttagcattgcgatctttctgctcgcgaagtcgtgaagcgctgtcgcgctggtctataatatctccgattagttcagctacacgagcctccatccgtgtaattgtttgatcttggatgctcaggagcccaatgtcgatgcgtgaagctatctacccactcaaaaaaacgtgggctcgctcttcagcgatccgtgctgcgaccttcgactggccttccaagtgctgtagccagggattgatagtagtggttttgacccttagtactaagaccaaatatccgcctcgctcccgttagatattaatttatcactactaaaccagcagcgatgactccgaactaagactaaatattgaaactataagtactaaacttaattataaaatcggctcaccacagacttcgcttgcttgactccatccgctcaatctcggcacgattgtgcctcagcacgagcagacgttgtgcgcgctcgttatcggttcgcgttctcagtgagctcatgacgaaggacccagtcgacaaaaatcgttcttgaaatgcagtagaagaattccggcccagccaaactcgtgcaagtttcgcgatcgatgggaaagctttttctccagattcagcgaaccaactgcagacgtcaatgtgttcagtccagatggaatctgccgtgttgtcgggagcgtagcggccgaccaacgctgggatgttacgtcaggagcggtagtttcattcatgtccgagtgggcaaggtcgatcactgtatcctgtctaggcgcagagttgctggagatgctactcgaagtcagctcttgtgaagcatcggcattgccgaaaaaggtgctaacgcaggcgggactacagaagctgtatacatattgagttagtaagtacgcctacctggcttatctggctagccgtaccgttttgatagatctgagttattacaggggtcgttgctgtagaggtgatgcacctgtcacccgcaaatactacaagggggcgtctcgtccaggccttcaaagtagcagtcggtcttggcgcacttcatcgttgcgagagatgagacggaatttgtagaattagagcgagatgaggagggaggggggaagtgttgattttcgccggagatccacccattgcgtgcggtcatcaatgacccaaaggctgtccaggcattcacggaattagtagagctatagtactaactattcgaaatctatacaactaaggcgtttagttctactaaagccgaagccacggcataatatgcttagtactaatagttaaacactactattagtactaacaacactatcgtggagactactatcaatccctggctgaagctgacctgaaatgcggttcgacgcctcggcagcccgcgtgagctcttgttcgggtagggtttgctggtgactaattctatcgattagaacatcgatgtgtttttcaacgtgcagggatacctccttctcgacatgttgggctacagagagcatagcgttttcaacgagttcgcaaacggcggcttcatgcgcgacgtgcgcctttgcaagaacttgggcctgttggtgggcgctctcttgtagatgctgtaggacagattgtatccgtgtgtcgacgtgtagctctagcgtcgacggatccccacaggtttgctgaatagccagcacaagtgcgttgctcctagcctccgcttcctctctcacagccgcgacgtgaagctcaacaaatccctgctgctctgcttcgtggcgagcctgccgctgccggagcttagcctgatgcccagcaatgttgtttgcgtgagccgacacgtaagctagcgccttcccgatcctttcgccatcaacacggtagtgctcggggagttcgataatcggaagatcgtccccactcatgtgtgatcgatcctggaaggtcgcacgcaatatgacttgcaaaacgctaggtgagcaggtgtaaatcgttgcgagccaggtcggttttgaccaataaaacgagatcttgttagccaatcaaaaccaacaatttgcaggccgaaccaaattctcgccctagttcgaatcgtaagaaatgtaagcgaaccaagccccccccccctccggttcaggtaaaaaagaaaagaagggtgaaaccgtggttccagttcagttcgtcctaggggtgggaaattcacgaagtgtaggaaagtgtaatagacttgcgaggagagctgctggtctttctactcagtccacaaatggaaagttctgtccgtgcagctctctcaagtctaacctaaagctctacactgccagtcatactgtacaccactcgtacaattgcctctctcacattgatggtcgcacgctcttcaattgttttcgtgaacccagcagccgcagtcaacggcaattcgaagatgtcgttgggtacgccccgaggcttcactgctccagcaagttctcacttttcctttcgcaccgtcaagcgcagtcactggtctccaacctccatcgcctgttagcagcgttgtatcaagccctatgtcggggaagggtgcgccaggaaagcgcaagcgcaagtgacacccatttgatgacgggaagagcgatagaaatggcactgaaggcgcatgcccgaactcggagggcgatgatgacctcgatgaggatgacgtagattatgaggacgcccaaccagtaacgacacgtccaagcaagaggcctgacgtcgcggagcgcatgaagggcaacaagaataccagcctcgtatatgtgaagatgtcactaggttccttcttgacaggcgaggagaaactgttgctgtcattcgatggcattctcgtagacttgagcattggattgttaaatgcctacgcgctgctgaacatccacatgatacggtgtgtgacaaaggacttcccattcctcgatttgagcagaacttcgtttgccaatgcttgacagacgtaatgtttaacgacagcaacgtgcacatagacgctgaactacatatatcgttggagctatacaatttgttgagaggctctaacgcttctcacgggcgtcgcgctggtatcaagaacgggtggcaacaggcgcagctcgggagatgatgaccgctatccagcatgcactcaaaaatgagtttccttcgccggtttaataaggtgctgcgggtatggtgtagacagaagcactggtagcacacattattgccccagagtttgagcggactacacccgacatccctgatcgtcagcgcctcgacaacgtagtcaacgagtggcgtggagaagtccctcagcgtcggagtgagctggtcaacttcacggcccaccgactggtgcttctgacttatcgactcctgcaaatgattgaggagcgtaacgacagagttgagcaaagcgtttgcgctgtttaagtgacaggggcgtctgatttgaagttagactaatccaagctgaagttatgaagacgttcactgttctaccaacaaagcaaggatttggaattagtcacctcacgatagatttgattggttaccgggaactattagtccgcaacgacattgctgttcctccgtacagatcgaagtggaatgaggtgagatacatttattggagacggttcttccgtattgacaaagtggagactatagagtttggtcatctcagattcacacgagagatctcgacggacggcaagtcggtgaacatcaagattcggaagcccgaacgtgggccttccgagcccaatgcaaatgacctccaagctgccgacattggctctagatgggggttggatgcgagtaaatgcaacctcttggtcaccacaaaccaggacgacgaaacggttgtgtgctctggcaaagagtatcgcgaagacgcttacattacgaagagcagccagaagcaattgagatggatacgggatcgtccggacactggagctgcctttgcgagcatgccgacgaagaggagcatgttgctaaagcggtggcgggagtacgtcccatttatgacgcagcacctgcatctgctagtgacccccatgcagcacaaatcgtacagtcgccatcgacttcgaaggagcttctttaaaaagaagaacctatgtgagctctaccagaaacttgtatgtcacggagagcgaatttttatcgtcattgacaaccggagtaacggcgatccaaatggagcgatcaaagggaagccatcggcactcgtgcagaaattggcgctggagttgtcaaagacgtcgaactgtacggtcatcattattgccgagttccggatcagcaaagtgcactttggttaccaacaagaactgtccaagcaatacccgtatcgaaaggccgctgtccacgtacgcgcagtccacgaaagacgagccacgtacccagtttacggcttactccatttcagaaacaaaggttgttctggtatgagtgtgaactgggacgtgaatgcttcgaagaatatgctgcgcctgctcgattgtgaactcaacgagactcgcccagtcacctacacgcatcaagcaaacagatagataacaatacctttctagtgtcgctgtgtgcctatctaggggtgaggaagattacattgtgatagccggctcagaaattagcccttttggactctgtaggctacgtacctataggacacccttaggagaataatgggttaaacaaaggctcaatgaagcctggttgatttctgcatgaaatatttttcaaaacggtgatgtcctcctgtggatgaatatacttgtctttccgacagatagctcagcacgattgttgtctgctcgctttgcagaccattttgaccaattttaacacgtaaagccttaattgtgtccaattaaaatggttaaatgtaggtttgacattctgacaccttccgacaaatatgtgtctgaagtatttccaaaatatcaatatcttcatgcaaacaacaacggtaaaacgtatttttcaaatataccagccattcgtacaatgaggagtggccctaatgtaggaacactgaagaggatgaggtcgttggttggatgtccaccgttggtgtacactttaccagaagagtaacgtagccatggatcgtgcgtgatgcgtgggacataagcaaaataaacaaaggctgtgcttatgtcttcaatatgccacgggaagaccgcaaggtagcctgagtgctgtgcagctggaataaagagatcgcgcctcacgttgtggacgtcgcgacgctggaccatctgacgcgggagcggcttgaacgcttgcaggagctcctgtttagcacatgcacaggacgcaaggaacaccggttcaacgtgagtagaaaagtgcttggcgcttacctggtacggtactactcgcagcttaaagcgctagttcctgcagtgccgatcatcatcctgcttagtatctgcgggcatctcgtcaactgcattgcttgagtggtctgtagctggcggctccacctgctcaagaccaagaacaaactcaagacaaggcgcacacgttgccgagaagatggccaccttttggctgtgattgatgggcttgtcgcctcgaacaaggtcatggctgcatcgtcgaggcggtactactaaataataagggtccacacgcaacaacggaagaaggacaactgcaagagccatcagatcaagaaccaaatcgcaagcacagaaaaaagctgcgaacctgtcggccacatggcttgcgtggtacaagaggataccacgcgtgtgggactcaaccgatagaagtcggagtgtcgccacgtggtcgcctccatgaagctctccctcgacgatggcttcgttgtgaatgtcacagcggaagaattcaagaaccaagtcctcaacaccggccgcgcggaaattggactgctggagtttctaaagctagcggcgtcaacgaagggagccgggagtatcctgcgtgcgctgcacccgctgcatattccggtatattggacgagcaaatcatggtctacaggcaccaactcgtcataggaagcaccgaagaccctgcacatatcgacgcgcaagacatgctcggcattgtaggttatgtgtgagaacggtgaagttaattcattccaatatatgtattcattcgacataacatcgctgcttaacaagacaacatattcatgtgtacacatccacgcgcgcaggtcacctaatcaaagcgtaggctgcacaccgcacgatcgcaccgcgctcactcacccaccacatgcacagatcctcagcaatactgcacggtttaaagcactgatcccgacccaatcttgatcataaacaccggccaaaacgtggctgttgacgaagctagtattgcgtgtcgttcgcaatacgctcgccatattatagtgttctatccccaaaaccagacagggaaatatcacttcaagctgtatgcttgttgctgctcgacatcatggtatgtcgtgagtttcaaattgcactgtgcaagtgaacaaatagaccgtttggacggcgtggttccaagtccagaggtattacagcttgttgatctgacagcgaagtcctttgaaatttgttcccacgtaattgaagttgtggagtctttgaaaggatctaatcgcgttgtcaataccgataatatctacacctcctgcctgctactagaatcactaaggtcgattggcatgtatggtcgtggtacagtgctcacatccagcaaacacttcccccacttcacaatgatccgaaaagctgatggaaagcctagaggctacatgaaacatggcgtgtgcttagagtaacatatcgtagcggccagttggatagatggctctattgtgaatacagtctctaatgttgacgcctcctcttcctctacggtatatcgtcgcataaaggaggaacatgttgcgtttaacgtcccgacctgcctcggtgaatacaacgcggggatgcagggagtcaaccgtcatgatcagcttcgcggtcggatttcgcttgccgatggtcactcatttcagaagtggcataaaaaattagcaatggctatgattg

SEQ ID NO: 165 - DNA, 9091 bp, Phytophthora sp.
  source 1..9091: mol_type = other DNA
acgtgcgcacacgtgtaagcttaagtagtgggtctaagcagacccattacagcaacagtgcgtcagaaattcagccatgacagacttgcttcgcacaatcatcaaaaacatctaccatactcagcacgtggaagacatagtgttttatttcatgagctgatggctttcatagacttggaaggtgagcatccgcagaaactgctcaattccggacgattcctaggcctcactcgtgtcgttcgacgaattctcctgctgtgggacccgctcgtcgaatggtacgacgagcgtattgcaaaagctcacccgaaaatgtggttccgcccgcggcgtttcccctggtacgagacaaaatggagatggtgcaggttctttccctgctcgagcctatttcgattctgaatcaagctgggcatggtgagaattgtatccagtgcaatgtgttactggaactatgcaaacaacggatctcacttcttcacaccacacagccgtgaaaggactgccgtttgaccaaggatgaacagcgattttccgtccagaggactggtatctacgacacgtacgttgctgcacaaaatgtttcaccgggtcttttcaggtgataaacagaccgttatgtcatggacaaatgctcctacacgttcgagatgcaactcctcctacatcctaacttcaagaacccagatggtgcgctcaagcggattgtcatcttgtgcaacctgcaggctggagcatctcagcaggtgacagagcgccattacaccaaggttcgccgcattgtcctggatggtgtgcgaaagatcatggtcgccgtggactcaacaccgaacacgcccgaagtcatcgctcccccaccagccgtcgtcttctccgacgacgtcatgacgctttttgcagacacagcagatgagatacttccacagccactaacgacgttgacggctttacacgagcagcggatcgacgacgagtttgagcgttggttgacgacgccaaccacacttcgaggggctagcttcagtgattttgagtcagtgctcaccttttggaaacgccagcaagacatggacaccttccgcctgctgcctctggtggcgcgcgtggtcttctcactgccatcttcgtcggcccagatcgagggacttcgggacagcaagtagaatggtagtgatgcctcagcgcgactcgttggcgccacacaatgtgaacatgctgacgttcctcaactccaacagaagctacgtgaatattgcgcagtgtactaagctctcagctggcactgcgtcggggcgcgtctcacccaacgtgatggtcaacattctgcaggagcaagacgacaattggaattctctcgcggagtttttccccgctgccagtttcgacttgggactctccgatgaagaagacggcggtaccggaagagatagtcagtattggttacttggcgacagagatggtttgttttgactgagcttgcaatttgttgaatgtgcgctcgactatgtgatgatgttgatgtcttggtgacagcgtcgtgcgacttgccgaatgcaatgtgaatcttggtgctgctgctgccggtatggaggcccctgaaatggactctcagaggtggcagcggcttggtcacggttcaggcggacttttcggctgtcaaaaaggttgtgatatattaatatatgatcaccaatgtgcatactcacttacacgtcacggtaatcaatgatcatgcccatctacgcgtcctgctcaaccttttctgcttctgtcgcagcagctcggtagcgcattcttggatggcacactgtgtgtcttgctggatttgctggatatcagcgcgagctcgcgtcttccgacgtcttgcctctgtctgttgcgcgggagctttgggtgctggtgatcgcgcgagtctgcgtggttgatgaggaggtgctttaggtgacatagcccgcgccgacaccttaaactgtcgaatctcgatttgtattgggtctccggttgatctcacccagacccgcttcgcgttgccgttccgccatatctgcatcaacatttaggttgagtggtgagccacagaagggggtgcggcgtcggaaacgtgaatcgccatgagctcgcgggcctcggtttctgcgacttttttcgcgacaataactgtttgtcgtaagctgtcctcgatagggtcgtggttagcattgcgatctttctgctcgcgaagtcgtgaagcgctgtcgcgctggtctataatatctccgattagttcagctacacgagcctccatccgtgtaattgtttgatcttggatgctcaggagcccaatgtcgatgcgtgaagctatctacccactcaaaaaaacgtgggctcgctcttcagcgatccgtgctgcgaccttcgactggccttccaagtgctgtagccagggattgatagtagtggttttgacccttagtactaagaccaaatatccgcctcgctcccgttagatattaatttatcactactaaaccagcagcgatgactccgaactaagactaaatattgaaactataagtactaaacttaattataaaatcggctcaccacagacttcgcttgcttgactccatccgctcaatctcggcacgattgtgcctcagcacgagcagacgttgtgcgcgctcgttatcggttcgcgttctcagtgagctcatgacgaaggacccagtcgacaaaaatcgttcttgaaatgcagtagaagaattccggcccagccaaactcgtgcaagtttcgcgatcgatgggaaagctttttctccagattcagcgaaccaactgcagacgtcaatgtgttcagtccagatggaatctgccgtgttgtcgggagcgtagcggccgaccaacgctgggatgttacgtcaggagcggtagtttcattcatgtccgagtgggcaaggtcgatcactgtatcctgtctaggcgcagagttgctggagatgctactcgaagtcagctcttgtgaagcatcggcattgccgaaaaaggtgctaacgcaggcgggactacagaagctgtatacatattgagttagtaagtacgcctacctggcttatctggctagccgtaccgttttgatagatctgagttattacaggggtcgttgctgtagaggtgatgcacctgtcacccgcaaatactacaagggggcgtctcgtccaggccttcaaagtagcagtcggtcttggcgcacttcatcgttgcgagagatgagacggaatttgtagaattagagcgagatgaggagggaggggggaagtgttgattttcgccggagatccacccattgcgtgcggtcatcaatgacccaaaggctgtccaggcattcacggaattagtagagctatagtactaactattcgaaatctatacaactaaggcgtttagttctactaaagccgaagccacggcataatatgcttagtactaatagttaaacactactattagtactaacaacactatcgtggagactactatcaatccctggctgaagctgacctgaaatgcggttcgacgcctcggcagcccgcgtgagctcttgttcgggtagggtttgctggtgactaattctatcgattagaacatcgatgtgtttttcaacgtgcagggatacctccttctcgacatgttgggctacagagagcatagcgttttcaacgagttcgcaaacggcggcttcatgcgcgacgtgcgcctttgcaagaacttgggcctgttggtgggcgctctcttgtagatgctgtaggacagattgtatccgtgtgtcgacgtgtagctctagcgtcgacggatccccacaggtttgctgaatagccagcacaagtgcgttgctcctagcctccgcttcctctctcacagccgcgacgtgaagctcaacaaatccctgctgctctgcttcgtggcgagcctgccgctgccggagcttagcctgatgcccagcaatgttgtttgcgtgagccgacacgtaagctagcgccttcccgatcctttcgccatcaacacggtagtgctcggggagttcgataatcggaagatcgtccccactcatgtgtgatcgatcctggaaggtcgcacgcaatatgacttgcaaaacgctaggtgagcaggtgtaaatcgttgcgagccaggtcggttttgaccaataaaacgagatcttgttagccaatcaaaaccaacaatttgcaggccgaaccaaattctcgccctagttcgaatcgtaagaaatgtaagcgaaccaagcccccccccccctccggttcaggtaaaaaagaaaagaagggtgaaaccgtggttccagttcagttcgtcccaggggtgggaaattcacgaagtgtaggaaagtgtaatagacttgcgaggagagctgctggtctttctactcagtccacaaatggaaagttctgtccgtgcagctctctcaagtctaacctaaagctctacactgccagtcatactgtacaccactcgtacaattgcctctctcacattgatggtcgcacgctcttcaattgttttcgtgaacccagcagccgcagtcaacggcaattcgaagatgtcgttgggtacgccccgaggcttcactgctccagcaagttctcacttttcctttcgcaccgtcaagcgcagtcactggtctccaacctccatcgcctgttagcagcgttgtatcaagccctatgtcggggaagggtgcgccaggaaagcgcaagcgcaagtgacacccatttgatgacgggaagagcgatagaaatggcactgaaggcgcatgcccgaactcggagggcgatgatgacctcgatgaggatgacgtagattatgaggacgcccaaccagtaacgacacgtccaagcaagaggcctgacgtcgcggagcgcatgaagggcaacaagaataccagcctcgtatatgtgaagatgtcactaggttccttcttgacaggcgaggagaaactgttgctgtcattcgatggcattctcgtagacttgagcattggattgttaaatgcctacgcgctgctgaacatccacatgatacggtgtgtgacaaaggacttcccattcctcgatttgagcagaacttcgtttgccaatgcttgacagacgtaatgtttaacgacagcaacgtgcacatagacgctgaactacatatatcgttggagctatacaatttgttgagaggctctaacgcttctcacgggcgtcgcgctggtatcaagaacgggtggcaacaggcgcagctcgggagatgatgaccgctatccagcatgcactcaaaaatgagtttccttcgccggtttaataaggtgctgcgggtatggtgtagacagaagcactggtagcacacattattgccccagagtttgagcggactccacccgacattcctgatcgtcagcgcctcgacaacgtagtcaacgagtggcgtggagaagtccctcagcgtcggagtgagctggtcaacttcacggcccaccgactggtgcttctgacttatcgactcctgcaaatgattgaggagcgtaacgacagagttgagcaaagcgtttgcgctgtttaagtgacaggggcgtctgatttgaagttagactaatccaagctgaagttatgaagacgttcactgttctaccaacaaagcaaggatttggaattagtcacctcacgatagatttgattggttaccgggaactattagtccgcaacgacattgctgttcctccgtacagatcgaagtggaatgaggtgagatacatttattggagacggttcttccgtattgacaaagtggagactatagagtttggtcatctcagattcacacgagagatctcgacggacggcaagtcggtgaacatcaagattcggaagcccgaacgtgggccttccgagcccaatgcaaatgacctccaagctgccgacattggctctagatgggggttggatgcgagtaaatgcaacctcttggtcaccacaaaccaggacgacgaaacggttgtgtgctctggcaaagagtatcgcgaagacgcttacattacgaagagcagccagaagcaattgagatggatacgggatcgtccggacactggagctgcctttgcgagcatgccgacgaagaggagcatgttgctaaagcggtggcgggagtacgtcccatttatgacgcagcacctgcatctgctagtgacccccatgcagcacaaatcgtacagtcgccatcgacttcgaaggagcttctttaaaaagaagaacctatgtgagctctaccagaaacttgtatgtcacggagagcgaatttttatcgtcattgacaaccggagtaacggcgatccaaatggagcgatcaaagggaagccatcggcactcgtgcagaaattggcgctggagttgtcaaagacgtcgaactgtacggtcatcattattgccgagttccggatcagcaaagtgcactttggttaccaacaagaactgtccaagcaatacccgtatcgaaaggccgctgtccacgtacgcgcagtccacgaaagacgagccacgtacccagtttacggcttactccatttcagaaacaaaggttgttctggtatgagtgtgaacagggacgtgaatgcttcgaagaatatgctgcgcctgctcgattgtgaactcaacgagactcgcccagtcacctacacgcatcaagcaaacagatagataacaatacctttctagtgtcgctgtgtgcctatctaggggtgaggaagattacattgtgatagccggctcagaaattagcccttttggactctgtaggctacgtacctataggacacccttaggagaataatgggttaaacaaaggctcaatgaagcctggttgatttctgcatgaaatatttttcaaaacggtgatgtcctcctgtggatgaatatacttgtctttccgacagatagctcagcacgattgttgtctgctcgctttgcagaccattttgaccaattttaacacgtaaagccttaattgtgtccaattaaaatggttaaatgtaggtttgacattctgacaccttccgacaaatatgtgtctgaagtatttccaaaatatcaatatcttcatgcaaacaacaactgtaaaacgtatttttcaaatataccagccattcgtacaatgaggagtggccctaatgtaggaacactgaagaggatgaggtcgttggttggatgtccaccgttggtgtacactttaccagaagagtaacgtagccatggatcgtgcgtgatgcgtgggacataagcaaaataaacaaaggctgtgcttatgtcttcaatatgccacgggaagaccgcaaggtagcctgagtgctgtgcagctggaataaagagatcgcgcctcacgttgtggacgtcgcgacgctggaccatccgacgcgggagcggcttgaacgcttgcaggagctcctgtttagcacatgcacaggacgcaaggaacaccggttcaacgtgagtagaaaagtgcttggcgcttacctggtacggtactactcgcagcttaaagcgctagttcctgcagtgccgatcatcatcctgcttagtatctgcgggcatctcgtcaactgcattgcttgagtggtctgtagctggcggctccacctgctcaagaccaagaacaaactcaagacaaggcgcacacgttgccgagaagatggccaccttttggctgtgattgatgggcttatcgcctcgaacaaggtcatggctgcatcgtcgaggcggtactactaaataataagggtccacacgcaacaacggaagaaggacaactgcaagagccatcagatcaagaaccaaatcgcaagcacagaaaaaagctgcgaacctgtcggccacatggcttgcgtggtacaagaggataccacgcgtgtgggactcaaccgatagaagtcggagtgtcgccacgtggtcgcctccatgaagctctccctcgacgatggcttcgttgtgaatgtcacagcggaagaattcaagaaccaagtcctcaacaccggccgcgcggaaattggactgctggagtttctaaagctagcggcgtcaacgaagggagccgggagtatcctgtgtgcgctgcacccgctgcatattccggtatattggacgagcaaatcatggtctacaggcaccaactcgtcataggaagcaccgaagaccctgcacatatcgacgcgcaagacatgctcggcattgtaggtcatgtgtgagaacggtgaagttaattcattccaatatatgtattcattcgacataacatcgctgcttaacaagacaacatattcatgtgtacacatccacgcgcgcaggtcacctaatcaaagcgtaggctgcacaccgcacgatcgcaccgcgctcactcacccaccacatgcacagatcctcagcaatactgcacggttcaaagcactgatcccgacccaatcttgatcataaacaccggccaaaacgtggctgttgacgaagctagtattgcgtgtcgttcgcaatacgctcgccatattatacttttctatccccaaaaccagacagggaaatatcacttcaagctgtatgcttgttgctgctcgacatcatggtatgtcgtgagtttcaaattgcactgtgcaagtgaacaaatagaccgtttggacggcgtggttccaagtccagaggtattacagcttgttgatctgacagcgaagtcctttgaaatttgttcccacgtaattgaagttgtggagtctttgaaaggatctaatcgcgttgtcaataccgataatatctacacctcctgcctgctactagaatcactaaggtcgattggcatgtatggtcgtggtacagtgcgcacatccagcaaacacttcccccacttcacaatgatccgaaaagctgatggaaagcctagaggctacatgaaacatggcgtgtgcttagagtaacatatcgtagcggccagttggatagatggctctattgtgaatacagtctctaatgttgacgcctcctcttcctctacggtatatcgtcgcataaaggaggaacatgttgcg

SEQ ID NO: 166 - DNA, 13737 bp, Phytophthora sp.
  source 1..13737: mol_type = other DNA
ctgcacctcagaagctcattgatttgctcgacggcgcagagacctcagtagatatcgctatgttcatcttgacgcatcctgaaccgacagacgctatcatccgggcctcccagcgtgctatcgttgatcgggcacaagtctccgagaaaagctcagctatgatgatcgaaaacggggtcaacgtatttcacgcaaaggccccaaactcatgcactggaagatggtctgttgccttgcaaaacaactggaaaggtgagatacccgcggtactgttcatctgtagcccacatacacacacaggacagggttctgcaacttgagcttttgcgcttatgcacaatcgccacaataaacggagctgttctgcgtggcggcttggagcttcggccgagtggctggctcaagagtttgtctgcagtgagaacgagagagaaatgtagaggagatgaaggtgctccgaggttttcgggatcccgagttttggagttttggatcgcccggtgctacactgctttcgtccggaccggtaagaaggacatcaaggccatctgcgaggagcacccgggctggaatcgacggacggtcgcgcattactacgccatgtacgaaaatggagagagtttgcagccaaggtgtggcattgtggcaccggtcgagcattctgaaggcgcgtgcagaaggctgcaccattcgcatgatcgtcgacgagcgaagcgcgctccaaaagaaaaaaaacatgacttgggtacgcaagtgcggggatcccggtcaagactggacgcgtggccagcttcatggtccacaacaagtggaccatcgtcaacggcgagttcattttacaaggcacgggcaactacagcgcggttgcgttcgatggagcccgccacgcagagacctttgagacgcgcacgggtcaggcgcaccttgattcgatcaagcgcgagttcgagcagctctgggaagaaggacgggtgcttcaatgggcctcgaggcgtactgcttgcttcatgtacttgggggaggacgaggatgaaacgaaaatgtacccccccccggggagagcaggacgaggacgaggacgtttatgtgtaggatatggttgaacgtgcaagccagtaagtaactttgttggtgcccactttgacttgggcttacattggccgtgcaggagtgccatcgtagttacaatagagctcgaggatcatgatgagtcctctcagtccttaccagccaaaaaaggcaaactgcacctagcgcattgagctggcaacggcagccccatcgacggcggctccagctacaacgggatctccgtcacttgactcgtcccttcagtccactgttgcttcttcgtcgctcgacaatttgatcgcgtctgctggatcgggttcgttcattgatccgagttcagtagtggtaaacggcgagctgctaccagcgagatcaagtcgacgtaccgcaactgggtggggcctcgcgccgtctcccccgacgccgcgtgctaccgtgaagcactcatcatggacgcatgcccgccaacttcgaccagaacgaggttaccaacacgtgctgggccgagtgcccgatcgcctacccggtcgagtgcggcatggaatgcatccgtcagaacgatgactgtgctatggaggtgcttaacaaggtcggtgctgttgctagcacgtctagtcatcgctaccgttggtgcgtctcagaaactgtggcagctttcaaagggtgcgacgcgcgcattcgactgcgctaacatgatgatcggtacgatgagatccatcatccgttacgtgcgtaacatcaagaccacggacccgcaggcctcgacggacaagattctcaacatcctgtaccagtcgaacaacatcgtgacggacctgccgatggccatttacatttgcatgggctgggacttgccgaggcctctcgatgtctcgggtcgtgtgcttacgacgatgaactggatcttgctaaacgccatcgggtacaaggacgacctcgtgtctagctggagcaagttcaaggctttcttgatcggcgccaacttcacggaggccgccaacaagatcaacgagacggagatcaggacgctgagtgacgccctgaaggccaactccacctgcggctacgacttgcgagtgatgacggacctcacgtgacgaggaaacgcagcataatgcgggtcaagatgagaacgtgatacttgccctcatgctgtccacatcgtgcacacggacggatgctgagtctgtcggtgttgatgcactttcagtcgtcgaccgtaatcgcttccagtttttgagggacgcgaacatttttcttgagtcagggaagaagctggtgttttacctggtgcgtcttcgttatcgagctccgattctccggcagaacgaccagtcggaagtgaaacaattgatgcagagcatgatctggtattcgatcaccggcgcgaagatcgacggtggcaagttgcacgatgccgagtggaccaagaagctggatttcttgaatcctgccaacgaaacactgtcgcagctgtgggaaagtggagagagaagcaccagctcggagcacgaacgttttgcacttattggctggcctgcttccgccgacataatgaacgcagtcgcattgtttggagaagtgtcctgtgtgcctgtaattcttgcacagtgctacaacgctccgaatgcttctcagcgccgaacttgatgaaaatggatgccatttcgctcaaactctcaaaatcttcgagaagagcaatgcatctgttgagtttgtacccctttgccgggagctaggtactgccatcgttgacttgggtgacactacactgatccaggcgtttttcaagaagtatgttgcccagctgaaagacaaggacagacagttatttctccaatggcttccagctctcgtgcgcgcatttggatgggcatacgttagtgctgccacactgaatgccatcgacgtgcaatcaactgaaattcgctcggatcgagctttggaactcgcaaacacactccatgacaacgatgctgcacttctagctctcgtagcgtttgcgctgaagaaagctcacgcacggtgctctggccacgccgatgcattcgtatcttcgggtaagatcatcacacttttaaagcttgcgctggcgtgtggaaaccctcaaatatttgccggtctatcaaccatactgaacaagatcgatggcaatcttctccacacagtgattaatgcgctctcgaaatacgtcaatgactcgagtttacctgaacaacgtgctacgctggcctcacttgcagcgagacgtcgtgaatggctattcgctgagatcgaagacacgaagcaaccactggacttgacgaagcgcgagatctaggcaatgctagccgacaacacaatcggctccgcgaagtacttttcaatcgtcgctgactttttgaaggtgtcaccgatgagcacgagattcctggggttaaggctctacctagtggacacatcgttcgagttcaagtcagtactcttggggactcgccatttcgcgcctcagtatgggggaccagatggcggaatacgcggaccactttaccggtggattggtgacgtcctgggggggggggggggggggggctttggtttgagtcgccataaccttttcggggctacaacagtgatgtcaaatggatgatgagggacggtctaaagttgtagcgggagtagtgcgtgccgcacttcatgcatgcggcaaccaatactgttttcggcatcgtcggtgacaacagctcgtccaagaacccagccatgaccgacatccttcgacgcatcatcaaaacgatgtacaaaacgcagcacgtcgaaggaaagggcactctattaagcgagttatgcagcgttatgaacccggagggtgtgcatccacgctagctcttaaacttccgcacgcatcgattcctgggactcacgcgcgtcgtccgacgcattcttctactctgggatccattggtgcaatggtacgaggagcgggccacaaaagcccgacgtgagaacgtgatgccgccggagtccttcccactagctcgggaaaagatggaatgctctcactgctggagccgatctcgaaactaaatcagattggacaggccgagtcggggggaccaatgcaacgtgcttcttggactctacaagctccgaatatccttgttggacatcaccacagccttgaaggactgaagacggagaatcggttcttccgaccggatgagctgtacgatctcgcatcgacaacccgttcgctacttcacaaagggtttcgtcgggttttcttccggcggtacaccgatcgtgataccatgaacgtctgctcctttgcctttgagatgcaactatttcttcaccccaacttcaagcatccatatggagcgctgataaaggtgttaccaaggtcaatatacaggcaggtgcctcccagcaggtagctgaccgacactacacgaagattcgacgcattatcattgacagcgtccgcagcatcatgacagcggctgacgccgagccgacgtcgactgatatcgttgccccaccgccagctactgggttatcagaggacttcgtggagctcttcacggagacagcgaacgaggtggcaccaccacatagactgcggtgcacgagcaacgcatcgacgatgagctcgaccgctggctgacaacgcctacttcgcttcaagcgattcaacccggtgcgtttgactcagttctgagcttctggaagcgccagcaagagctgggcaacttcctgcttcttcccttggttgcgcgcgtgctgttctcaatgccctcatcatcggcccaaattgaacgcgactttgggatggcaggcaggatggtgacccccaccgcagctcgatggcgccttacaacgtggacatggccacatttctgagctgcagcagaacttacgtgggtatcacccagtacccaaagttgtcgtcgagcacagcaaaggatcaagtaccgtcaaacgccatggtgagcatggagcgagagttggacgacgagttcggatcgttgatgaacaaaggcatcgagttgggactctccgacgacgaaaacgacggtattaccgaaatgtagcgggagcgggctggggcggacgaaaacgtgagagaacgggagcacgtgtggaagtggaaacgggctatagctgccgtggtagagttctagccatgcatgtgcacgaaatgagtgtctttacttttcatcaacacgttctgaccgtgtttggtgttagcttcgctatgcagcatatgtaaatagtatttcgctttcacctatgctttcgtgctggtcgtttgattactagcaactctgtaacacgcattgcagcgcgtacacggatcgcctcctgtgtttcaagctagattcgctcgatttgagatcgatctcgcagtattcgcgaccgtgggcacacaggcgggttgctggaccgggtggaagctgctgaaacccgcgtagttggtgtcctggctgccgctgcttcttttctgcggtttgctccagcggctcgtgataatgcggtggtggagcctcgcgtgcttgcagttgcttctgtagggcccatcgctgcacctgttgaggaagttggcgtcggcgcgaacgttgggacgatggccgtggacttgtctcgacttgatacagatattcacatcggtgttcttgaggacatcactgtattatgctggtcctgtggtacgaactcagagtgccatcagttcacggggttttgtctcggcagtcttcttggccaccacgatggctgggcgaaaccgttcgcctgggtggttgttagccctctcttgctcctgatcctgacgcatgcgaatcgcgatgtcgtgttgatctagcccgccgttgatcagctctactacgcgaacctctgtacgagcggttgttgcctcttgcactacttcaaatttgcaaatgtcgtggcgctcttacgcagcacgcttgtgctcctcctctaccaggttgtgttgcttgaccctggaagactgcaatgtgacttgcaaaacgcctggtgaggagatcaaaagagatcatctttgaccaataaaacgagatcttgtttgccaataaaaaaagcaatttgcagagcgaaccaagttctcgccctagctcggttcgaatgaaaagtaagcgaaccaagccccccccccccccccccctccggttcaggtaaaaaagaaaagaaaagaagggtgaaaccgtggttccagttcagttcgtcccaggggtgggaaattcacgaagtgtaggaaagtgtaatagacttgcgaggagagctgctggtctttctactcagtccacaaatggaaagttctgtccgtgcagctctctcaagtctaacctaaagctctacactgccagtcatactgtacaccactcgtacaattgcctctctcacattgatggtcgcacgctcttcaattgttttcgtgaacccagcagccgcagtcaacggcaattcgaagatgtcgttgggtacgccccgaggcttcactgctccagcaagttctcacttttcctttcgcaccgtcaagcgcagtcactggtctccaacctccatcgcctgttagtagcgttgtatcaagccctatgtcggggaagggtgcgccaggaaagcgcaagcgcaagtgacacccatttgatgacgggaagagcgatagaaatggcactgaaggtgcatgcccgaactcggagggcgatgatgacctcgatgaggatgacgtagattatgaggacgcccaaccagtaacgacacgtccaagcaagaggcctgacgtcgcggagtgcatgaagggcaacaagaataccagcctcgtatatgtgaagatgtcactaggttccttcttgacaggcgaggagaaactgttgctgtcattcgatggcattctcgtagacttgagcattggattgttaaatgcctacgcgctgctgaacatccacatgatacggtgtgtgacaaaggacttcccattcctcgatttgagcagaacttcgtttgccaatgcttgacagacgtaatgtttaacgacagcaacgtgcacatagacgctgaactacatatatcgttggagctatacaatttgttgagaggctctaacgcttctcacgggcgtcgcgctggtatcaagaacgggtggcaacaggcgcagctcgggagatgatgaccgctatccagcatgcactcaaaaatgagtttccttcgccggtttaataaggtgctgcgggtatggtgtagacagaagcactggtagcacacattattgccccagagttcgagcggactccacccgacattcctgatcgtcagcgcctcgacaacgtagtcaacgagtggcgtggagaagtccctcagcgtcggagtgagctggtcaacttcacggcccaccgactggtgcttctgacttatcgactcctgcaaatgattgaggagcgtaacgacagagttgagcaaagcgtttgcgctgtttaagtgacaggggcgtctgattttgaagttagactaatccaagctgaagttatgaagacgttcactgttctaccaacaaagctaggatttggaattagtcacctcacgatagatttgattggtttccgggaactattagtccgcaacgacattgctgttcctccgtacagatcgaagtggaatgaggtgagatacatttattggagacggttcttccgtattgacaaagtggagactatagagtttggtcatcgcagattcacacgagagatctcggcggacggcaagtcggtgaacatcaagattcggaagcccgaacgtgggccttccgagcccaatgcaaatgacctccaagctgccgacattggctctagatgggggttggatgcgagtaaatgcaacctattggtcaccacaaaccaggacgacgaaacggttgtgtgctctggcaaagagtatcgcgaagacgcttacattacgaagagcagccagaagcatttgagatggatacgggatcgtccgggcactggagctgcttttgcgagcatgccgacgaagaggagcatgttgctaaagcggtggcgggagtacgtcccatttatgacgcagcacctgcatctgctagtgacccccgtgcagcacaaatcgtaccgtcgccatcgacttcgaaggagcttctttaaaaagaagaagctatgtgagctctaccagaaacttgtatgtcacggagagcgaatttttatcgtcattgacaaccggagtaacggcgatccaaatggagcgatcaaagggaagccatcggcactcgtgcagaaattggcgctggagttgtcaaagacgtcgaactgtacggtcatcattattgccgagttccggatcagcaaagtgcactttggttaccaacaagaactgtccaagcaatacccgtatcgaaaggccgctgtccacgtacgcgcagtccacgaaagacgagccacgtacccagtttacggcttactccatttcagaaacaaaggttgttctggtatgagtgtgaacagggacgtgaatgcttcgaagaatatgctgcgcctgctcgattgtgaactcaactagactcgcccagtcacctacacgcatcaagcaaacagatagataacaatacatttctagtgtcgctgtgtgcctatctaggggtgaggaagattacattgtgatagccggctcagaaattagcccttttggaatctgtaggctacgtacctataggacacccttaggagaataatgggttaaagaaaggctcaatgaagcctggttgatttctgcatgaaatatttttcaaaacggtgatgtcctcctgtggatgaatatacttgtctttccgacagatagctcagcacgattgttgtctgctcgctttgcaggccattttgaccaattttaacacgtaaagccttaattgtgtccaattaaaatggttaaatgtaggtttgacattctgacaccttccgacaaatatgtgtctgaagtatttccaaaatatcaatatcttcatgcaaacaacaactgtaaaacgtatttttcaaatataccagccattcgtacaatgaggagtggccctaatgtaggaacactgaagaagatgaggtcgttggttgggtgtccaccgttggtgtccactttaccagaagagtaacgtagccatggatcgtgcgtgatgcgtgggacataagcaaaataaacaaaggctgtgcttatgtcttcaatatgccacgggaagaccgcaaggtagcctgagtgctgtgcagctggaataaagagatcgcgcctcacgttgtggacgtcgcgacgctggaccatccgacgcgggagcggcttgaacgcttgcaggagctcctgtttagcacatgcacaggacgcaaggaacaccggttcaacgtgagtagaaaagtgcttagcgcttacctggtacggtactactcgcagcttaaagcgctagttcctgcagtgctgatcatcatcctgcttagtatctgcgggcatatcgtcaactgcattgcttgagtggtctgtagctggcggctccacctgctcaagaccaagaacaaactcaagacaaggcgcacacgttgccgagaagatggccaccttttggctgtgagtgatgggcttatcgcctcgaacaaggtcatggctgcatcgtcgaggcggtactactaaataataagggtccacacgcaacaacggaagaaggacaactgcaagagccatcagatcaagaaccaaatcccaagcacagaaaaaagctgcgaacctgtcggccacatggcttgcgtggtacaagaggataccacgcgtgtgggactcaaccgatagaagtcggagtgtcgccacgtggtcgcctccatgaagctctccctcgacgatagcttcgttgtgaatatcacagcggaagaattcaagaaccaagtcctcaacaccggccgcgcggaaattggactgctggagtttctaaagctagcggcgtcaacgaagggagccgggagtatcctgcgtgcgctgcacccgctgcatatgtccggtatattggacgagcaaatcatggtctacaggcaccaactcgtcataggaagcaccgaagaccctgcacatatcgacgcgcaagacatgctcggcattgtaggtcatgtgtgagaacggtgaagttaattcattccaatatatgtattcattcgacataacatcgctgcttaacaagacaacatattcatgtgtacacatccacgcgcgcaggtcacctaatcaaagcgtaggctgcacaccgcacgatcgcaccgcgctcactcacccaccacatgcacagatcctcagcaatactgcacggttcaaagcactgatcccgacccaatcttgatcataaacaccggccaaaacgtggctgttgacgaagctagtattgcgtgtcgttcgcaatacgctcgccatattatagttttctatccccaaaaccagacagggaaatatcacttcaagctgtatgcttgttgctgctcgacatcatggtatgtcgtgagtttcaaattgcactgtgcaagtgaacaaatagaccgtttggacggcgtggttccaagtccagaggtattacagcttgttgatctgacagcgaagtcctttgaaatttgttcccacgtaattgaagttgtggagtctttgaaaggatctaatcgcgttgtcaataccgataatatctacacctcctgcctgctactagaatcactaaggtcgattggcatgtatggtcgtggtacagtgcgcacatccagcaaacacttcccccacttcacaatgatccgaaaagctgatggaaagcctagaggctacatgaaacaaggcgtgtgcttagagtaacatatcgtagcggccagttggatagatggctctattgtgaatacagtctctaatgttgacgcctcctcttcctctacggtatatcgtcgcataaaggaggaacatgttgcgtttaacgtcccggcctgcctcggtgaatacaacgcggggatgcagggagtcaaccgtcatgatcagcttcgcggtcggatttcgcttgccgatggtcactcatttcagaagtggcataaaaaattagcaatggctatgattgatatcacgagatgtaatgcgtatgtatgcgataacttggcacgtgatacaagcgagatggatgttgcacagcctcgcaataatgcaagggcaagcgcccgtgacgatcaccgggcgtttgtcattccacttgtgcgagaattattcaatggagattggaagaagtgcattgacagtgatgacgtaattgtgtacacttcgaacacaaaacccatgaccactgctgccaatttgaccagaaatacgaatgagttagaaacgccagcacatacatgtgtagcaaaagagtcgtggcttgtgttacaaggaaggagtcgggcaatgcacaaatggactgtatgtaagttcgagggcagggatgacacccagaaaacggattattgcgagacgcatcgagttgcactctgcaagcgtacctatcctactgaccacagaaaaccgcacttgtgtcagcagcaaaattggacgtgctggcaaaagtatcatttgttctacttgccaaaacaggtctatacagttgacggaaatctgagaaggtcgtctccaatttgtaaagcccagtgttcgttcttgaaggagcgtcgagaccaagataatactgaagagatcagcaaccacgactagcattcggctcatatatagtactgaaggtaaaagtaggcactcaatacattgtgtgcacttgaactacgactgaaaaccatccagttacttgtactcacagcatcctccctccttgtacattgaccagtgcaatgtgcgccgctttggtgcctttcgtctaattatagagctcatgcatggtgctgcatgttaccctcagcaccaatgtctcgatgctccctctctaggcggctccagaacctcgatgtcacgtagaattctgtcgccgggcccgtgatgtcgagatcgccttgcggtgaacccgaggcgttccacgagctgtcgctgtcgctagttcgcccctgcaacgggcgccgtctgaaattctgtgtccttgctgcctttcgccttgtagggttgcgccatcatctcgttctgtcggtgtctagcgtatggctgctgcatcgggcgccgttgtgccgcacatgtgcatgatgtagcacaataatgtcgggataggcgccaagcgttacgttcttgttggtgtcgacgcgagtaacttgagagacacaatagcatgggcgcgccgtgtctgatcaggatttagatcccacgttgtgattggcagtcaacgctgacattttcctagagaggcgcaaaaattgttgatcaaaagtcggtgccgtatcttaacttcactataggctagattagtctgctaccttcttttggaaaaatatcttcatgtatcattctggtatcgatagggttaaaccactagtgctacgcgaaggctggaataggatacagataatccgatctacactagtgacaataaagaaacgtaagtacgactctgttgcaagcccacagcattcatctagagaacgggtgtagctctaaagtcatcgaagttcttggcgtcgaagtaagctttattgccttcgaactccgtgacacggcacgcttgcagagccactgttttgtattggtgcctcgtggctacagcgtcaacaaatccccccccccggagtgtgcagcacacctcgcttttggtgctatcaatcatcaaacaactgatctaatcgttctctggtctgtcgaccatcatcgccattgagtacctcatcgccaaatgcaaaacccttcgggtcggcaacacagcaatagtaatagaccaacgcgataggagggtgtcttgtaccagtgttgagcctttcccataaatcgaacctcctcatccgtaaaattaacacaggacagagcgcgaccttcaagctctccaagtctatcctgaataccccgttgtttttgcgcgcggcgggcgcgggccttgccgttcgctctcgaggtgctgctcccgttcctgcaaactttcattggctctttgggtacggcgcttcttgctgcggtcttcagtgtcggccattgccttcccacgttgttattggtcgtcagccctctacaaaacaaactgttggataaagcctaaatcatacggcgccatgctcccccgactacaccaatttgaatgcgctcccattagtatagtcactacaaattatccatacaatcatgtagcaaaatccccatctatgctgcccgagtgtccagtacccaaatcgattcaccggtaaaactatcccgtcgcattgagatttttgaggcattttgctcgatggttcgcgaaagggttaacacgctgatggcgcatttcttgaagcctgtcggcggcagtaccgacagcacaaactgcgtgtcgtggtcggtccaacggcactggcgaattccagttcaacgtgcttcgtgtcggcccactgcttcgtgcagctcggacagtgcgtgtgttgctgatgtccttgcagcatatgtgactcgcaatccgttcctcatcaacaagctcatcaacatggcttgtgcacattgcagggcagagccgccgtctttccc

SEQ ID NO: 167 - DNA, 13746 bp, Phytophthora sp.
  variation 6233..6242: note = n is any nucleotide
  source 1..13746: mol_type = other DNA
aagctgcacctcagaagctcattgatttgctcgacggcgcagagacctcagtagatatcgctctgttcatcttgacgcatcctgaaccgacagacgctatcatccgggcctcccagcgtgctatcgttgatcgggcacaagtctccgagaaaagctcagctatgatgatcgaaaacggggtcaacgtatttcacgcaaaggccccaaactcatgcactggaagatggtctgttgccttgcaaaacaactggaaaggtgagatacccgcggtactgttcatctgtagcccacatacacacacaggacagggttctgcaacttgagcttttgcgcttttgcacaatcgccacaataaacggagctgttctgcgtggcggcttggagcttcggccgagtggctggctcaagagtttgtctgcagtgagaacgagagagaaatgtagaggagatgaaggtgctccgaggttttcgggatcccgagttttggagttttggatcgcccggtgctacactgctttcgtccggaccggtaagaaggacatcaaggccatctgcgaggagcaccccggctggaatcgacggacggtcgcgcattactacgccatgtacgaaaatggagagagttcgcagccaaggtgtggcattgtggcaccggtcgagcattctgaaggcgcgtgcagaaggctgcaccattcgcatgatcgtcgacgagcgaagcgcgctccaaaagaaaaaaacatgacttgggtacgcaagtgcggggatcccggtcaagactggacgcgtggccagcttcatggtccacaacaagtggaccatcgtcaacggcgagttcatgttagaaggcacgggcaactacagcgcggttgcgttcgatagagcccgccatgcacagacctttgagacgcgcacgggtcaggcgcaccttgattcgatcaagcgcgagttcgagcagctctgggaagaaggacgggtgcttcaatgggcctcgaggcgtactgcttgtttcatgtacttgggggaggacgaggatgaaacgaaaatgtacccccccccggggagagcaggacgaggacgaggacgtttatgtgtaggatatggttgaacgtgcaagccagtaagtaactttgttggtgcccactttgacttgggcttacattggccgtgcaggagtgccatcgtagttacaatagagctcgaggatcatgatgagtcctctcagtccttaccagccaaaaaaggcaaactgcacctagcgcattgagctggcaacggcagccccatcgacggcggctccagctacaacgggatctccgtcacttgactcgtcccttcagtccactgttgcttcttcgtcgctcgacaatttgatcgcgtctgctggatcgggttcgttcattgatccgagttcagtagtggtaaacggcgagctgctaccagcgagatcaagtcgacgtaccgcaactgggtggggcctcgcgccgtctcccccgacgccgcgtgctaccgtgaagcactcatcatggacgcatgcccgccaacttcgaccagaacgaggttaccaacacgtgctgggccgagtgcccgatcgcctacccggtcgagtgcggcatggaatgcatccgtcagaacgatgactgtgctatggaggtgcttaacaaggtcggtgctgttgctagcacgtctagtcatcgctaccgttggtgcgtctcagaaactgtggcagctttcaaagggtgcgacgcgcgcattcgactgcgctaacatgatgatcggtacgatgagatccatcatccgttacgtgcgtaacatcaagaccacggacccgcgggcctcgacggacaagattttcaacatcttgcaccagtcgaacaacatcgtgacggacctgccgatggccatttacatttgcatgggttgggacttgccgaggcctcttgatgtctcgggtcgtgtgcttacgacgatgaactggatcttgctaaacgccatcgggtacaaggacgacctcgtgtctagctggagcaagttcaaggctttcttgatcggcgccaacttcacggaggccgccaacaagatcaacgagacggagatcaggacgctgagtgacgccctgaaggccaactccacctgcggctacgacttgcgagtgatgacggaccgcacgtgacgaggaaacgcagcataatgcgggtcaagatgagaacgtgatacttgccctcatgctgtccacatcgtgcacacggacggatgctgagtctgtcggtgttgatgcactttcagtcgtcgaccgtaatcgcttccagtttttgagggacgcgaacatttttcttgagtcagggaagaagctggtgttttacctggtgcgtcttcgttatcgagctccgattctccggcagaacgaccagtcggaagtgaaacaattgatgcagagcatgatctggtattcgatcaccggcgcgaagatcgacggtggcaagttgcacgatgccgagtggaccaagaagctggatttcttgaatcctgccaacgaaacactgtcgcagctgtgggaaagtggagagagaagcaccagctcggagcacgaacgttttgcacttattggctggcctgcttccgccgacataatgaacgcagtcgcattgtttggaaaagtgtcctgtgtgcctgtaattcttgcacagtgctacaacgctccgaatgcttctcagcgccgaacttgatgaaaatggatgccatttcgctcaaactctcaaaatcttcgagaagagcaatgcatctgttgagtttgtacccctttgccgggagctaggtgctgccatcgttgacttgggtgacactacactgatccaggcgtttttcaagaagtatgttgcccagctgaaagacaaggacagacagttatttctccaatggcttccagctctcgtgcgcgcatttggatgggcatacgttagtgctgccacactgaatgccatcgacgtgcaatcaactgaaattcgctcggatcgagctttggaactcgcaaacacactccatgacaacgatgctgcacttctagctctcgtagagtttgcgctgaagaaagctcacgcacggtgctctggccacgccgatgcattcgtatcttcgggtaagatcatcacacttttaaagcttgcgctggcgtgtggaaaccctcaaatatttgccggtctatcaaccatactgaacaagatcgatggcaatcttctccacacagtgattaatgcgctctcgaaatacgtcaatgactcgagtttacctgaacaacgtgctacgctggcctcacttgcagcgagacgtcgtgaatggctattcgctgagatcgaagacacgaagcaaccactggacttgacgaagcgcgagatctaggcaatgctagccgacaacacaatcggctccgcgaagtacttttcaatcgtcgctgactttttgaaggtgtcaccgatgagcacgagattcctggggttaaggctctacctagtggacacatcgttcgagttcaagtcagtactcttggggactcgccatttcgcgcctcagtatgggggaccagatggcggaatacgcggaccactttaccggtggattggtgacgtcctgggggggggggggggggctttggtttgagtcgccataaccttttcggggctacaacagtgatgtcaaatggatgatgagggacggtctaaagttgtagcgggagtagtgcgtgccgcacttcatgcatgcggcaaccaatactgttttcggcatcgtcggtgacaacagctcgtccaagaacccagccatgaccgacatccttcgacgcatcatcaaaacgatgtacaaaacgcagcacgtcgaaggaaagggcactctattaagcgagttatgcagcgttatgaacccggagggtgtgcatccacgctagctcttaaacttccgcacgcatcgattcctgggactcacgcgcgtcgtccgacgcattcttctactctgggatccattggtgcaatggtacgaggagcgggccacaaaagcccgacgtgagaacgtgatgccgccggagtccttcccactagctcgggaaaagatggaatgctctcactgctggagccgatctcgaaactaaatcagattggacaggccgagtcggggggaccaatgcaacgtgcttcttggactctacaagctccgaatatccttgttggacatcaccacagccttgaaggactgaagacggagaatcggttcttccgaccggatgagctgtacgatctcgcatcgacaacccgttcgctacttcacaaagggtttcgtcgggttttcttccggcggtacaccgatcgtgataccatgaacgtctgctcctttgcctttgagatgcaactatttcttcaccccaacttcaagcatccatatggagcgctgataaaggtgttaccaaggtcaatatacaggcaggtgcctcccagcaggtagctgaccgacactacacgaagattcgacgcattatcattgacagcgtccgcagcatcatgacagcggctgacgccgagccgacgtcgactgatatcgttgccccaccgccagctactgggttatcagaggacttcgtggagctcttcacggagacagcgaacgaggtggcaccaccacatagactgcggtgcacgagcaacgcatcgacgatgagctcgaccgctggctgacaacgcctacttcgcttcaagcgattcaacccggtgcgtttgactcagttctgagcttctggaagcgccagcaagagctgggcaacttcctgcttcttcccttggttgcgcgcgtgctgttctcaatgccctcatcatcggcccaaattgaacgcgactttgggatggcaggcaggatggtgacccccaccgcagctcgatggcgccttacaacgtggacatggccacatttctgagctgcagcagaacttacgtgggtatcacccagtacccaaagttgtcgtcgagcacagcaaaggatcaagtaccgtcaaacgccatggtgagcatggagcgagagttggacgacgagttcggatcgttgatgaacaaaggcatcgagttgggactctccgacgacgaaaacgacggtattaccgaaatgtagcgggagcgggctggggcggacgaaaacgtgagagaacgggagcacgtgtggaagtggaaacgggctatagctgccgtggtagagttctagccatgcatgtgcacgaaatgagtgtctttacttttcatcaacacgttctgaccgtgtttggtgttagcttcgctatgcagcatatgtaaatagtatttcgctttcaccttgctttcgtgctggtcgtttgattactagcaactctgtaacacgcattgcagcgcgtacacggatcgcctcctgtgtttcaagctagattcgctcgatttgagatcgatctcgcagtattcgcgaccgtgggcacacaggcgggttgctggaccgggtggaagctgctgaaacccgcgtagttggtgtcctggctgccgctgcttcttttctgcggtttgctccagcggctcgtgataatgcggtggtggagcctcgcgtgcttgcagttgcttctgtagggcccatcgctgcacctgttgaggaagttggcgtcggcgcgaacgttgggacgatggccgtggacttgtctcgacttgatacagatattcacatcggtgttcttgaggacatcactgtattatgctggtcctgtggtacgaactcagagtgccatcagttcacggggttttgtctcggcagtcttcttggccaccacgatggctgggcgaaaccgttcgcctgggtggttgttagccctctcttgctcctgatcctgacgcatgcgaatcgcgatgtcgtgttgatctagcccgccgttgatcagctctactacgcgaacctctgtacgagcggttgttgcctcttgcactacttcaaatttgcaaatgtcgtggcgctcttacgcagcacgcttgtgctcctcctctaccaggttgtgttgcttgaccctggaagactgcaatgtgacttgcaaaacgcctggtgaggagatcaaaagagatcatctttgaccaataaaacgagatcttgtttgccaataaaaaaagcaatttgcagagcgaaccaagttctcgccctagctcggttcgaatgaaaagtaagcgaaccaagcccccccccccccccccccnnnnnnnnnncctccggttcaggtaaaaaagaaaagaaaagaagggtgaaaccgtggttccagttcagttcgtcccaggggtgggaaattcacgaagtgtaggaaagtgtaatagacttgcgaggagagctgctggtctttctactcagtccacaaatggaaagttctgtccgtgcagctctctcaagtctaacctaaagctctacactgccagtcatactgtacaccactcgtacaattgcctctctcacattgatggtcgcacgctcttcaattgttttcgtgaacccagcagccgcagtcaacggcaattcgaagatgtcgttgggtacgccccgaggcttcactgctccagcaagttctcacttttcctttcgcaccgtcaagcgcagtcactggtctccaacctccatcgcctgttagtagcgttgtatcaagccctatgtcggggaagggtgcgccaggaaagcgcaagcgcaagtgacacccatttgatgacgggaagagcgatagaaatggcactgaaggtgcatgcccgaactcggagggcgatgatgacctcgatgaggatgacgtagattatgaggacgcccaaccagtaacgacacgtccaagcaagaggcctgacgtcgcggagtgcatgaagggcaacaagaataccagcctcgtatatgtgaagatgtcactaggttccttcttgacaggcgaggagaaactgttgctgtcattcgatggcattctcgtagacttgagcattggattgttaaatgcctacgcgctgctgaacatccacatgatgcggtgtgtgacaaaggacttcccattcctcgatttgagcagaacttcgtttgccaatgcttgacagacgtaatgtttaacgacagcaacgtgcacatagacgctgaactacatatatcgttggagctatacaatttgttgagaggctctaacgcttctcacgggcgtcgcgctggtatcaagaacgggtggcaacaggcgcagctcgggagatgatgaccgctatccagcatgcactcaaaaatgagtttccttcgccggtttaataaggtgctgcgggtatggtgtagacagaagcactggtagcacacattattgccccagagttcgagcggactccacccgacattcctgatcgtcagcgcctcgacaacgtagtcaacgagtggcgtggagaagtccctcagcgtcggagtgagctggtcaacttcacggcccaccgactggtgcttctgacttatcgactcctgcaaatgattgaggagcgtaacgacagagttgagcaaagcgtttgcgctgtttaagtgacaggggcgtctgattttgaagttagactaatccaagctgaagttatgaagacgttcactgttctaccaacaaagctaggatttggaattagtcacctcacgatagatttgattggtttccgggaactattagtccgcaacgacattgctgttcctccgtacagatcgaagtggaatgaggtgagatacatttattggagacggttcttccgtattgacaaagtggagactatagagtttggtcatcgcagattcacacgagagatctcggcggacggcaagtcggtgaacatcaagattcggaagcccgaacgtgggccttccgagcccaatgcaaatgacctccaagctgccgacattggctctagatgggggttggatgcgagtaaatgcaacctattggtcaccacaaaccaggacgacgaaacggttgtgtgctctggcaaagagtatcgcgaagacgcttacattacgaagagcagccagaagcatttgagatggatacgggatcgtccgggcactggagctgcttttgcgagcatgccgacgaagaggagcatgttgctaaagcggtggcgggagtacgtcccatttatgacgcagcacctgcatctgctagtgacccccgtgcagcacaaatcgtaccgtcgccatcgacttcgaaggagcttctttaaaaagaagaagctatgtgagctctaccagaaacttgtatgtcacggagagcgaatttttatcgtcattgacaaccggagtaacggcgatccaaatggagcgatcaaagggaagccatcggcactcgtgcagaaattggcgctggagttgtcaaagacgtcgaactgtacggtcatcattattgccgagttccggatcagcaaagtgcactttggttaccaacaagaactgtccaagcaatacccgtatcgaaaggccgctgtccacgtacgcgcagtccacgaaagacgagccacgtacccagtttacggcttactccatttcagaaacaaaggttgttctggtatgagtgtgaacagggacgtgaatgcttcgaagaatatgctgcgcctgctcgattgtgaactcaactagactcgcccagtcacctacacgcatcaagcaaacagatagataacaatacatttctagtgtcgctgtgtgcctatctaggggtgaggaagattacattgtgatagctggctcagaaattagcccttttggactctgtaggttacgtacctataggacacccttaggagaataatgggttaaagaaaggctcaatgaagcctggttgatttctgcatgaaatatttttcaaaacggtgatgtcctcctgtggatgaatatacttgtctttccgacagatagctcagcacgattgttgtctgctcgctttgcaggccattttgaccaattttaacacgtaaagccttaattgtgtccaattaaaatggttaaatgtaggtttgacattctgacaccttccgacaaatatgtgtctgaagtatttccaaaatatcaatatcttcatgcaaacaacaactgtaaaacgtatttttcaaatataccagccattcgtacaatgaggagtggccctaatgtaggaacactgaagaagatgaggtcgttggttggatgtccaccgttggtgtacactttaccagaagagtaacgtagccatggatcgtgcgtgatgcgtgggacataagcaaaataaacaaaggctgtgcttatgtcttcaatatgccacgggaagaccgcaaggtagcctgagtgctgtgcagctggaataaagagatcgcgcctcacgttgtggacgtcgcgacgctggaccatccgacgcgggagcggcttgaacgcttgcaggagctcctgtttagcacatgcacaggacgcaaggaacaccggttcaacgtgagtagaaaagtgcttagcgcttacctggtacggtactactcgcagcttaaagcgctagttcctgcagtgccgatcatcatcctgcttagtatctgcgggcatatcgtcaactgcattgcttgagtggtctgtagctggcggctccacctgctcaagaccaagaacaaactcaagacaaggcgcacacgttgccgagaagatggccaccttttggctgtgagtgatgggcttatcgcctcgaacaaggtcatggctgcatcgtcgaggcggtactactaaataataagggtccacacgcaacaacggaagaaggacaactgcaagagccatcagatcaagaaccaaatcccaagcacagaaaaaagctgcgaacctgtcggccacatggcttgcgtggtacaagaggataccacgcgtgtgggactcaaccgatagaagtcggagtgtcgccacgtggtcgcctccatgaagctctccctcgacgatagcttcgttgtgaatatcacagcggaagaattcaagaaccaagtcctcaacaccggccgcgcggaaattggactgctggagtttctaaagctagcggcgtcaacgaagggagccgggagtatcctgcgtgcgctgcacccgctgcatatgtccggtatattggacgagcaaatcatggtctacaggcaccaactcgtcataggaagcaccgaagaccctgcacatatcgacgcgcaagacatgctcggcattgtaggtcatgtgtgagaacggtgaagttaattcattccaatatatgtattcattcgacataacatcgctgcttaacaagacaacatattcatgtgtacacatccacgcgcgcaggtcacctaatcaaagcgtaggctgcacaccgcacgatcgcaccgcgctcactcacccaccacatgcacagatcctcagcaatactgcacggttcaaagcactgatcccgacccaatcttgatcataaataccggccaaaacgtggctgttgacgaagctagtattgcgtgtcgttcgcaatacgctcgccatattatagttttctatccccaaaaccagacagggaaatatcacttcaagctgtatgcttgttgctgctcgacatcatggtatgtcgtgagtttcaaattgcactgtgcaagtgaacaaatagaccggttggatggcgtggttccaagtccagaggtattacagcttgttgatctgacagcgaagtcctttgaaatttgttcccacgtaattgcagttgtggagtctttgaaaggatctaatcgcgttgtcaataccgataatatctacacctcctgcctgctactagaatcactaaggtcgattggcatgtatggtcgtggtacagtgcgcacatccagcaaacacttcccccacttcacaatgatccgaaaagctgatggaaagcctagaggctacatgaaacaaggcgtgtgcttagagtaacatatcgtagcggccagttggatagatggctctattgtgaatacagtctctaatgttgacgcctcctcttcctctacggtatatcgtcgcataaaggaggaacatgttgcgtttaacgtcccggcctgcctcggtgaatacaacgcggggatgcagggagtcaaccgtcatgatcagcttcgcggtcggatttcgcttgccgatggtcactcatttcagaagtggcataaaaaattagcaatggctatgattgatatcacgagatgtaatgcgtatgtatgcgataacttggcacgtgatacaagcgagatggatgttgcacagcctcgcaataatgcaagggcaagcgcccgtgacggtcaccgggcgtttgtcattccacttgtgcgagaattattcaatggagattggaagaagtgcattgacagtgatgacgtaattgtgtacacttcgaacacaaaacccatgaccactgctgccaatttgaccagaaatacgaatgagttagaaacgccagcacatacatgtgtagcaaaagagtcgtagcttgtgttacaaggaaggagtcgggcaatgcacaaatggactgtatgtaagttcgagggcagggatgacacccagaaaacggattattgcgagacgcatcgagttgcactctgcaagcgtacctatcctactgaccacagaaaaccgcacttgtgtcagcagcaaaattggacgtgctggcaaaagtatcatttgttctacttgccaaaacaggtctatacagttgacggaaatctgagaaggtcgtctccaatttgtaaagcccagtgttcgttcttgaaggagcgtcgagaccaagataatactgaagagatcagcaaccacgactagcattcggctcatatatagtactgaaggtaaaagtaggcactcaatacattgtgtgcacttgaactacgactgaaaaccatccagttacttgtactcacagcatcctccctccttgtacattgaccagtgcaatgtgcgccgctttggtgcctttcgtctaattatagagctcatgcatggtgctgcatgttaccctcagcaccaatgtctcgatgctccctctctaggcggctccagaacctcgatgtcacgtagaattctgtcgccgggcccgtgatgtcgagatcgccttgcggtgaacccgaggcgttccacgagctgtcgctgtcgctagttcgcccctgcaacgggcgccgtctgaaattctgtgtccttgctgcctttcgccttgtagggttgcgccatcatctcgttctgtcggtgtctagcgtatggctgctgcatcgggcgccgttgtgccgcacatgtggatgatgtagcacaataatgtcgggataggcgccaagcgttatgttcttgttggtgtcgacgcgagtaacttgagagacacaatagcatgggcgcgccgtgtctgatcaggatttagatcccacgttgtgattggcagtcaacgctgacattttcctagagaggcgcaaaaattgttgatcaaaagtcggtgccgtatcttaacttcactataggctagattagtctgctaccttcttttggaaaaatatcttcatgtatcattctggtatcgatagggttaaaccactagtgctacgcgaaggctggaataggatacagataatccgatctacactagtgacaataaagaaacgtaagtacgactctgttgcaagcccacagcattcatctagagaacgggtgtagctctaaagtcatcgaagttcttggcgtcgaagtaagctttattgccttcgaactccgtgacacggcacgcttgcagagccactgttttgtattggtgcctcgtggctacagcgtcaacaaatccccccccccggagtgtgcagcacacctcgcttttggtgctatcaatcatcaaacaactgatctaatcgttctctggtctgtcgaccatcatcgccattgagtacctcatcgccaaatgcaaaacccttcgggtcggcaacacagcaatagtaatagaccaacgcgataggagggtgtcttgtaccagtgttgagcctttcccataaatcgaacctcctcatccgtaaaattaacacaggacagagcgcgaccttcaagctctccaagtctatcctgaataccccgttgtttttgcgcgcggcgggcgcgggccttgccgttcgctctcgaggtgctgctcccgttcctgcaaactttcattggctctttgggtacggcgcttcttgctgcggtcttcagtgtcggccattgccttcccacgttgttattggtcgtcagccctctacaaaacaaactgttggataaagcctaaatcatacggcgccatgctcccccgactacaccaatttgaatgcgctcccattagtatagtcactacaaattatccatacaatcatgtagcaaaatccccatctatgctgcccgagtgtccagtacccaaatcgattcaccggtaaaactatcccgtcgcattgagatttttgaggcattttgctcgatggttcgcgaaagggttaacacgctgatggcgcatttcttgaagcctgtcggcggcagtaccgacagcacaaactgcgtgtcgtggtcggtccaacggcactggcgaattccagttcaacgtgcttcgtgtcggcccactgcttcgtgcagctcggacagtgcgtgtgttgctgatgtccttgcagcatatgtgactcgcaatccgttcctcatcaacaagctcatcaacatggcttgtgcacattgcagggcagagccgccgtctttctc

SEQ ID NO: 168 - DNA, 21980 bp, Ixodes sp.
  source 1..21980: mol_type = other DNA
ccgctaagcttgcagtgcggtagaagctagcactcgttggattagtcatgcgttcatctgtcgccacgggatctctgtcccgccaatgcccacgcgcagagagcggggtcatgtggtgtagaagttgcagcggattgtgcctgcgagcgtgtatcgcccaccccactgtcagcttaaaggggtatggaaacaaaaattgaaatattcaaatttcgtttggaaatgagtcaagcatgacggataataaccgtaaatgataatcacacgtttgtattttgaacgacttgatacatttttcgttccaaacggtgcactcgagcaagtgctcgaagagaagcgagcggagagcccgatgcgttatgggatgtctggcgcaaacaaaaacagaaagaaaagatttcccgcgttcgtggagtagcaagacaagcgtgcttatgagctttgcccttagtggcgttgtcagcgttgtggtggtgtcaatagagagttttagtagaccgttttcgctttcccgctccgctctatggaaagcggagtcgccatcgcgcatgcgcgacccgctctgggatttgagcgtgtagcgtcagctccgctatcgtcgccattttaaaaagcatgttccactctcagtaaaggttcactagatggtgtttttctggaaaggtgggtgctcgctatttgaaatcatgcttgggagcgcgcctgaccgttatgaacctcgctgcactaagatggctgcgcagactttgtttgaaaaggcgtcctccagaaaacgtttcacggtggtaaagaacctctggctgcttcgagaaatcgctggccgcaatcctttcacggcccctgaacggtgggaacaggtgctgccttgtctaagcaagcgggctcgatttttctatgcgagatgacgacgacgacgttgagagaatgacacaccgggcgacggcggtgtctcaatctgagccctggggtgctaagttgcgctttttgcactcccaggagacttggaagagggaagtgacgtcaaggactagggcaaacgcagattggatgttgacagaagagaacaaaatcaacatccaatcggcatttgctgcgttgttgacgtcacttccttctccctatgtctcctggggtgctatgttgcgctttttgcactcccaggagacttggaagagggaagtgatgtcaacgacacagcaaatgcagattggatgttgacagaagaaaacgaaatcaacacccaatccgcgtttgctgtgtacttgacgtcacttccctctccctagtctcctgggagtgcaaaaagcgcaacatagcccccctgggcctcggttcctcggaggcggcagcttctacttcggctggactacctccttggtgcgtgattctttgacaccagtgaaccccagtgagcaacagcgccatcatgttcctggtactccttcctgcactgatcgaacggagtgcaagatcctcatggctcgctgctcatccgcccaacccgcctccacgaagtctggacttctgcgaatcggactgccatcctccccaataccaacaacccatgtcgtcgtcatcttgcacgtatatacccatcacattaccatgttccctagacgcggcaccgcgggcctcggtggtacgggctgcttcctttccgcggtgccgcggctctccagagccaaaaattaaaggctaaagaccaaagactaaagcagtcggcaaacggacagatattatgtttcgttactttaggcatcaagacagtgaaaattagcgaaagtgagtgctccatttatatatttttttcccccaatgaaatgagtccttttttcttcgtatgcttcggtttgtgatagggtaccttggtgtttatgtacacaacgcgacactgttagcgggcacaatcaatatcctgtttttatttttcaccttaaattcgaggggctgacatccgcctattggtgtggaataaagcgctcgtttgggataccagtctgagcgacaaaatttcagctctttcaatagctatgaaagaaataaactgcaaataaaagcgattttgtcgttttcgcattaacattggagcgcagtgtatgtatctgccttgaggggtgacatgaaaccattttgcttgactacatttctttttatttcttttgtgttttttgaaagtgcgtttttcagctcaagctcctgcctagtttcagcctcacttgtgctaagatcttttcttgcaatagaagaccacgcaacataggctacttttacaatgctgaattcaacagtaacactgtaatttggttagatgcaatattcacacgcacacctgaggagtaaaatgggagtcgttagtaaacgttttttattaaactatttctagatgcctttcagcctagttggacaggtatttcgcacagtacaaaagcttgaatatgatttactgcgataattttatgctttctaatattaaacaaacaaaaaaatgcccatggtctttgtagatttcgtccagccgtcaaattatgcagtctgcgcccttcactgcctggtgcttcacgacgagcaccctcttgtggtcctcttctgattttttgatagacggcatatgggcatgctgtgcggtcaacaaaaccccaacagttgtccaggggtgttcccttgtccttgacggcctaataaaaaagacaaaaaactcttacaacgcggcagtatttaaacactaccaaaacatgtgatatgggacttgttactcctctaagataaagcgtatttccattatagggttgtaaaaaactgggtatcgtaaattaatatatatatatatatatatatatattaatttacgatacccagtttttggctttcggcgggttcctggaaacttggattctttaattcattggattaagtacggttcatccatctgcacaatttcatttatatatatatatatatatatatatatatatatagttgttcctaacttctgctaagctttgaggccgtcaaactgtgcatgcgaggcccgctacgccggaattcaaaacgaaacttctgaaaacttttctaatctaccactattgcttagaagtccagggttctgtttgctaaattttgcattgtttatgcctctctagttttcaccagacaaaaaattgacgcggaatattctttcgaccgttattggtaactcttttcaaaacaccaccgggtaacatattcggttgccatattttgggcatcgcctttagtgcgagacttgtgactagaaccgatttcaaattcagtattgacgcagcattcgtgtctaatacatttagactggcatccgcgacaaacaatgacgcagctctcttgctcccaggcacttggccaaaataaggcggcctcaaaaagtaggggcaccataggttgcacttttaaaaaagctgcattcaagcctctattattttctaaatctaccaaagaaatccaaggcgaacatttccggaggaaagttaaacaattcaaaagttgcgagcgaatgtgaataaataaagttgagagcaatggtttctttggtgcagctttcggtgctcagctttcagtggcattttcgacaggagggcgcgtgcacaggtataatcggcgttcaagcgcgcgcacccgtacatctgactgcatagccataggacgtccacaaaaacgcgacgactttaccgacgccgtgctggttgcaaagtgatactcgttcacttcgtttgattatgctgttttgtgttacatagaactcaaatcgaatggtttacttttcacgcgcggggcgtacgctttacttcttgattcgacctctttcaagctgaggtcatggtgaaaaacatcggcgcgtattgagtaagtgcagccatcttgagatctaagcgatcacgctaaggccgctgagggcagtccgctctacaacttgtgaagcggagcgcacgctcactccgctaaccatacgctcaaactcagagcgggccactcatgcgcggtggggacgatgcttctcgcagagcgtaaagtagagcgaagagggctcataaaagtggcctactaatactcacagattatgaacgcgctcgtcgtgacttgtcctggaactgcccatgtacacctttggcgtatagaaaaattaacttttcaccaaacagagcagctgtgctagaaacaatggaaacgcgaaatttacagaaaccatgcagggtctcacctgtgagcacagctccagtttcgccagggtcaaccacctatgtttgttcatgtcagcgagcaggtggccgaacctctcgttgatgtgacccacgatgaggttcacagaactgaagaacaccggcaagttccgtccaaacgctcatccatgtacgaacagacggtcgggatacgccagtcgaggaagaaccatgcaaagcgtctcgccaggttggcaacaccctgcgccgatctgtcgggtgctgatattcagaggcccgcatgcggagcttctttaagcaggatagcttcctaaagggtttctcttctacgttggaaatatccagcaagccgcgttcggaaaggaagcttcggcgcttgatggcacgagggatacgaatcatagattcgatgtctcgccagcttaatctcgtcactagaagtctccttccttgagaacagcgggaattcatcgtgcagatgccttgctagccttgagcaacactgtactcgtactacgcaaaaggatgtacttgcaaatcgcaaacttcgtccttttcttttatttttctacttcgaataagtaaatctgtttcatttttaattcgagtggagcagaagctacaagagcgagtgccggcctttcagcgtccctgaccagcacgcgcgctcgtgcagtgcaagtaccgtttagagcaacatgctcatgcttataccttcggcttcactcgcacacaaggtggaacgattatatttatattttatagcttaatattttttcaggtgtgtgcctactcttttgtgttcattattgtcgccttcgtttttactacccctacaaacacgctccctttcactctcttggtattaacgtttaggtttttttgtcttactagtactataaacgtccacttgtggggctacgcaagcaaatttttcgaacccgctcaaaacgctctaacgctgaagaaaaacgctctactaaaacgcgttttttgacctccgctttccattccggcgaagcaggctgcgcatgcgcagtttggcacccccagagcggagcggaaaatgaaaacggtctactaaaactctctaatagcgtcaacgcgttacaaccgagccgttcgaagtactcctggggtgaccagcgtgtggctggccaaaggagcacgtagcttccacaacactgtcagcttagggctgaacggcgtggggaaagcaacttttgttcgagttttgagggacgggctaatctaggggaagaatggctgtttccggttgcacgaacgagggtccgagaaagaggggagtccttcctttccgtcttcttggaccctttggtacaatgcgccatttgtgagttgagctaggaggaaagctaaaaaggaaaatgttgaaattccaaaaggcggcgctgctccgaaggaatctgctacgtcacgaatacgtggcagattccccaacgttgctagactacctcccaaataggctccgcatgcatccaccaggtgcacattgaaagatcgtttatttactttaaaattagctttcttgtgcttttcaacggaagactggtgtttttgaggttagggtgcaacatgcaacacattaaagctagaaaatgagcgctgaaatttcgtttccctacccctttaaaaggacactgacaccgcccaaaatttttttttttttttcattttctgccaggcgctttattacggtgtgggaggactacccaattaatatttttcaacagtgtagcgtatatttttaataaagccaaaagacgcaattgctcgaaaccgaaagcgaaacccgcgcacggagatcggagcagtggagaggagagagtgagtggcggaagtcacgtggctacacccgaccgcgcgctttttttcccctctgcgtagcagacgacatgcgtggcggcgtagcgggaactttttgccgtgcgattcttttgcggttatgtttgttccgctcgctgttctgtacttcaagatgagaattgttttgtacattgaggagttggagatgagtaatgagtgcccggggtgaatttccgtgatcggctccgagaagaatacacttaagatgttgcgtgaagagctggctcacacgtcctgcctccgaaaaaaaagtggcattgtgcgacagagtttccgaaagatcaacgggatcgggaccgatggctggctgcgattcctgtagaacatttacgggcgcatcggaaagcggaccctacctgatttatatcccccttatattttgtggaaagtgattacattaagttcgtaggtgtcaaaaagtaaattccataccatttagttcagcgacgtttcgtccacaacatttgtttgtgatattttttgtttgtttcttcggtggtaattgtataaaaaaagaaatgtaaacatcgcaaaatgtttgagagaaaaaaaaaaggtacactatcactggggattgaaccaggtcctgccacgtgtgaagcggacgtattttcactgagctactgggggaactctttcctcagtaataatgcagccggtaaactgcaggttggaaagtttgctcccgattttcctccagcaaaagcactcccgggttgaagtcgggaagcaccacgcattggcgacattcgcacctagtaaagaaatcgtactcgtgcatattcaactcgaagtacacacctcgtgcttgacgtttgcgcgagcgatatcttcagccgcgagaaaggagcgacggctcggcgacgtcttcgtgcaaatcggcttggtggtcgggcgtgtcgtacgggaggaatacaaattcttttgatcggtgccaaatttctctttcaaagacagacagaatttgccggtaccgcgagcgacagctctgaagtagaggtcccacgcccatcgtccgctgtcatcgccgtccccgcgagtcccacgatacgcgaaacggcgcacgcacagaatgcttccggttctctggggaactttttttttttttttttcaatcaacgtattttcagtttttttagaagccacaaaaatgggtttcttatttcgtttttctatttttaatagtgagtgtgtgccttcagtgactaacgactttgattaaatttggtggtcgcgtcgaaaccttagaaaacgacccgtgaccacggaaaagagagtgagtgagactcgaaccggccagttcttgatcggcggtgtacgggcggaaagaaaccgaatttcgagccgcaaatcgtgttctgggtagttgggctcctatatgtcatgcacaactaaaaacctcggcgagcataaataccctgtcagtgtccctttaagggtgaatagactatagtatggagttgggcctcgcctgtttctgtgtgcatttgaaggctgtgaacgacagaggattgttgtgtgtgcacaactttagggcattggtgttatggtgaccgacttcgttcgtgtgaaggtgagtcgtgggtctttcttataaaccaggaagggggcgtagccgagtttgggccctttggtgtgtcatccgctttttattcttagtctcgagtttctatattgttgaaagttcaccatttctacttagcttgcccgttatttttgtttttacgagatcaaactggctcaccgacgctggttgtctgctgcaaaataatcttcctggttgagcgaagggaacggcgaatgtgccagtaactctgtgcaataaattcctgagcgacggttgaaaacttgcgcgtgtttgtcgtattttttgttttgtctcgtgacgagtagccatggagatgactccccaggttgcctctgtttttacatttaagtaaactcgttgaggttaaaatttgacaaataattaaaaggcgtgtgtaacttcagacgaaaaatgtaagcaatcaatacccttcatttaatagatatcggtaaacagtaccactgaccgatgtcatccttgtgtacttgtaaactgtcggacagaaacctaacatatggcagaacccaggaaccagcccacctgcgacttaccaattgttatccgatggtttaaatgatcgttttccatgtcagtcaagtgtgaaaaatgcgatccaagctgcttcttcttgccgaacgattgatcaacgcagaggtagcggaggacgcaaggaggttagaagggtacgagagggcataacctcagccgcgtagcctccacaagccatgctcccttgtcttctcgcctcttactcattttcctccttacaggggggatcggtggccgagtgggctgaagtgggccggtttgctcatcttgcggctgcggacgcggccgcggccaggagggatttttacgtcacgtgaccagctccatggggacaaggaagtacctagcgtccctgcctaatggcggagagatccgcatcgcttcaagcacaaaagcctaatttcgctcgcagaaactgattggagggactttcaactggaatctaattgaccgcccctttatactggagcggcaggtaaagttacggccagggagggcaaataggagccaaaataaagaaaaaaccacacgagataaaagcggtagcagtatttttataaacctccgccggcgccgcgcctcgcgccttctgttgtggtcgaaagcttcttgcggcaaaagaactggtcgtgaaagagaaacgttgtttactcatcgaccctgacgaatgcgaggtccgactacgactgcactggacaccgattcacataagcgacgaagcagtacggagggccctggagccttacgggaaggtgaacgaagtgtcccgggacacgtggagggtggaaggattccagaatgttcagacgacaacgagatttgttaaaatgaacttcaaggagggcacgacaaaagatcatctcccgcaccagctggttatgttcggcagcaaggtcctggtcgtcgttccagggagggcaccactctgcctccgatgcaagaggacaggccacattcgcagagagtgccgcgttccccactgcgacaagtgcaatcgttatggccacgagcaagaggactgcattcgaacatatgccaccgtgatgctgcctgctcctgggcaagacaactcggagttcttcatcgatgaagaagaagctgagaaaggcgaagacgacattcgacatccagtcactacctgtgacccgaagtttacagacggacgacaggaacacctagaacgaaagaatgacaccaccttgtcaagatgtccaactggccgtgagggaggccctgcacgagaggacgacagtttgacgtctaattgccaagctgatcgtgaaatggacctatcccggaagaacgacaccatctcatccggtcctctggccggtcgagagggagacctagcacgggagagcgataccatcttgccaagttgcctgggagctgacaaccccgcggttgggaacgccagtccggacgtcgacggtgctgcatgggacccctcaaaggaccagtcaacgagaccagcttgcatgagcgatcaccattcggacatcacgtccgaagacgacctggaaatggatgaaggtgctgacccctcaaagaggcctttagacctcgtagaggaggggcctgactggactccagttcacgggaggaagaaacggtgcaagcctcgccctcccccaggcaatggacgagagcgagcctcgtagaaggtggttactttctggttacatccaaactgtgaacgctttaggtcatgtctttcttagattcattttcgctttactagtgccagttgcaaagttacgcctgatgtagcttccatgtgaggttgttcatatgtcgctttccaatgcgcgcttcctcctccaatcccaacaatgcttccgacaaaaaaaaaacaactggcccttccactaaaggtttaacatttggaaccctcaacattagaggactaaactccactcgaaaacaataccagctgctacgtttgcttcacgaggagcaattagactttttggccttacaagaaacaaaaatggcggaggaagagcaggtgacgagggcgttacagccttttcttacctcgtacgaggtatgcgtagcgcatgcagttggcactgcaggtggttgttttttattccttaaaaagtctgttcccctttcagatgtgagtgtcattaccgatgaccatgggcgttttattttgtgtgactttaatttgttggaagggcagtggagagtaatctgcgtctatgccccttgtaaagttagtgaacgggaggcattcttccaagggatttcacattacattaaatgtgatcggatcactatacttctaggcgactttaattgcatttgtgaagcaagagacagaactccattcacgcgcgtaagtgattctagtgcaaatgtcctgagtgaaaaaatcgctgagaataatttggaagatggtttttacatttcaaaaaatataaagaaaattcagttcacacactttcagaaatcctatcacgcacgacttgaccgcatttatttttctagcgacattgtaaataacattggatcttatcacgtaaaacctgtgttctttagtgaccactgtctcgtaaatgtcacaattggagaaaaccaaacccctaggtcaaagtttaactggcgattgtggaagttgaacgcaggcctacttaaagacaagacatttgaagctgcagtggacgatctccttgatagaacggttgagcaaagcgggatgtgccccttagaacggtgggagcggttcaaagaggaggttaaaatgtcagcaattgaaagatccagcacgctcaagttttacgccagggcagaagagcgaaaactgcagcacaatttagaggccctgagtgaggcagaatgtactaatcctggtcaaggagtaaaagacacagaaaatatcaaagcccaactcgaacattttcagaaagcgcgatatgaaggcgctgtggtccgcgcaagaacgcaaaggtttctttgcggcgaacaacctaccaagcaagcttggatagccgaaaaaagatatgcaatgtccaaagaaataaccgaaatcgagaggaaaggcaccctcaccgcggatagcacaaacatcgaggaagcgtttgtagaacattaccgacggattttttcactcacttcaggaaggcacgattgtgaaatgagagacctcctgtcgcttatgccgaggctagacgacaacacgcgggaatggcttgaggaacccatcagcgttgaagaagtagaaagagcaataagtgacctgcccgggggtaaaacgccaggccctgacgggctttgttcaactttttacaaaaaaatcaaaagtcggctgtgtcccattttgctcgctgtcatcgaagaatcttataagagaaaagtattgccgctgtctttcatgaaaactcacacggttttaattccaaaatctgaggatatcgccaagttgcgtcgtgtagagggctataggccaataagtctctgcaatgtagattataaaatatttgcaaaaattctcaatagaaggctgcagcatgtaatatgccaattggtaggcgatcatcaaacatgtggtataaagggtagaacaatacaaacaaatattcacgtagccagaagcattctagactgttgtaccgatagagaagatcagattgccatgctacagattgacctcgagaaggcatttgaccgtgtgaaccataaatttctctgggccattttgcgacatgttaaccttggacacgttttatatgacagagtgtgaatggcatatcaaaactgttccacacgactgagagtaaaccgcaacgtaactgagagcattcccgtactgtcctcagtgcgacagggttgccccctctcaccattgttgtttgcactttatttggaacctctctgtttgagcgtcgcgaacaaggcgaatgtacaaggttttcgtttcaacgcgcttgaagtcaaggtattggcgtacgccgatgatgttgcagttttctgcagcgataaaagaagtgtgaccaacgccatcgcattggttaaacacttttgcgacgttagtggtgcggctgtaaatctagaaaaatgctacgatttttggcacggctcatgggctacaaagccattagagttcgaaggaatcaaatggggcttgacgcctacaaaataccttggtgtgccactccagcatatgcacaatcctggtgtttactggtccgaagcaacagccgaactgaaacggaaggtatcacgctggccgaaccgtgatttgtcaatttttgcgagggcaacggcctgtaacatcttccttgtcgccaagctcatgtatgtgcttcaagtgttgtaatgtactcgaagttgtatgcaaaaagtccatagattctgtgctatgtttatctggaaatcgagttgggaaccgatgagaagagataatcttttccgtcgcatctctcaggggggactgggccttgcacacctgtttgtacgaaaacttgtgtcacgattcctttttctacgagacatcgaacaaccatttatgcgcactgtcattcaaacaaaattgacgtggcacttgcctacatttttggtctcaagctgcggggagcaaccatccaaaataggaggttttctcaaagaggttgtcgatacgtacaattttttgtcagttcgcttttccagggactttttgtcatctgtaaataggaagggcctgtctaatgctctgtatgacagtctttttccagagcccttgtatcgcgcagtgcacaaacaaagccctggccaggatgttctttgtcgtgataaaaaaatggcgatcccgccgcgtgcaaaaagtttcttttttaaacttcacacctcgaccctcccagtgaaagcatggctccacgagaaaggaatttttgttccttggaccaccaactgcctattgtgtaaaacgcccgagactatagagcacgtatttattttttgttgggacgcccttttgttttgggacgtgttacagaggacattgaaaaaggacttagaaataacgtcacaatcgattcgttttcttccaattacttctcatgaacttgtgccgtacgacctcataatgctcgttggtctatacagtatctggtgctccagaacggctgttagaaacgcagatcttaacccacggccagttgaagcatacttcgtggaatttgtaacacaaatacgttgtatctacacggatcaagatgacctgccttcgtgggtaaagaaatgtgaaaaaatatgtgaaaactccaaacgttcttaatgatatgtgctaagcaaatgtatatgtaatttgaacatgccgttggtgaataaaactgttataaagacaaaaaaattctgttgtggtcgagaggttaaagcgccggcgcttgtcgtcgcggcgtgaaagttccgggttcaaatcgcactaaagactttttttttttttttgtattttgcgcgtgtcttacttttgaactgtgatccttttttggaaatcgtccacttgcactactgcgccttacacacttttactgttagtcccacctgttcaatcgaaacaccgggaagaagaaaaaaaaaaaagatcaacgcaagttaacgcgctaatgcaataatttcgtaatgttcattaaaaggaaaccaagctaacaacatcagtatggctttcacacaagcggagccgaaacaagcatcctttccccagcgtttacaattttatctgttttcaaataacgctcttgcttcgattcctttcaataacaagagacgcctatttaggactaataaaaactgcagttgtagcaattaaaaaaaaaacaagcaaaaaaaaaaaaaaaagactagcagctgtggatacattgattgagcggaatcctacaggcaaggcagcaggtcaaacgtctgagaaagtagtaaaactgaactaaaagagatcatacttttacttgcatggaatgagataaaaagtatatttatactctttacattttgttgtggcaatcgttttgtaatattaacacattacttgttgaattttagttagactagcagacgatcacgaccaaatgcaaaaatgaatcaggcatcgaccatcgcaaaccctctctctcatgcaaacacctaaactgactttggatcaagaaatggaattaattataattaattccatttcttgatccaaagtcattttaggtgtttgcattagagagaaggtttgcgatggtcgatgcctgattcatttttgcatttggtcgtgatcgtctgctagtctaactaaaattcaacaagtaatgtgttaatattacaaaacgattgccacaacaaaatgtaaagagtataaatatactttttatctgattccatgcaagtaaaagtatgatctcttttagttcagttttactactttctcagacgtttgacttgctgccttgccagtaatatttcgctcaatcaatgtatccacagctgctagtctttttttttttttgcttgtttttttttttttttttaattgctacaactgcagtttttattagtcctaaataggcgtctcttgttattgaaaggaatcgcagcaagagcgttatttgaaaacagataaaattgtaaacgctggggaaaggatgcttgtttcggctccgcttgtgtgaaagccatactgatgttgttagcttggtttccttttaatgaacattacgaaatgattgcattagcgcgttaacttgcgttgatcttttttttcttcttcccggtgtttcgattgaacaggtgggactaacagtaaaagcgtgtaaggcgcagtagtgcaagtggatgatttccaaaaaaggatcacagttaaaaagtagagacacgcgcaaaatacaaaaaaaaaaaaaaaaagtccctagcgcgttttgaacccggaactttcacgccgcgacgacaagtgccggcgctttaacctctcgaccacaacagaaggcgcgaggcgcggtgccggcggaggtatataaaaatactgctaccgcttttatctcgtgtgtttttttctttattttggctcctatttgccctccctggctgtaactttacctgccgctcctacagtataaaggggcggttaactagattccagttgaaagtccctccaattagtttctgcgagcgaaattaggcttttgtgcttgaagcgatgcggatctctccgccattaggcagggacgctaggtacttccttgtccccatggagctggtcacgtgacgtaaaaatccctcctggctgcggccgcgtccgcagccgcaagatgagcaaaccggcccagctcgacgcgggtggagcgaaagctcgcgctgcaaaacccggggatcctgggttcgagccccactcctgcccgtttcgatctggatgagcatcgtaccggcgtgcggtcgtgtatcactactgcgtggtgcacgttaaagactccaggctagcggttgtactgcactggctaaattgctcatctacagcgcgtgactcgtcgcaactttaaatggcggaccaactacacgctgcataaatatccccacaaccccccaattcctccttacctcctcacttatcgggccaacgtgaccacaccacgtgaccgtcgcgtggttgatggttgcgggtagcagggagcgtggcgctggtgcgtttcatttatcagtcatcgcagttagaaactggcccgcgcccagcctaccgattgtacgcctgctgcgcttcgttgtgtaccctcaactataaagtaaatgcattctgttttctacagactgttactatcccaaaacgatagtattcgacgtggaacgtcagcgctgttacgattgcctgttggcgtgttttaggtaatgtaccttgcatctgcgtgcatttgcagggagttttctttttatctcctggccacttattactactgtagccaaatgaagaacaaattatatacacacatctttgcgcaactatgtcgacccgacaggttggaccaatacttaggcactttcacagcgatgagtttcgcgccagccagcaaatttgatagctgcgctctgatcactctcatgttatatcacgccacattacttttggcttatgtcttttcgttgcggccgctatgcaggtcgtccactgggacgttttattgctgtcgtgacaaattgaaccagctcaacttgactcgatgttgagatatgttttattgacaatcggaagtgcacggagcacaccacgcttcacttcgatggggtccagttacagcggcgaccaacggccgaaatttattatttatttcgtacctacatcgcccggtgggcattacagtagagggggacgaaagaaatttacaaaagcaaacgtacagcagaacaacaacaaggcaagcaggagaaacatatatactgtaataatataagaaaacgaataacagcgaaataaccatgtcaaacaggagaaacatgccaatatatactgcaataatatgaaaaaaaaaagattaacagcatgcagaagtcacacaaaatatcatcgaaccgactacaataacacaatttcgtcaaaaaatggttgtacattaggaagctctacaagtgtgtcgggcaacacatttcagtcattaactgtccgcggaaaaaacgaatattttagaacgtcggtccgtgcgcgaaattctcgcatttttttttgattactagttctaagagaactagtaatcaaagtgcttccatcgtttccgcaatcggaaatctaagagaattcttgatcgattcctgttatcgcaaaatgtatgtgtgtaatacgacaagggcttaccggtgaaaggtaacccccgctgaagaaaagccagtccgattgcggcagccgaccacgctgcaagcgcccatcccatggccgggggaaattagcgtcccggcgacgccaggcttccgttttccccgttgcgactgcggcgattgccctgatcgtcccgtgtaccagcagcggtgtgtcgtctgctcgtgatccgcctcgaccgcttgcttgtttcacgtctagccttcgatttgaaaaaaacctaccggacggagcgcgcgcaagcctgcaagaaatccttttacaatcaaccatccatctcgcacgtgacatgtcacgcgcaccaatcgtcagaaagatctacggtcacgttggccacaacatcgtttaaactttttatggctaggcttcacatattttgcaacgtggtcccacctagtgccgtcgcgttctttcttcctcctgctttttttttttttttttttttttcgtttacttgacgtttaacccatcgcgtattttgttttgccttgtttggcttagttcttgctctctttcctttacttcggcgcttacttccgccagtccgtctgctacgctgtgcccagacatttggagggccgtctgcaactttgttgttgttgttgttttcttgcactgtcgtgtgcgataacttcctattttcaccttcggttgagtttctaattcgaaatcttcatatgtgctttttggaatttaataaatatatgaataagtgcaagctccttatacatctatattcgaattttatttctctactccggaacgtctgcaatgggtcatcgtttgttgatcaacgggccgccttcgggcgtacaccagcgcatacttggagatggcaggcatgtcatctgctgcctaccactgcaaaaacaactttttgcgatgtgttagaaaatccttcttccgcttcctgaagaccgaacatacatgagtaattaagttgctgcagcattcaaattaaactaaaacaaacaactgaaaaaagtgaagctcctttttttaacgctgctgctttccatttttgtttataagcgccgcaatgattgttgtcgctgaaggaaagttttgctgggtgatttgtatctttctattgtccgctatctttttgttttattcgccgtttgttcgctacctgttccccatttctcttcattttcgtctgaaaagaaaaccccatctttcctgcaaagctcaaaatatttttgcgcggtcattttctcgttagttttttgtttttgtaatactgcagcggctggtgcgcttgctctggcaatcttaacatgttgtttgcgcacgttttaatgaccacctatttaggtaagaaactgtcacaacgcagtctgcaacggaccaacagtaacctcttacgacgtagtccgagcagctaaacgcctttcttccgcttctcagatgcactaaaaactcgggtgatcccctgagtggcgtttgagaccgctaaataaactccacctttgtttaggcgagcgttgttatttgattgtcgttgcagttgcgatcagtggataccgcttcgcaagcggactgaccgtaatgaattgttccagctgttgggctgacgaaaccgggctcgcaaagcgtctgcttacgtagactccgagtcttctagaggcgttcgccgccgctccagtgggttctcggaggaattacgccgctttgactggcggccagagctgcgtgcgcgactgcttcgagcgagctactaaccagctattacagttcattcgcaacgtacatgctacaccatcaagatcataggcgtagactacggggggtcatcggggctcgtgccccccctgataaaatctggaagggggggggggcagagccccccccccccccccccccccctctccccttcccgggccccgggccatgatccttaccgagacgctgtttacgtgccatgttatgagcttttagcgacatgtaaacaaaataacgcccacgttgccttcattgacaaaatgcatgggaaattgaattccagtgtgcttttcttagcttcaatctccagttctggcgacaaggaaacgcgcagcccccccccccccccccccccccttacccgggaaaatggaaagtctacgccactgatcaagattgccggtcttagcaatgtgagctcgttctgaggacgattactgaagcaggcgatagagcagacaacgtagcagacgatggagctcatccgggctacctagggggcgctgaggggatctactggtgatgacgtttacaggaggaaacatgcagcccttgtgctgtaggtggtattggttgaacgcatatgcattcaccctcactgaaatagatatttgtcaatcatctactgaatagccattggcagccatttaaggtcagtctggtcaaagaggatgctaatagccaacggaagctacttgaagccgttcatacgtgtaaacaataaaaaaaaatcacataattataaataatattcacttctagtaatttacagccatttcaagccgatctcataaaaaaatgatgtgtattgtcaattatggtcacttggtggagccagtgacatctaataaaaggtatttcggtagaaaaaaaaacagatcaacaagcccgaaaaggttattaatgatttagattgtacaaaatcgctatacaaatcctaactggtctatacagaacactgcattttgacatcaaaataccaagaggttcaatgtcacgagctcatgctccctctgctccataaaaaaaaaaaaaaataaaaaaaattattgacaatcaaaattttcattgggtcagacccactcattcatttccggggaaagtggcgagttgtccactccttatcgccaggatcgctttctacttccgtctcccattttacctccaagtgtcctgtattagtctcaacggtttggcaggaaagcccgccatgccattttgtatcgatggaactggaacgagaacttattacatttttactggaacggagaaaggaacggcgttcctttgttttttgctcagtggggtaatttttattttatttcaaagaagaaaattcaaaaagtataaaaaagaacaatacatttgcaaagagaaggatctcgttaactttttggttacttatcttagggtttatgttctgtgggcctcgtttggttacagtcgggtgcagcagggccagtggacgttgattcttttttaaggacccgagactgaggtaacaaaaagcaaaactttcagtcaaaggaaaagacacagaaagaggaatatttcaaagtcagcttctttctttgcttccaggaatcctcatacacccagagggctaaggccgactacagccatcgctgaacttccacagggagacctatagttacaacaaaagaacaggttgccaaatatcgaacgcacccttgtatctcaaacattggtcacttaaagggatactgaatcaaaattttgagctcacaagacaaggctgggcggataggcgggacgctgcaaaaccccaaaacatcactcatgcagcaatgtctctaacggatcgccgtatttttggaaaagatgtgcgcgattgaacacacccgacgaggctgacgagacacaaggcacgtctcgatctccattccctctcctcctcgctacgtcccgtctagatggtgaaccgaagcgaggaggtgagacgcgaggcggcttccactcattctcaatttctcccggaggacaataacgtcaaagacttcgcttgacggcgccattcttttccaatagtatggccatccatttgtgatattgatgcatgagttatgttttggagttcgtttcgtccggttcaacacttctgcggccttattttgcgaaatcaaaattttggttcagtaagatacacaaatattaaaccttattccttctccccttatctcccccccccccctcttcaaactggacaacgaatctaaccttcacgaagaaggacttgtagtttttaagattgactgtccaaaagccccaccctctccttcacctgctcgtcttgcggacggcaacatcgagaaacaactgttgttgcgttcgaacaagggaacattttctacggatgggaaacagtgaacttgtgcaacctcttggctactgcaccatccctatttctatcggaggcacttcctatatcattttgtttactgtacttgctaattgtgtcgtcgacgttattttgggatgggattttttgtcggccaccgaggcattcattgactgcgccagccgcgaacttcatttgagcacttggcagactagttacgacgtgtacgaaaattcacccatttcgcttcacaccgacgacgattacctcttgccccccctttccgctattgctatcacactcctgccggaccgtccattcgaaagcaccactggtttcattgaacccattgcctactttgtcgcaaaaaagccagttattcttccctactgcatcgccacgacaactcaaggacaagtttctcttttcgtcaccaacacatctactgagtcgcaaattgttccccgtggtgcacgtttggccactctaacatctcattcttataccacgcttgcaacgctctctgaacttacatctacgaggctaccgtcagctgcccaaagcaccgccgcacaagttgctaaaatggtagactctagcttgcctcctcaccagaaggaagccctaacaaagcttcttgtttcgtatgaacaactcttcgattttaatagccgctctctagctcaaacttcggtagtctctcattacattgacaccggcacagcatctcccattcgaggccgcccttatagaatttcacccaccgaacgtaaggccgtcgacgatcacgtcagagatatgctccaaagaaacataatcgagccttcatccagcccatgg

SEQ ID NO: 169 - DNA, 23474 bp, Ixodes sp.
  source 1..23474: mol_type = other DNA
gactctttacgggatggctcggtttaccagcctttgcccttagtttcataaggacatttttttatttggccttgcacacacatcttcagcattgaaccataactccacatatcaaaagctagttgcggggactgaggaaagtctctagtcaaggaggggtcgtcgagcggtcatcccgtaccaccatgacaactcacacaacctaatgacgtgcgcaaagaggtttatcgccgacatagtgtttgagagggatcttaaattggaccggttcaacccgtttttgagaacggccaagcaatgtataagtgcgcacacagaaacgtcgacagtatgagagttcgttgtggtgcacgaaatgccgatggggtatggtgtcagttatgtaggccaaactaaaagatatgtgaacgatatattagcagatcataaaagaaatgtaaaaaaaaaaaacatacgaattcggaaatagccgaacacctcaatgaatacgcagactgctctccagcctgggtaaaggtgaagattttagagagggaaagcaactgtcgttcgacttcagattatgaagtgctttcaatactaagaaatcataatatcatatctgttttctatcaatcccccatggaaattactcaaaattgtgtgagtttttcgatgacttctttgcatttattgaagaaaggaattataacgtgatttgggaaggtgattttaatgattacatgctaagggaaacaaattaaaaaaaagcagattgccaccctcttccatgttaatggatgcacgaatatcataaatcaaccaacgcgagtaaccaccgcgtccgaaaaactaatcgactttttaaccagctttgaactgcattagcatgatggcctgccacattagtggccatcttgcgacatttattggtatagacgaaaacccttatcttgggttgccagaggcatggtagcgctttttagacgagggaaagatgaagaaagacaagacagacacgagcgctgactgcaactatttaatcaacatggaaatgtggcatatatgggtgtgtcagcgttgcatccatttacctttttgacacggaagtgcagttcatgcgagcggcggcaaggccgggggttggctgattgataggaccgtagcgtgcatatatgctgcatttccatgtttattaaatagttgcactcagcgctcgtttttgtcttgtctttctttattttgtcctcgcctaaaaagcgctaccatgcctttggcaacccaagaccaatacaaactggcccagcattcagcattgttaaaaatctcctgcacatacaaagaaactaaagaacgtagtctgaatcaatatatcactctcgtccgcctagatagcttcaaagatagttcgtgcaatgatagctgggctgatttactcaatgaaataaacgcgaatgaggcctacgagacatctctagacatttacaggactatttacaaacgtcattttccttgtaaatttgtacgatgctctaggcgagctcgaagaccctggataacagctaaactaattacaaaaagacaaataaaaaataagctatataaaatgtttattaatgcaaaacacccatacaaacttacaattttcaagcgcaaaatcagcttgaaaatgaattgaagaaacgcagagcactttattaccacaattatttcagggtgacatcaaatcatacttacctgcgtggcgaaaaattaatttagtgttgcaccggaatgaaacgcaagaaatattgaatttataatttatagcaacgtgacactcactggtagctcccttgcaaacgtttttaataacttttttgtaaatttactaggaacttcagatacaaccgatgcttttgctgtatacagcgaatagtcggggaaactttctacctaaatcctgtaactgaaagcgaggtaatagaagtattcagtaacctaaccgttagtaatagctgtgacgttgatgatataaaaatgcagacagtactatatgctttggacacgatgagccggtaccttgcacatatttttaatcttagcctaaagacagccacattccctacgaaaatgaaaatagcgaaagtgatcgcacctcataaaaaaggtgacaaaaataacataaacctctataggcctgtgtttctccttccagtcttttcgaaaggtttagagaaaattatcttcagtcgtattaccacatttacagaaaaaaacatagcattcgtacggaatcccagttcgggtttagaaagagacgtcccacggaactatgtttgttgaacaaaaaataatatattttacgtaatttcgaagataaaaatgtagtgttaggtatatttaaagattttagtaaggcattcaacttttttaaccacaatttgcttcttcagaaactttatgtttacggtgttaaagggcatagagcagtacttattatgtcatatttagaaaaacaggcgtcaatatgttcatatcgggggtcacgcctatgatttaaacctataaaatcttgaatactcaaaggaaatatacttggttcgcttctttttaatatatacataaacgacatagctaatattgcaccacaagcaaagtttatgatttacgctgttgacacaagtatttttatatcggcttggaataggtgactggcgtttgaaccggaagtttcgtcatcccaagcgaggcaccacgtgacttcacaaatccggttcgtccggtgccggtcgtggtgcgtccagctgcatcgagagcccttctaggcgtggtagccgtgctgtattcgcggttaaaatggttcacagttccgcggtacgttgttctaacgcaagccgtagagggcataagatgttccagctcccgtgaaacaaagcatggaagcaacgatgggccatcgctgttaagcgagtgatggagcgaagtgaactgtgacagacaaacgtcggtgaccgtttatgcgcggccaatattgttgcaggccagtagaacgtgttctgtctttaggtaggggccgcgggaaataacgatctctaacagtcttttggcacccaccaaaaaggtctcgatgaatccgcgaaggggtgagcactgcttgtcgtacaaggcgtccgcgagaacgcgagatgcgatgtcgcaggcaatcagttcatggcatgacgtttcgtcgacatacagtgccatcgccaggccgcttaacaggcatgtagccagaggggaggcccatggggcccgccccccccccccccccgaaatctttcattttgctgggacctcctgtccctcctctccctcatacaacattttgtcataagcgagccccccccccgaaccaaaatcctggctacgtgcctgccgtttaattcttatatcgacagctcggattaactttttctgtaatgagacgccgcagactgttcccgcgaagcggcggtgagtgggtggcttactataatataaataaacaaaagaacaggtcagcttgctgtaatataaagaagtaaaagcaaatgggcagcaccttcatattgactgataataaagcggtagtacgaccctgcgtagctcatatcaaaatcggtgctcgttcatacatgctttcttactcgacatcattaaaaaaaaaaaaaaacgtgagagggggggggggggggtatggtagttcacgggggacaacctagttgaagtaccaaaaacgcatgagtcttaaaaagcaggggaggaagtggccgagtgggctaacgcgtctcagctcggagcgtggagcgaatgcttgcgctgggaacctcctgggttcggttccccaccacccccgcccgtttcgatctgggtgaatttcgtaccggcacgggtccgtgtgatccctactgcgtgatgcacgttaaaaaccccaggttagtggttgtactgcactggctaaatttctcatctacagctaagagaccaattacccgttgaggcgcatctccatcgaggctgtataaacatacagagcgaaacaatttttagtgttaaaaagcaaggattgtcacgtagtcagatgtcatcgaaactaacttgtgtacgaaggtggcgtttcactcgcgcgagaaaacatattagctgagttcggaatgccgtctgagcgacttctttcatgtcttcaacttttgattgcttcaagattttcttacccagcctcaggtgttctaacaaaatgagaaaagtacgccagacctccgatcgggtatttcagctggccgcgtcctacggcttacatttgcacctatttcattcgtgataggatctaacgtaaccatcaaaaataaacagaacccaaatgaaaaacgctggctcaaaaggaaaacgaaacacctaacctgagttttcttgccaagacccgttaagcgcggtgcgagtgcagcttgccgccagccgcacttgctctgcgctttcgtggccgttcttgatgcttctgcgtaccgactactacttaacatatccgtagaagtaacttgagacgttcagaagtgcgtaagtcacccagcaggagaggaaggtggcccggattgatcgggtttcaacacccgcacacgcttccatagccgtcctggggctgcgtcggctgctagctacgaaccggaagtgaagaatgcccagagtgctttgcggctgctgccgaacgccggtcacctattgcagcgataacgtactagaaaactgcatcttccaaaggctggaggcttggtctatatcaacaaatctaataataaataaagacaaaagtaaagctatgcatttttgtcctttcgcgcgacatcatcctatactcgtcccccattgaaattgtcaacacgttcaagaatttcggcgtgttgttttcaaaccacatgtcttaggcggcgcacttagattatgttgtttcaaaacttgcttgtataaaaggtctgtaacatcgacactgtctaattctaccatcaagtgttacactacttcattttaagatatcacttgtatttcatttgaactattttcatttggtatggggtaccactacaaagcaaatttaataaaatattcttatcagaacagagagcgtttagactcgtgtgtgacgtgccttatcattttccacgcaccaaatttttgaaaaactcggagtactaagaaaaaacataaacaataccaatataggctcatcataaaatatcaacaagaatatcctgagaaaaatagtttccttgtaagcttggcatcccagaaaaaaagaacacttacaaattctactctccactcagatttctgggcggttgacagatcgcggaaaaattacggccttcagatgattagaagcacacctccaatattactaaacactttcataaatttgaatgttgatataatatcttctagcgcacaggagttacgtgaatgtcttttttttaataaatatgttattgtttacggtttgtcttgttttaaggaagaattttttgagcacatttttgtcattgttgatttcatgtgccgatgatgaccagttagtcatcttttttgtttcaccacatttgcgttttgtgaatgtttccgttaatgtttccgttacttttcttactttgtacaaaacttgtccccgctgtataccttttgaggggggtggagacccgtcaagctgctttgtcagctttttttctccagcttccaccacatgtgatatagtgaatatacttattattatatcattagaggaaaatattagtgaaagagacgaccagggttaagacatctaccgaatgcattattcacgcgtccgtgcagctaaatacggaggccgcaagatttctgcggctgagtggttcgggaatgtacgggggccaaggaaaaagaagagggaaagtggtaaaggggtttggctaagggagaagaaaaacaggggagaccaggggtggcgagttacttatatgtatgtcctgtgaaataacgtttgtagctgcatttgaaaattcgtccgtgtcgttctgtgttttcttctgttgccctctcttaactctcgggtttacaactatgctcaaattacacccgctagcctgcaccctcaccaatacctcattaattgtttctgaggcaagcatcgtcccgctcttgtcgacccagttgtgacactcgtcactgttggcactgtatgtacaaacgttgttaccttgttcgagttgggccatcgcttggctcatttggaagcagatgtgtttcttcgagaactgcctaagaaagacgtatgtaaacccgactatgtttggacaccctcgtcaactggaatcgattggggattgaagaaaaggctgatcaaggcttacaggaactgcacaagagacctaatttgaagcatccgaagcgcgtgtgtgaacgtcctgggacaagacttcagaaaggcaaaggactacaatgactagaccagactgaggcagtttaattgtcttcgagagaccctgttatgtgaatataaagcttctgcttgacggcatcagcgcacgcaattcgaacacgtgatgcccgcccaagaagagcgacatttgccaggggagttcaacgaaacatatgattgtcaatccgcgtggggccgtgttatgagaacgccctgaaaggcttttggtgaagggtcctgggttttgtgtcaatgtcaaaccattgcgccttgattcttcttttcgatatccagatggtccctagtgcggctgatgttgacgaaatacctgcttttgttgatcaggttcttgaccggatagacaacctaacgaagggcggtcatatacttgagaagagaaacttccgggagctcagggtggttgagagagagttgaaagaaaaatccctacagtcgttgcaaacagataagaagagaggttttgctgtgctcccggcttcaaatgtttcgatagaaggcggagtgcatcattgtggtctacttaataaatcggaccatgcctcgacgcgtctggggagaggtatttgcaaataactcaaggagtatgaattcgaccaattattaactagaatcagaggtgcacggcgttcggaattatgtataaacccggaaatgtttttacgtgatgtcattaatgaaaatggaatggggcagaaagtcgtatcgaggctcattcagaagtttttcttgtgtggcgttgaaggacacgttatcgataagaaacgctgcggaactaataaaaatttgagggaacatcaccatgagcatcggtttgtatcttcaatggacataaaatcttgtactattccttggagaagaagctcccgactttcatttaaaattataatgtgggttatacggcgcaaaacatagtatcttcaaactcgcatcgttttgggtcactttcgagctggacagcttctttggaagttcaaaacctagacttcatagagctgtagttcactcggtattgacagcagggtagacgctatgcatgttttaggccaatcgtgtctccggttagggtaacgtgactacagtctagaagctggtgataaagcagaacacggcacctgcctggagcccaaggccgcacatagcattcactgccctataaaccttgggtacaggtgacaaatccgctagttgtggtcgttgatgccccgtaagataagccttttgtgtgtgttcagtcccgttttggcctttgcttctcttcttttctctctctccctaagctgaaagcgtagtacaaggtgagtggtcgcgtggtttgacggatgacgcattagctgttggcaatctcggaatgcgttcagccggatctagtttggcgtgttttgcgccctgcgtggctgctgcgaatttcttcttctgcaaacaatttcttcgaagaagcccaagaatttttgtgatgcgtttagtgtttggttctacaaatgacagcttgtgctacatcgtgttgaattttgacggacaccttccttctcgtttttgtgtttgagtgctgcttttgccgtggccgtgtcgacatgtatctcggattacgcctttcaagtcccgtttcggcaacgtaagtgcgctgcaacctacttcgcgacaattgatcattttctaaagttactcacccagattacctctagaattaagccgtgtctatctcctgggccggtttgctcatcttgcggccgcgaacgcggctgtggcaaagagggatttttctgtcacgtgaccagttccacggggacaaggaagtacctagcgtccctgcctaatggcggagaataccgtatcgcttcaaacacaaaaacctaatttcgctcgtagacactgactgcagggacattcaactggggtccaattgaccgcccctttatactgtaggagcggaaggtaaagttacggccaggaagggtaaatataagccaaaataaagaacgaaacaggcgagataaaatcggtggcattatatatatacctccgccagcgccggtggctcgcgtcttcttttgtggtcgagagaagcgcgtgcccccgttcggaacggtcgcaagtttgatgagctcccgaggagcgtctgcaacggctttcaccggccgtggttcatctactgaaatgtctcaggattcctaccgagtggttctgccgtctctgcccacaggtactgaagttttgaactctgtatttgcgcattgtgacacctccgggcgcccatacaagatagacgattttcgaacacaaatggaacgccatggcgttctacaagatttgattggagctggccagtaccaaatgaaccatgtttggcttttcacgtttaactctctgactgcgaagagaaagcttcttgcggcaaaagaactggtcgtgaaagaaaaacgttgtttgctcatcgaccctgacgaatgcgaggtccgactacgactgcactggacaccgattcacataagcgacgatgcagtacggagggccctggagccttacgggaaggtgaacgaagtttcccgggacacgtggagggtggaaggattccagaatgttcaaacgacgacgagatttgttaaaatgaaccttaaggagggcacaacaaaggatcatctcccgcaccagctggttatgttcggcagcaaggtcctggtcgtcgttcctgggagggcaccactctgcctccgatgcaagaggacaggccacattcgcagagagtgccgcgttccccactgcgacaagtgcaatcgttatggccacgagcaagaggactgcattcgaacatacgccaccgtgatgctgcctgctccgggggaagacaactcggagttcttcatcgatgaagaagaagctgagaaaggcgaagacgacattcgacatccagccactaccggtgacccaaaggttacagacggacgacagggacacctagaacgaaagaatgacaccaccttgtcaagttgtccaacttgcagtgagggagactctgcacgagaggacgacactttggcgtctaattgccaagctggtcgtgaaatagacctatcccggaagaacgacaccatctcatctggtcctctggccggtcgagagggagacctagcacgggagagcgacaccatcttgccaagttgcctgggagctgacaaccctgcggttgggaacgccagtccggacgtcgacggtgctgcatcggacccctcaaaggaccagtcaacgaggccagcttgcatgagcgatcaccattcggacatcacgtccgaagacgacctggaaatggatgaagctgctgacccctcaaagaggcctttagacctcgtagaggaggggcctgactggactccagttcacgggaggaagaaatggtgcaagccccgccctcccccaggcaatggacgagagcgaacctcgtagaaggtggttactttctggttacatccaaactgcgaacgctttaggtcatgtctttcttagatccattttcgctttactagtgccagttgcaaagttacgcctgaggtagcttccatgtgaggttgttcatatgtcgctttccaatgcacgcttcctcctccaatcccaacaatgcttccgactaaaaaaactggcccttccactaaaggtttaacatttggaaccctcaacattagaggactaaactccactcgaaaacaataccagctgctacgtttgctccacgaggagcaattagactttttggccttacaagaaacaaaaatggcggaggaagaacaggtgacgagggcgttacagccttttcttacctcgtacgaggtatgcgtaacgcatgcagttggcactgcaggtggttgttttttattcctcaaaaagtctgttcccctttcagatgtgagtgtcattaacgatgaccatgggcgttttattttgtgtgactttaatttgttggaagggcagtggagagtaatctgcatctatgccccttgtaaagttagtgaacgggaggcattcttccgagggatttcacattacattaaatgtgatcggaccactatacttctaggcgactttaattccatttgtgaagcaagagacagaactccattcacgcgtgtaagtgattctagtgcaaatgtcctgagtgaaataatcgctgagaataatttggaagatgttttttacatttcaaaaagtataaagaaaattcagttcacacactttcagaaatcctctcacgcacgccttgaccgcatttatttttctagcgacattgtaaataacattggatcttatcacgtaaaacctatattctttagtgaccactgtctcgttaatgtcacaattggagaaaaccaaacccctaggtcaaagtttaactggcgattgtggaagttgaacgcaggcctacttaaagacaagacatttgaagctgcagtggacgatctccttgatagaatggttgagcaaagcgggatgtgccccttagaacggtgggagcggttcaaagaggaggttaaaatgtcagcaattgaaagatcgagcacgctcaagttttacgccagggcagaagagcgaaaactgcagcacaatttagaggccctgagtgaagcagaatgtactaatcctggtcaaggagtaaaagacatagaaaatatcaaagcccaactcgaacactttcagaaagcgcgatatgaaggcgctgtggtccgcgcaagaacgcaaaggtttctttgcggcgaacaacctaccaagcaagctttgatagctgaaaaaagacatgcaatgtccaaaggaataaccgaaatcgagaggaaaggcaccctcaccgcggatagcacaaacatcgaggaagcgtttgtagaacattaccgacggattttttcactcacttcaggaaggcacaattgtgaaatgaaagacctcctgtctcttatgccgaggctagacgacaacacgcgggaatggcttgaggaacccatcagcgtagaagaagtagaaagagcaataagcgacctgcccgggggtaaaacgccaggccctgacgggctttgttcagctttttacaaaaaattcaaaagtcgtctgtgtcccattttgctcgctgtcatcgaagaatcttataagagaaaagtactgccgctgtctttcatgaaaactcacacggttttaattccaaaatctgaggatatcgccaagttgcgtcgtgtagagggctataggccaataagtctctgcaatgtagattataaaatatttgcgaaaattctcaatagaaggctgcagcatgtaatatgccaattggtaggcgatcatcaaacatgcggtataaagggtagaacaatacaaacaaatattcacgtagccagaagcattctagactgttgtaccgatagagaagatcagattgtcatgctacagattgacctcgagaaggcattcgaccgtgtgaaccataaattcctctggaccattttgcgacatgttaacattggacacgttttatatgacggagtgcgaatggcatatcagaactgttccacacgactgagagtaaaccgcaacgtaactgagagcattcccgtactgtcctcagtgcggcagggttgccccctctcaccattgttgttcgcactttatttggaacctctctgtttgagcgtcgcgaccaacgcgaatgtacaaggttttcagttcaacgcactcgaagtcaaggtattggcgtacgccgatgatgttgcagttttctgcagcgataaaagaagtgtgaccaacgccatcgcattggttaaacacttttgcgacgttagtggtgcggctgtgaatctagaaaaatgctacggtttttggcacggctcatgggctacaaagccattggagttcgaaggaatcaaatggggcttgacgcctacaaaataccttggtgtaccactccagcatatgcacaatcctggtgtttactggtccgaagcaacagccgaactgaaacggaaagtatcacgctggccgaaccgtgacttgtcaatttttgcgagggcaacggcctgtaacatcgtccttgtcgccaagctcatgtatgtgcttcaagtgtttcaatgtactcgaagttgtatgcaaaaagtccatagaatctgtgctacgtttatctggaaatcgagttgggaaccgatgagaagagataatcttttccgtcgcatccctcaggggggactgggccttgcacacctgtttgtacgaaaacttgtgtcacgattcctttttctacgagacatcgaacaaccatttatgcgcactgtcattcaaacaaaattggcgtggcacttgcctacatttttggtctcaagctgcggggagcaaccatccaaaataggaggttttctcaaagaggttgtcgatacgtacaattttttgtcagttcgcttttccagggactttttgtcatctgtaaataggaagggccagtctaatgctctgtatgacagtttttttccagagttcttgtatcgcgcagtgcacagacaaagccctggccaggatgttctttgtcgtgttaagaaaatggcgatcccgccgcgtgcaaaaagtttcttctttaaacttcacacctcgaccctcccagtgaaagcatggctccacgagaaaggaatgtttgttccttggaccaccaactgcctactgtgtaaaacgcctgagactatagagcacgtatttatcttttgttgggacgcccttttgttttgggatgtgttacagaggacattgaaaaaggacttagaaataacgtcacaatcgattcgttttcttccaattacttctcacgaacttgtgccgtacgatctcataatgctcgttggtctatacagtatctggtgctccagaatggcagttagaaacgcagatcttaacccacggccagttgaagcatacttcgtggaatttgtaacacaaatacgttgtatctacacggatcgagatgacctgccttcgtgggtaaagaaatgtgaaaaactatgtgaaaactccaaacgttcttaatgaggtgtgctaagcaaatgtatatgtagcctgaacatgccgtcggcaaataaaactgttataaaaaaaaaaaaaaaaaaattcttctgtggtcgaaaggttagagcgccggtacttgttgacgcggcgtgaaagttccgggttcaaatcgcgctacattcttttaattttttcttcatttttcgcgtgttttattttttaactgtgatcctttttacgaatcatccacttgcactactgcgccttacacggtttttactgttagtcccacctgtttaatcgaaacaccgggaaggaaaaaaaaagatcaaggcaagttaacgcgctaatacaatcggttcataatgttcattaaaatggaaacaaggtaaccgcatcgataagactttcacacaaactgagcaaaaacaagcatcctttccccagcaactataatttgatgtgtttttaaatatacaacgctcttgctacgactcctttcactaacagaagacgcctatttaatactaataaaaactgcagttgtgacaattataaaaaagaaaaaaacttccacaaaataagcaaaaagtaataaagcctagcagctgtcgatgcactgattgagcgaaattctacaggcaaggcagcaagtcaaacgtctgagaaagtagtaaaaccgaaataaaagagatcattcttttacttgcatggaatgtaataaaagttatatttttactctttacgttttgctgtgtcaatcgttttgtaatattaacacattacttgttgaattttagttagaatagcagacgattacaaccgaatgcaaaaatgaagcaggcgtcgacatcgcaaaccatacctctagcccaaacacctaaagtgagtttcaatcaacaaatggaatgaattagagcagttggaaaacggaaacaacaaattataaaaaaattcactagcacagttacctggcgaaggaagagacgggcatgggaagatattgtaaactttccgcagagtgtacggcagatgcagtaggcgtgggggaagttggtaaagaaagccagagacatgtgtgcgctgatccgtgatcatgaacaacaaactggtgagtcagaactacccgcccaatgagtttatagaacacatagggccttatctacattcttagtatgagtgcagtcaaatacaaaaaaaaaaaagagagagtttttggcgcgatttgtacccgtgactttcgcgcggcgacttcaagcgccggtgccctaacctctcgaccacagcagaaggcgcgagccaccggcgctggcggaagaatataaatatacggccgccgcttttatctcgtgcggttttttttctttaatttttctcctatttaccctccctggccgtaactttacctgccgctcctacagtacagtatgtctacgagcgaaattaggtttctgtgcttgcagcgatgcggatttctccgccattaagcagggacactagttactttcttgtccctgcggagccggtcacgtgacagtaaaatccttcttggccgcagccgcgtccgcagccgcaaatcagcaaaccggccctgacagccgggagaataatttttccgaaattctaaaatgatgtcacaaatgcagatagaatatcgatttttttattctccctgcgtttcgtgataacaccttccacggtcaccttctcgtggatacacgttttatggacacgtttcgtcaacattaacgtttcatcgacattcgttaagcgaatgtcgataatcctgcttccctgggaattacgttcagcgaaaccaggagtggcgtgaagcgcagctcatgtaaaaatcattaaaagttggtacgtgctctacatccaattggtattttttatatacaaatgagaagtcacttttggtagttatttgtagaaaacaacaatataccggaagttttgttttttttttattctaagccaagtgggtatacgactactgcatctaactacaacaaactaatgattttcagaaaaaaaaattctttgtatctgcgaaaattacagaggtaatgtaagaaacttgagcattcaaccactttctgtttaatataatatattaaaggcagaccagatatatcactttaaattatttcaatggatctgcaaaaccaatgaggtgacacagacacctcattctagtgcctacacattacgaggcccaaaacgtagcatcccaagcatacgaacaaaccctggcaggcaaagtttatcgaacagaagtactaaattattgaattctcccagtattgatgttaatttccgtgaccctttccaaatgttcaaaaaagactgcagacgagccctggtttgcactgataacgcattttcatctatttaaggcatgtatatctatttattttttgttttcaatgaatcgtaacgtacacaaaacttttgtgtcctcattactggttttctagcctcatttttggttttgatttcgcttgtttccgctttattttaaaaatccttgtttgtaaattttttgacgatttgtaataactggtgtctatttttatctttattttaatttcattatacttctgggttatgaaaagaatatcgccctacattgttcaggctgtgccgcttgtgtagttgtttgagttgcgtcattgtatttcatgtgtttttcagatatttctaaaatgactgtttctatctgttttgatgacggtggctctcttgttattgattctcactgcgacttgtttgtaatgttatttctgctgtatgaactgcaggaggcagaggcgctgtctggcatcatgcctttatctctgccccctctgcggatggataaaatccgcaaaacaaataagaaaaaaaaaataatgtttatgccgaagcccaccttacagggctcaagttgccgctcaaagaaggtttttatttatttatttatttatttatttacagatactactgccttctcaaggagggcgttgtaggacgggcttctaaacaatgactgaaacgtacaatatgggacaaggccagtgcaacaaacatattaaagagcagaaaccgtgaaaccgacaaccgaaatactgcacaacaatgaaacgaaacagtgagcatcattacactttgccatgtacattttagcatttacgttagaaagcgaacaagacattgaacgatgtcttgttcggttaaataaggtattatcatatcattattgacaacgctttaaaccggtcttgtatccactacggaagtgtatgcaagaccggtttcagtggggaatcagacgggtcaactaaggaatgctgggttttcgagtgattgcataattggacagatttaaaagctagttgcaggaagtaaggaaagtcgggagccacagaggagtcatcgggcggtcatcccgtaccaccaagacaacctaaaggcgcgcaaaaaaagtgtggggccgacgttgtgtttgagagggagtttagaccgaaccggttgaccccgattttgagaacacacaaccaatgtcaaaggtcacacagggaaaagtcgacactatgtgtgttcggtgtagtgtacgaaatacccatggagtctggtgtcagttatgtaggccagaccagcagagatgtgaacgatagattaacaaagcataaaagaaatctaaaaaacaaatgtccgaattcgggaatagccaaacacctgaaagaattcgcagactgccctccagcttgaggaaacgtgaagaatttagaaagggaaagcaccaacatgaaaagattagtgaaagagacgaccaggattatgacggtctgccaagtgcattagcgaggcgtccgcgcagataagtacggaggccggaaaatttctgctgctgacttgtgtgggatacccgggcggggggggggggggggggggggaccttggtcggtcgctgtatttatcgttcactggagtgtacaggggtctgggaaaagaaagagggaagtgggtgaagtggtttgggaaaaagagaaggaaaagaggggagagcactggtggcgagtgacttatatgttttacctgtgaaataaaatgtgtagttgtgttcgaaaattcgtttatgtcgttctgtgttttcgtctcttgcttctatcccaagtctcgggtttagaactatgctcttagcctttaacttgagatctcagatgtgggacattcggtatgcccctattccggtcacctttctaagtacccctctcccacaccccctgcttcttcgagcgacttctgaaagtggtacggtacggtcttccagcgatgtcgtaaggcagcggaaatgcacgcttcatcgcatcatctgttggatcggttggcaaaaaaaaacgcggtagtccatggggacagaatagggggcatcacgaccggtgtcggcctgtcgtaatgcctcgaatccagtggttcagcaggaagtcccttcactttacccttataatttttatactaatggaagaacactttttttttttttgtgcaaaatcactaagctagtatagttggatgttgtccctcatacgaatataacccagcaaagtttggaacacacaagggaatgattattcttttttttaaatatgttgttatgaagtttgttattttttaagtaccaccacctgcttggggtagatgtgaggtaacatgttgacataagttgtccaggtcaccggttctgaattgcgtttcatttcacgtttgataccctcaacattcaagaattgagcgactacaccactttgctttgtcgttttatttccctacctgtctgactaatgctctgaaaggaatagtgttcaatcagaggtgttatggaagcacacgccgccacgtggaacgcgtgtacgacgcttcctggtacgtggtacgtactcgttatgctccagaattcatatcactgttcgtctaggcatatttacattttttatttcttgtttgtgagctttagagacaccgtatcatcacctggggaagcaagagccacgtttttaatttatcaggggcattttcatcatcgtccgcggtctcccaagaggaaataattgaaaatatgacgatggatgaaccgtgctcgatagaaggaaacgaagtctacgaaccagccgaaaaagagaaaatgtttggtgaatcctggagttttattactattttctgtttatggactcagcgtaggtggcagcggctgtgagcaatcatatgattgataacgttaccgggagtgttcgcgagggacgaccatgcggttcctttggaaggttgcaactatcagctgccgctgtaaaacgggaacgtgtcgttaatcctcatggttttcagcttgcacgtgtgcttaggctaactcatctccctttcgggcgaaccgtcatccggaagcaaatgtggtgagcgaggccttctgggagtatggccgtggcatagtagaaatatgcgtatttgtcttctcttactttctttgctctcctgtacgtgcagcgtgcgcgtgagcctagatgtgacgagcttgcaattctagtagcgtgcccgcacgagcagaaaagagacttggcgaaaaatcacctgttcgcgatcgtctatataaagtattcactggcggccatagctgtgtgcgcgacttctgagcgcgtgctgatgactagcttcctgggttcttttgcaacgtgcattccacaccgtcaaaatggccggtcttagtagtctattaatgggggcctgttctgagcatgcgctctagacagcactcacaaatatggcgcccagtgaatactcgggacgccatatagttattgcatccgtaaaatatgcactaatgcggttagtgcaggtgagttatactgccaggggtatattatgtgggtggttaatctttgcggtaagtcggctaattaaataaaaatactgaattaactttttttaattattgaatatagacatatcgttctaattataaacttactgagcgtcacccaaaaaccactaaattaatttttttagaacgacttgaagctcgtgggaaactcgggggcgcaccaaagttgtcactcgtagggtgcctgcatgtctgtctgtcacattgtgaagacatccattgttgccctgaatgtgccagtgcgtgacgctctcgtgcactcggtgcgtgacttgggttgtaaaatggcgtctatgcattagccaaagctacgcgctcgagctgagtgacaccggattgcgcgcacttcaaaatgcataaaaaaaaaaaaaaaaacgattgggcggaaaaatggctgaggtgtcaccactcaagcaaaagcgcgcgtgtgtatgaaggtactctaatcactcgtgaagcaggcgcaaagcaagcaatggcggaacgcgatgatcatctaatcatccgggttttgccactgctagctttgcgcctgctgcacgtgtggtaactttggtgcgtccccgagtttcccacgagcttcaagtctttcttaaaagaattggtttagtggtttctaatgacgctcagtaagtttctaattggaatcatagatctattttcactaattataaagtttattaattaattctgaccggttagtggtcttctcgcaaatattagccacccacattatgtcccctttgccgtataacgcacctgcacaaaccgtattactgcattttttaggaacgtttatatatatatatatatatatatatatattgcttgacctattgtcacacaggctacgcaaggcactagcgacacgtaaatagccaagtgtgatgccgaaatacgctttacagcagacgctgtatacttttaccagccaaggaaattttcgtgtcgttggcattgtaagcaaaaaaactcccagcgaacaattgaaggcaaaacagcgcatttcctttaaaatcaggcataaagcgtacagatcagtatctgtttcaattaaagaaaaacaagcatcaaaaccacaggatcgttgataaggcgcgtgtgaacaacaggaacaccttcccatgcgtgccggtaaaggttaggtgtgcagctgcttctaaaggggttgacgcctgctaacaatgcaaagcacgttccttctccccgcgtgtgtttttcggtaaagattacggttgcgtaagctactccgagtggaaaagtatccaacagaatggaaatcacgtagtgtcgtcaccacgctttcatacataacatgtgcttcagcaatacaactcaaccaaccaccattcattgattgcattcattgattgattgcattgatttaaccttagtaaagaatatttctacagtgagagttgaaaatctcagtgtgaagcacactaatcataaagtagtcgtgaatgtcgttgtgaagtaataaagggtgtggttaagtacatttcacttgtctctggtttcactctttgtagagccccgtgtgtgaatttttaagtgacgtcgcaatgggtaattgttgtgggtgtcgtttatagcttcgttgccgaaccaacttcacagcgtggattggagccacagtttttttacagcggagcttttaagggctagtttccccaggatcgtgtccgccagcaaataattgtcgacacaacactccggacagctacctacatctatgaacgacggcggcaactcttccagcctttcgactctggcttgccgacttgcggccgccattatcatttccaccatagtgcagcttcggtggtcttcatttttcatctgaaaagaaagacccaaagctttttataaatttatgtaaacggtttgaaaggcgtgtatccatgtgacgataggtgtaccaacatatatatatatatgtatagggtgtcccaagtcaccaggctcgatctaatatggaccgcaaaaatcgacccctgcacgtagcaatctaaacttttcgtcaagggtgtatttcacaggtcggttttttcttgtaaaactacagagcgtatttctctttttgtaaaaaaaaatagggccatgaaacttgccagggtctacgggggactgcgacgcagacgacagagtcgagttgcagggtgtgtttcgtgggcgtattgatagatggcgtcgggagcagcgtctggggttgtagccgaccagcgaaagaaagcactgcagacgacacgcagacgaaatccgttggcagcaaaagcgccgtcgttatgcaaacgcgcttttttttactttacgttttattttctggtccgcattcatttttaaacaaaaagtacgttataaaaagattatgttcattttaaaagccccggtggtcgcgagcagtattgataaagaggtggcgccatctatcaatacacccgctaaacacaaacccgcaactcgactcggtcttcttcgttgccacccgccgttcactctggcaagtttcttgaccatatttgtttatacaaaggtaagctacgttttgtaattttataagaaaaaaacgacctgcgaaatacatctgtgacgaaaagtttagattgctatgtgcaggcgtcgattttaaaggtccattttggatcaaacttggggacttcatacacttttaatttgcgcttccatcctcttttaaatacagctgggagcagcgcccgtgtttgtcttctctcttgtgtacgccttttgagcgatttcaaccctggttaaagacgtccattgtgacgggcgaagcttgcgccacctagacttgaccgggtagagcgcctgcccaagctgccctgtctgtccgagcatgtaacgtgatgtgacgaacaaagtttctataacgtacaatatttattcttacaatgtgcgttacatgtttataattaaaattgataaatgctgtcacgatctcgctcgagacaacgtaacctacaactaattggtgtgccatgaatgccattgcgacgaacggttttcaccaaacatatcggtgcagtatcccttcacacccttttttatgtatttcgtttgttatgcgcgaaggctttacgacggaaatagtctgtctgtttttgctagttatttgtttaatttcgtttgtttttaaaatcggaagtatttcgcgtgtgtatacggtggagcagaagtctcattgcatgctccgaattccgccaaagttccctcgggtgttcaaacgacgaaacaggagtaccgtcaacaacaacagtcaaggtaagaagacatgtgaaagatccttcgtttcaagggatgatttatatcctcataaaagaaattgctcttcttgtttgtgtttgctgctgattgaatctatcagaggctgaggggtagtacttcttcttgtttaactttctcgttgttttgttggtcttgcgcacggtcatgatcggatgatccaattcatctcctgcaggccagactcggaattaggttttgcccgcatgatcccgcatcgcgttgccgaaatgcaaacaacttctcggcaagatagagggctcggcacgctcgcactcggcacactgtcgtgttgacgcattcgcgtttctgtttcgtggcctctgaattgcaccggctctgtcgtagatctaagtatataagggatgtcctacataacttgcgccaatatttcagaacaaatagagagctctgcgcgagtgaaacctattgtatattgctagaaagcgtcttagggaaatgcaagtttttgtgcgcctagtttttttttctttttaaattaatgaagtgtaattagcttaatttttatttaatcgtttatgggtcaaagtatgaattctagcattctaggttggattgagaaacaaccaaccgaggtgtttacgatatgatacactttctgcgtttttttttgttttttttttctaaaaagtaagtttgcgaaatataaacagagaccgggtgacaatgtgccagcgcgtcgcgctcgcagcgttctcagatgttccctgaacgagccaagttcacctcatcactggcgcgctttttcaggcggtacttggcggtagcaggtgctcg

SEQ ID NO: 170 - DNA, 16412 bp, Ixodes sp.
  source 1..16412: mol_type = other DNA
acagctttggcattcagaacagcgtacccgtctttggtgactctggtgtacatgagtgcctgtttggtgacaggatcgtacttggcacacgtctcggctctgatgggggccttcagagggtcccgctgcgtcgagagaactgcgaccgtgacattggaagcttggccttcgggggctctcaagaccagcttccaggattcggtctgaaacggtcattggtaatcgctgtaattactcgaaccacttcacattgtatgtagaatgcaaacaggatttaatgctgtagtcacgtaccttacttataagtcgtttcctgcgtgaaaacaacttgcctataatggcgttcccagtttctatggttggttccagcaaggggttataggagaatggtgcaatcgcatcggctttttgctgctaattttgtttcgataacaacaaaactttcgttagatctgggtcgctaaactcgtcgagcacaactttgtgcccgaagtttgcggaacgcgctacttggactctcgcgacgctgacgtcgcgccgagcgagctgtcaatcattcgaacgctcatttctttgagaggggcagaatgtagcaaagttcatggaggcgcgcgtgcggcgcgtgaggggcgcgaggagcccgctgattgaacggcttcgccgatgacgtagcgcccatttgtccctacatccctacgccaagccaaaattaatgctttgcagattgtccctaggcgacctgctgacgctcaaaatccctccgaagtttgtgtaaaaaagaaacctcgtttgtcgaagtttttgctgacgtcaaagtgacgtttccgaactttgcgagagcagtggtttgagctcgagatcttcgcttcggatcaaggcgaagttaaactttgtcaatatggcggtgccgtacgctgaggctgagcttatcttccgccaccgtcggcgtcactaccgagaccaccggggacacctttcaagttctcccggacgacgactttcagcgacagtaccggctatcgaaagccgctgtgcgttgactctgcgacgggcttcgttcgccgcctcggaccgtggaacaacaagttctctgcgcgctacggttcttcggaaccggtagctttcaaggcatggtggcgactgtcgagcacctgtcagtctcccacatgactgtgagccgggctgtcaaagtttttgcggctgccatcgtttttttttttcgtttttctttttttttgtaatattcgaagaggtactaataaggtggtatacaattcagaatgtttggaaacaaacaaaaaccggcaaattcttgggtagggtcgagtctctcggcagccttcagaattatttccccgaaattctactggcagtcgtcactcattggcggtcaaatcagttcatcgaacgacgtatcatcgacagatcgtttcatcggcacgcgatgtaatcacatgaaagagagtgtcttccgttagggaggtatatacacattaaacattttcccacctttatacacgcaagtggggtgtcccataactaacaccctaataagtgtagcgatggaccttataaaagaattgtaaacctcacacctttaaaaatgtgtgattttttaaacacgtttcttaaaacgtgtgataatgcactacacctttttataaagatgtaaaactacaataccccttctcgtcaggcacgtagccaagggggggggggggcataaggcccgccccccccccccccgaaatcttccattttgctggggcctcctctcctccctccccctcatagagcactttgtcatcgacgccaccgcctccccccccccccccccccttaaacaaaattctggctacgtgcctgcttctcgtcaaggtgtaattaccacagtacatatttttgggggtgtacacagtggccccggactcaataatatgactgaacataaattacacaaacgagtcgccgaaacagcacgttgcttcttggcgagtgtcgaggcaatatcggccgaaaaccggcttcaatattggccggacgtacggttttgcgcctcgtcccgacatccggcaggtatgggtgtaccgatgcaaataaacgatttatgtctaatagcactggcaccactgatttcttaggaggctaaatcgcgaatagaggcctgtattgctggggtagagtggcaccaccggcagtcatagcttgacaagatcttatgcatgctatagaagaaacgtaaaaactcaattttattacgttagtgggttgttctctacgatgaaacttctatcgtgtttccgccaataacagtaatcttgtgggcaatattaactgttaacgcgttagaataccaatcttgtttaactaaatgagggtccagggcgactttgttgggcgtcaactgtgatgtgtttaatgagacaagggctaccgagagttattgtggagtcatccgtgatttcggagtcatcaaagctcagcaaacgataagttagaatgtctttactggggacattcgcatcgttttgaccgcttggacatagtgcttcatggtgaaagctttttctttgaactgcggtgagagcttccgggacaaactgaaactcggagcgtgccgttcagtcgccgaacgtgccatttatttagcaaccgaagcaagcgacgacgataagtcaatcgtgctccggccaattttttttttaatcgatgttcaaacccttgacgaatgtctatttgttttcaaagaacccgacataatcatcgcaccacgtcataaaatgctcgccctcgagcaccgcgtacaagcttccaatttttgcctgtttctcccttagacttgcgtgtattgcctcatggtgtaataggccaaagcaacaaggacaaaagcgaaaggaggactagaaaggacgcggcgtattgcctgtcgtcaagcaatggccgccggtgaggccagttacgggctcccgattcgcgattaagacttgcactgtgagagttctaacgcattacacccgccgagtgctgcacggagaacaggccccggacgaacttgccgaatgcaccgagtgcagactgatgctgtcgccatagatgtagaaaagtaccgacctcaaaccgaaactagcacctttttgttcgacgtgatgggtgggaatgcgagagttcccagtcgctgccatcgtttatctatataaacgttggttgctgcaacgtggaacttatatttgcgatgacttccacttaagcaactcggctgtcagagatatctacagccggcgtaagtttccgaaaccagctcactacaaaacagcatactcttgaggaaattgatggcactgtacgcgcaaagcttgcttcgttttaagcatagtattatgagtgaaccactgaaaggatacggctcaaatctagttctttggaacatctagcaataggtttcgtaagacattttatttccctgatgagggcattgagaacgagagctttctcaaaacaaaatatgacggggcaagatagctgccgttcaaatatgactttgcttaagtctcgggcaacgtctccatgtttagccttcccggacgctgagttaatgcgtcacaggtttctgctgtgggagctttgtcgaaaaatgttccacttttcacccatacagaaatgatgctagatctcgcggcctctgtggttgtcctgggcctttcattacacactggtaggtttcagcgtctgtacggctacaaaacgactcaaattttgcaaataaaacacgggccgtcgattcctcccttcgtgaaatataagacgcttacaattcaagctcgcgtttgagtttgtggcccgcggaacgcgatttcgagcagaaaaccaactttctctttcagttccgctgtgcgaatgcctaatcgtagcagacgaactctcgtcgtctgctctcgctcctcgcctggccgaggcatgacgggattgtcggcgctagagggctcaaagacaacttacagcgagcggcgtgaacgctcgcctccccgcgctgtctcgtgctctcgagcaccgcctagggatcgcgggggatttttcgtccaaaattgcgaagttgagcgcgcgcagggaggaggaaactttgcgggcgttcttttggtcactccccccgctacgtcaaaaagcgaagaatgttttgcaccacgagtttagctaccctgctctgatttagcagtaatggttgcacaggtattcactggacgacaaacttgagtgtgcttttccctgagcatggggaaaacgagttcacgtttataggctgctaaaacggccagtcctgatggtgcttagtgcacatttcgacatatttgcagaagctcgccctcagcacgcgctgagcagccaaggactcagctccgaccatcgatgaatactactcactgttgtacagggtgaagcaaggagacggcaggctctttaaatcgaccgggaaattcggtttcttaacctatcgcgctacgattttgtgcagcgttgcccacagatggtgcattttttttgtaaaatttgcaaagagcgaacttacctgaggaaaaagtaaagaaagaaaacggctgagctcctatggaaacgaagcgacggcaccggtcttcaaagagcacggcgccgtttcgcacaagacacaagagatggcgcaacgaacgccgccaacgaacgagcatacggcgccgagagccagcgtctttagcagacaatcttttagatgcggagcatctcttgctcgggtctatgtcccgcggcgtcgtagtccgcactcacactacgcatgcgcaactctcctccttccctctctccaaaagctgcgcgttactctctccgctttctctctctaccagctgcgtgcacttcgcgtgcgttcgctccactgatctcaatgacaattgctggatcgcgcttgccgctcccgcaagtgaagccaccggacgcaaccccgctgggatacgatttcccgatttgctagccttttgctgcggttttccagcgtgctgtagacacgttttctagtcgttcgtcgtcattcgccgaggaacttttttgagactctgtgtattgttgagacttgccgttgtgaacacgtggaaaattttacgaaagtgcagtgtcgcaggaaaaaggcacaacgcgtcgaaaggaagggctggcggcgtgttcaaagcttccttggcacaccgaagtgccgtgtctctgtgccttcgcgcgcttggataccgaccaaaaaccgacgccgtgtgaatgggtttagcgagtgcaatgtgcgtgaagccgtatcaaaaggtacaactcgtcgaaaacgtgtcgccggtgtcgcggcgtgatcaaagcttccttggcacgccgagtgatgcatcttcgtgccttcgcacgcttggataccggtcaagaattgacgccgctccaaagttctgaacgtgtgtcgcgcgtagatgcctttagatcatttatatatatcggccacggagttctggatcgtccagctgttccggtgagttgctatcaataaaagagggagatctgtacgtgtgtactatattaaccatggctatgtcccaaatctactctaatagattccgtgggagcacgaatagggcaacgttgtggagccaggggggttttcgaaagcaaaagtacaagacggcgagaatgaaaatctttaaaccgcggccgatatggtcgtgtgcaatctgttgaccaattacaattaggcgagccgcgctcaaacgtcaagtgcaattaagtaggttgataataagccagcactgatcagtgatgaggagctgttgtgcactgtattgtgtaaatcgtctagggacgaaaaaaagacgtaccttccccccatcttccgccgctagtggacgctggattaagctcgttcctaaaccgcgaggggaaaagacgttgatccagaggcacgaacagcttcacgcacattgcactcgctaaacacacacacacggcgtcggttcttggtcggtatccaagcgtgcgaaggcactgagacacggcacttcggcgtgccaaggaagtttggaacacgccgccagcccttcctttcgacgcgttgtgccttttttttgggacactgcactttagtaaagttttccacgtgttcacaccggcaagtctcaacaatacacagagtcttcaaaaaacttcttcggcgaatgacgacgaacgagtagaaaacgtgtctacagcacgctggaaaaccgcagcaaaggctagcaaaaatggcaaatcgtatcccaagcgagtgaagtccggtggcttcacttgcgctgcagcgaacaagcggggaagcgcgatccagcaattgtcatagagatcagtggttcgctcctactcacaccgcgcgcgcatgcgcaactctcctcctctagtttcctctccttcaagtgtgaatatagaccagtgtccgcgccaattccagggcgccgccatgtttatctacgctcgcaccaccacgcggagagaactggcaggcaggaggggggggggggctgcgttggcggcgttgctttggggagctggatgcggcaggctgtccgaatgcaccggcacatcgtgaacgatgtcactagaagtctccgtgacccgttcttccatagataagatgtcgtgaacattcgagaacccatctcgattaagaaaacaagaaaaaacctgtcgtcttaaatgttctcggtgtctgctgacccttgacatccgcgtttcagtccgggttcattgcgtagtaaatatttcgttaccgctttcttgtagctttcaaatgcttgattgttggcttcttgtatacgacattacattcgtggcacgtttgagaccgaccttcgcgatctgcttccctttctgcggcagcgcggctctgacgagccgaaataagtgggaagcgttcactcgatcgaacgccgttttagtgaatgaaaacgagaccacgacctttcatcgaatgactagcgaatgggtctagttacatagacagctctgattagctttcttttgtaatgtggcgccttgtctgccgctgcgaagcggcgtaaacgagggctccgagtatgttagcacgcgtttccccccccccccccccccccacacacacacaaacacacactgcgagcgtctgggttcgaaactattaattgccagttctaaaagatggtacttacttgaagtgggagctggaattctacgaggtaccaggagacacttactatcgggcaacgaagcacggtgcctgtgggggcggagtctaggaacgctactgattaatattgtgacaggcgatcagttatgatagcagacgaaacttcgactcgtttgttcagaagttcgcggtgatattttattagacctcgttacagcacaccaaggatcttaggcagtgaaattcacatcccgcaggctcgtccgtcgtagtcaaatgagtgcagtcgacgatgaggtgtaatgagctactaagcttcacaaggaaaatgcgcgtgagaaagagttttgaggaagtccaaaacaccgatccagcagacgcacgtacgtacgtttactccggacttcataaacccgacggctcaagatcaaagagcaccgccgccatcgccacccggttttctctgcactttgcgcgacgacggcactgcaacggagggcactcgcctcggcgttaacaatccgcgaaatagattaatttgccactcttgaaagcattccaaatgataaatgaaaatacctcggcgttgttgaacatctgacgacacaaccaacacaactgtgccgctggctgcgtgagcctgacacaactgtgccgagcgcctgatcggcaccgttgttgctcgtgaaggcctgcttatttgtagttgagacgatgactccacatctttcgtagtgcttgcaataacttcgaagggcaggggaaccttctcacgaggacgttgaagacactcaacaccagagccaccaaagcaatcgcacaaaccgtcgccatgtttgcttcttcttcgtcactcgcggcgcggtcaactcgttgcgagatgttttctggctcggcaagatggaaacccactgcggcaaagtggcgtatggacacacggctctcaccattacgggcactatactcacatactgcggtaaacaggaccgatgccggcgaaacggcagtcggcacaccagcgaagaagccctcaatgggaagcggcggcgcaggccgacgcagccccccctccccgtgtgcgtctgggttcgagattattgttcgcttttgctccttgcggtcgaggctaaaaagagcactttcggacaaaggtcaataagcagtggttgcgcgctgcgcgcgttcaaggggaggaagtggccgaggagagaagcgcttgcccccgttcggaacggtcgcaagtttgatgagctcccgaggagcgtctgcaacggctttcaccggccgtggttcatctactgaaatgtctcaggattcctaccgagtggttctgccgtctctgcccacaggtactgaagttttgaacactgtatttgcgtattgtgacacctccaggcgcccatacaagatagacgattttcgaacacaaatggaacgccatggcgttctacaagatttgattggagctggccagtaccaaatgaaccatgtttggcttttcacgtttaactctctgactgcgaagaggaagcttcttgcggcaaaagaactggtcgtgaaagaaaaacgttgtttgctcatcgaccctgacgaatgcgaggtccgactacgagtgcactggacaccgattcacataagcgacgatgcagcacggagggccctggagccttacgggaaggtgaacgaagtttcccgggacacgtggagggtggaaggatttcagaatgttcaaacgacaacgagatttgttaaaatgaacctcaaggagggcacaacaaaagaccatctcccgcaccagctggttatgttcggcaccaaggtcctggtcgtcgttcctgggagggcatcactctgcctgcgatgcaagaggacaggccacattcgcagggagtgccgcgttccccactgcgacaagtgcaatcgttatggccacgagcaagaggactgcattcgaacatacgccaccgtgatgctgcctgctcctggggaagtcaactcggagttcttcatcgatgaagaagaagctgagaaaggcgaagacgacattcgacatccagtcattaccggtgacccaaaggttacagacggacgacaggaacacctagaacgaaagaatgacaccaccttgtcaagttgtccagctggccgtgagggagactctgcacgagaggacgacactttggcgtctaattgccaagctggtcgtgaaatagacctatcccggaagaacgacaccatctcatctggtcctctggccggtcgagagggagacctagcacgggagagcgacaccatcttgccaagttgcctgggagctgacaaccccgcggttgggaacgccagtccggacgtcgacggtgctgcatcggacccctcaaaggaccagtcaacgaggccagcttgcatgagcggtcaccattcggacatcacgtccgaagacgacctggaaatggatgaaggtgctgacccctcaaagaggcctttagacctcgtagaggaggggcctgactggactccagttcacgggaggaagaaacggtgcaaaccccgccctccctcaggcaatggacaagagcgaacctcgtagaaggtggttactttctggttacatccaaactgcgaacgctttagggcatgtctttcttagatctattttcgctttactagtgccagttgcaaagttacgcctgatgtagcttccatgtgaggttgttcatatgtcgctttccaatgcacgcttcctcctccaatcccaacaatacttccgactaaaaaaactggcccttccactaaaggtttaacatttggaaccctcaacattagaggactaaactccactcgaaaataataccagctgctacgtttgctccacgaggaacaattagactttttggccttacaagaaacaaaaatggcggaggaagagcaggtgacgagggcgttacagcctctcttacctcgtacgaggtatccgtaacgcatgcagttggcactgcaggtggttgttttttattccttaaaaagtctgttcccctttcagatgtgagtgtcattaccgatgaccatgggcgttttattttgtgtgactttaatttgttggaagggcagtggagagtaatctgcatctatgccccttgtaaagtaagtgaacgggaggcattcttccgagggatttcacattacattaaatgtgatcggaccactatacttctaggcgactttaattgcatttgtgaagcaagagacagaactccattcacgcgcggaagtgattctagtgcaaatgtcttgagtgaaataatcgctgagaataatttggaagatgttttttacatttcaaagagtataaagaaaattcagttcacacactttcagaaatcctctcacgcacgccttgaccgtatttatttttctagcgacattgtaaataacattgaatcttatcacgtaaaacctgtgttctttagtgaccactgtctcgtagatgtcacaattggagaaaaccaaatccctaggtcaaagtttaactggcgattgtggaagttgaacgcaggcctacttaaagacaagacatttgaagctgcagtggacgatctccttgatagaatggttgagcaaagcgggatgtgccccttagaacggtgggagcggttcaaagaggaggttaaaatgtcagcaattgaaaggtcgagcacgctcaagttttacgccagggcagaagagcgaaaactgcagcacaatttagaggccctgagtgaagcagaatgtactaatcctggtcaaggagtaaaagacatagaaaatatcaaagcccaactcgaacactttcagaaagcgcgatatgaaagcgctgtggtccgcgcaagaacgcaaaggtttctttgcggcgaacaacctaccaggcaagctttgatagctgaaaaaagatatgcaatgtccaaagaaataaccgaaatcgagaggaaaggcaccctcaccgcggatagcacaaacatcgaggaagcgtttgtagaacattaccgacggattttttcactcacttcaggaaggcacgattgtgaaatgaaagacctcctgtctcttatgccgaggctagacgacaacacgcgggagtggcttgaggaacccatcagcgtagaagaagtagaaagagcactaagcgacctgcccgggggtaaaacgccaggccctgacgggctttgttcaactttttacaaaaaattcaaaagtcgtctgtgtcccattttgctcgctgtcatcgaagaatcttataagagaaaagtactgccgctgtctttcatgaaaactcacacggttttaattccaaaatctgaggatatcgccaagttgcgtcgtgtagagcgctataggccaataagtctctgcaatgtagattataaaatatttgcaaaaattctcaatagaaggctgcagcatgtaatatgccaattggtaggcgatcatcaaacatgtggtataaagggtagaacaatacaaacaaatattcacgtagccagaagcattctagactgttgtaccgatagagaagatcagattgccatgctacagattgacctcgaaaaggcattcgaccgcgtgaaccataaattcctctgggccattttgcgacatgttaacattggacacgttttatatgacggagtgcgaatggcatatcagaactgttccacacgactgagagtaaaccgcaatgtaactgagagcattcccgtactgtcctcagtgcggcagggttgccccctctcaccattgttgttcgcactttatttggaacctctctgtttgagcgtcgcgaacaacgcgaatgtacaaggttttcagttcaacgcactcgaagtcaaggtattggcgtacgccgatgatgttgcagttttctgcagcgataaaagaagtgtgaccaacgccatcgcattggtttaaacacttttgcgacgttagtggtgcggctgtgaatctagaaaaatgctacggatttggcacggctcatgggctacaaagccattggagttccaaggaatcaaatggggcttgacgcctacaaaataccttggtgtaccactccagcatatgcacaatcctggtgtttactggtccgaagcaacagccgaactgaaacggaaggtatcacgctggccgaactgtgacttgtcaatttttgcgagggcaacggcctgtaacatcttccttgtcgccaagctcatgtatgtgcttcaagtgttgcaatgtactcgaagttgtatgcaaaacggccatagaatctgtgctacgtttatctggaaatcgagttaagaaccgatgaggagagataatcttttccgtcgcatcacccaggggggactgggccttgcacacctgtttgtacgaaaacttgtgtcacgattcctttttctaggagacatcgaacaaccatttatgcgcactgtcattcaaacaaaattggcgtggcacttgcctacatttttggtctcaagctgcggtgagcaaccatccaaaataggaggttttctcaaagaggttgtcgatacgtaaaattttttgtcagttcgcttttccagggactttttgtaatctgtaaataggaagggcctgtctaatgctctgtatgacagtctttttccagagcccttgtatcgcgcagtgcacagacaaagccctggccaggatgttctttgtcgtgttaagaaaatggcgatcccgccgcgtgcaaaaagtttcttcttttaaacttcacaccctcgaccctcccagtgaaagcatggctccacgagaaaggaatttttgttccttggaccaccaactgcctactgtgtaaaacgcctgagactatagagcacgtatttattttttgttgggacgcccttttgttttgggacgtgttacagaggacattgaaaagggacttagaaataacgtcacaatcgattcgttttcttccaattacttctcacgaacttgtgccgtacgacctcataatgctcgttggtctatacagtatctggtgctcgagaatggcagttagaaacgcagatcttaaagggatactacaacgaaattttggcgcctattttatggtctatatgtgttcaaaggagcagtatcacatcgaacacaccaatatcttgttaaaaaagtcacgaaaacgaattttagaacgaattaaacgattcccaaacagcacctggtgtttgtcgcgaacgcctcgtttggaatgtccgtctaggtacattgccgggaagtgacctaggtcgtctcacgggttgtctcctggaagaacggagcagcgccgctctgcggaagtacggctcactacgtctcttctctagttctgaacgcaattatcaagccttcgctgcctgctctgccttcaccccttcgccattttcccgacgatggcgacggtggactcgttgcattgagttgtggtggcccgatcgcttgcgtacctcggtctctagaacgcttagatcatcctgtcgcgttctaatgccgagatggtgcggcactgtgcggtagaggactgcggcaacctcctgattcggtgcggaaaacctattcaccagttcccaaaggacgaacaacttcgtgcgctttggatccggctcgcacgaccgtcctccccggcgtggcttccaactacgagtgatcgcttgtgttcctatcactttcgtgatgaggactacgtgcgaagccccaggtgatggagtccttgggcttcccggtgaggaacgtacaactcaaaccaggagttttgccccgtttattttcaaagaagcggagatctggcgagcgcagcgaaccccttgacaagcgacgcagagtggtaagggagcatgttgtctgtcgagtatttccgagttctgcaatgaaagccgaaccgcatgtaagcgatttagcgagtgacgagacgagcgacggcgtcgagagtctgcgacgagcgacggagatttctcactgtcgccagtcgcatcgctcggttcttagattactggaaagagtaaagctatacgcactacgtcgtgcaccttgactggaaatggccctacgcactacgcgaagctcgtatcagcggcgagtttccaaagaggtggcgtagcatgatagtaaggtgtctgctttatacgcagcggtccgcggttcgatccccaatgagggcgacgtttccttagttttttttttttatcgctattttttttttgtagggcatttacgatgtttaagacatttctttactacaaataaaactgaaaaaaaaaaaaaagataaggattgatatttacgaaattttgcagaactgaatggtatgggactcgctttccggaggtgcaggaggggacagcggggcttgggttgccggctggacgccgcgaagcggcgtgtacaggttaagttttgcaattagcagccgcacagtgtcgccgcgaagcggcttgaacgcaggcaaggggggtaaggttcggttaaacacacgccgtccgaaaagggtgacccaaattgcatgatggcatcagctctctgcgtagtgtttatagccatttccgatcgaggtgcacgacatagtgcgtatagctttactcttctagaaaacgtcgctcaccgtcctggccacttgcccccgtcgctttcatgcggtttgcctcctcgcgcgaccgaccgagcaacagcgaagcgggtcgccgttgcttgtctcgtcacttgccaagtcgctttcatgcggtttatgcttgtctgtttcatccagcatttgagcgattttccaggagacctgtcgctcagttcgtcactcgccgaggcaaatcgcacgcagcgacctccaggcgatgaccaaagtgttcagggaatttagaaccgaacactgcgacaggcgacagcgaccagcgatagcctagctcatcgctcgccaaatcgctttcatgcggttcagccgtggccgatcgtgctttctttttcaagccgttccgctcatcatcgaagagctttggcaaggtgggttagagcgccggatcgaacgcacgcactgcagcaattcaacgatctagggttcgacccctaccttaccagtcttaacttggataaacattgtgctggcatgcggtagtatatcagtagtatgtgacgtcccttcaaaaccccggggtagcggtagtactgcactggctggatttcctacctacagtgtagagcgtatctgcaacgacaaccatccacctctctaaatttccatgcactttatttttcttaatggccagtaaatcatatgctattttcccctgagcatcaggcacctctgcgtgattccaccaacttcctggtcggaggtgcagacacatgttgggagcctacaaacgagctagaagaaacagccgttagaacaggtaaggttattgacgtaacttgaatgtcttttaacgtaacaatgtgtgggctgtgagtgctgcaccagtgggcccatactcctgggccaaaagcaataacacccccttaacattcttccgtcttctctcttgcatctctccagtgactccaagtgtgttggcatgtcggctggttgcacctgcggcctcccccactgcaataacgcggacagacagtgccagcacctttacaggtatgcaggcactccaatgggacctatactgcgtggtgtcacctgcttcaagcggaactgccagacggatccacacagtgctaatgttgctctaaggctttttgtgtctcgatcatgcacttctatgctgattcatgtctgttcataggcgcccctggagcgttgggttgcccacctgcggcctcgccgaccgctccgacacgaacagatggagcccgcaccccgacaggtatgaaggcactccggtgggacctatactgcgtggtgtcacctgcttcaagcggaactgccagacgcatccacacagtgctaatgttgctctaaggttttttgtgtctcgatcatgcacttctatgctgattcatgtctgttcataggcacccctggagcgttgggttgcccacctgcgcctcgccaaccgctccgacacgaacagatggagcccgcacccccgacaggtacgaaggcactccgatggggacctatactgcgtgggtgtcacctgcttcaagcggaaatgccagacgcatccacacagtgctaatgtttgctctaaggtttttgtgtctcgatcatgcacttctatgctgattcatgtctgtttcatag

SEQ ID NO: 171 - DNA, 21908 bp, Ixodes sp.
  source 1..21908: mol_type = other DNA
ttcattttagtaaatcacggtcgtcgcgaggagtttcgataaggaagtagcgccatctatcaatacgtgtgtcaaacgcgccccgccgctcgactcagtcttctacgtcgccgctcgccgtcgaccgtggcgagttttggccctatttttttacagaaagggaggtacgctttgtaattttacaagaaaaaacggacctgtgaaatacagtcttaaagaaaagttgatattgcttcgtgtcggtgtcgatgtttagagtccagtcaagatcgagcccggtacctgcaaacaccttattcgcgtctccggctcgttgctcgtcctccgctgcaggaacgggaagcgctctggtgagggtaccccggttactctgctcagcgagcacggcggaactgctcgcgatcgtgcctcgacgaatgttatttccggatgaaaacaacactattcacggtcccaatatagtgccgcagccgatattagattgtaccttattagagagctttagcatgtggaagcaaacgcaagcgttgtgcgtttgcgttagagttgcctgctccacattgcgcatacgcgtcgtcgccacgcgccaattcaagacccaaagttttggcttggatacgcacagtgaggaacacgcaacggtaactcaaacgcacagtgcttgcgttcgctcgtatacgcaatactaaaactcactactgtttcaccggcttccaacgccaacgagacgtgctgcagtgagcagacgtgcaagcgggcaggcgtccttcgaactggaaaggctgagattggcaaaaagacggcgcgtaataataaagtaaaataaaggctgtagaaaaacttatagcaaaaagaagtgttataaatcaagactccggagccgacgagacaatatcgagacgtatagcagtttcagaacacagcagtcttcttctttatttttcaggcggctccatctgtcgcgaggacccactctgtaaatattatagatctcgcgacatcgactagtatataacattcctctcccctcaacattgaaagcgctgtaccggcttccgcacgcgagtggagcgtcgtaggggtgcactttcacagacttcactcgaggtctccggtggttgttgtgggctgcagacaccatgcaccttcgacttggctgataggcctggtgacgatcgtggaggagctgggatgacctcgttgttgtttggcggccgtttacgtagttggtccgcatggcgtgttatcactttggacggcgtttcgacggttgccatgcgagctcccgttgtcgccatgacttttccaggaatccacttgtttcctgtcccatagtttctggcgtacaccgggtccccaggttggatcgtccagtctgtgtcttgggcagatgctgtagagtgtgatgggaaacatgtatcaagtcgcgagtgaatttgatgtcctagcagcagttcagatggtgactttcccgagcttgatggtgtccgtctattagcggcgagaagttatggtggcgccctcctacggttcccccttgtgacgtcattaccttgcaaacaacaagttcgatggtgtttgtaaatagcatggtggaagtttgaaatcattgcgctctcaaaggaacacttccaacaccgtcaaaattaaagttctttcattcctcttatttccgtcgatgatataccctttccgacgtcataagtcagcgttcggccaatcgtggaaggccgaccacagcgacgctttcggtcgcgctcgtcaccaataattaaacagaagccttgccaggctggttgtacggaagtcgttttgtatattcttcaacccatattttatagttcttaccgcgcgttccgccagaccatttgactgagggtgaaatggtgcagtcctgatgtgcgttatgttgtttttagacgtgaacttcaagaactcggcaatggtgaaaggtgtaccattaacagagaccaatgtgcggggtatccctaagtggctaaacacatctcacaaacacgacacagtacttgcgcttgtggcctgtttcataggaacggcctcgatccacttactgtgtgcgtcgaccactatcaagatcattttttctctaaaagtgcgtagaaaatcaacatgtaggctctggaccagttttcgtgcgttttgggccagttaactggtgccattgacgctggcatgggcaacattttgacacaggcgtcacacgtcgctgacgtgtcctctatttccttgtccagtccaggccaccaaaattgagatcttgctatagctttcatagccgacgctccctgatgactctcgtgaaggagctgtaggaggcgccccctagccttcctaggcacaatgacacggtggccccagtataccaggtcgtgtgccaccgacagttctggtttccttccgtaaaacggttgaaggttcgagcctaggctgttctcacatttgggccatccattcatgatgtatttcttgacctgcgctaacactgattctgtagctgtcatttgtttcaactccctggttgtcacgagaccctcctcctactgctccatagcaagcatatattcgggaagctcaccttcagcacctgtttccgctcctgctgttgctactgccggtagcggtagcctgctcagggcatccgcattcagcatttcttggccaggcttgtattgtagcttgtagcggtagcttcccaaaagcagcgcccatcgttgaattcgcgccgcagccataggaggagtcgggcggtcggatatcagcaaccccaggagtggctgatgatccgtgaccagggtgaactcatgtccaaataggtagtctctaaacttcgttacgccgaagaccagagtgggagcctctcgctctagttcagaataatttctttcggcggctgatagagttcttgatcgaaacccgatgggattgtcttctccactttctcggtgaaaaagaactgctccgatgccgtacggtgaggcgtcgcactctagtcgcagttctttcgctggatcaaagtgcgttagcacctttgccgagctgagagcttcttttgctttctggaacactgcatcctgtgcttcacccatgtccagcgagctcccttttccagcaaatttgtagaggcttgtcaacaaggttggcatattgcggacaaatctggcgtaaaacgtcagcattcccaaaaaagaccgcagctggcttacgtttttgggccgcggtgctttcacgatggcttccactttcgtttctagtggatggaggccctgtccgtcaatacggtgtcccaggtgcgtaacctcctgttctttgaacttgcacttttttttccggagtttcacgccgtgatccctgaaccgttgtagaagtgctctcaactgaaaggcattgccatctgctcgttcggacaatatcatgtcgtccaggtatgcctgcatgccttttagtcctcggagcatggtctccatcgtccgctgaaatatcgccggtgccgatgaaattccgaaaggcaagcggttgtagcagaagagcccacggtgtgtgttgatcacagccatcttcgatgcgtcgtcaagggctacttggttgttggcatcccttagcgaaaactaatacgtttgaaatataccatattctaatttgagtgtatttgaaatacagttcataattttaagtacacaaaaaatagaccgaaaatataaacttctttttttttacttggtactaaaatatacttctaaaaatcattttaaaatacctttacttaaactacatttgaagttcccttcatgcgttttgaaatatgtaaatactaaattaatacgcacaaaatacctttcaagtatatttcttgaaatatttatgtaattcatgcaaaatatactccaaccctaaaaaaatggagcaatcacaaatacgtgcagaatactcttgaaatgcctgaaaatcgtaaatactgttgtgttatactctaagtaccttttgactgcaatagtttggtagtttgacttaaactaacaacatattgaaaagctccccttctagaagttcacttcaagtagatatggagtacactgaagcgcctaaatacaacatttgattagtttgtcaactgaattgcggagcatcgcactgataaatcagcccagtttaggttattgtttccttttttctatcaaggacacacctgatcagttccttgcacaccaatcacaaacggggttcgggactacaaatacaacatttgctgatgctggaaagcttcagcaggtgctgtgaacagatacgtttagagtggttttgttagcacaatgttagttcactgaacgtgtatactcacccttgtacgtgatgtgaatagtgagtttaatatagtgatattaactaccatattaaatagtcaactattaaaatggaaaggcaaaaaaactactgtaaaatatttatttttcgcgggctcaatatttcgcgattaaggtcaaagttggagttttggaataattcgcaaattctaattttcgcgacgcgctgggatcgcaatatagattttaatatttttgcatttcgccggaattgtttacgggacctatttttcggaattgtaggcgatttgcgaactttgcgagaattaggtcctcacgaaaataaagtcgttcacagtattttaaagtgaagatactgccttgattcgcttcgtcctgagtggtgctacgcagagaagcaataacatgtattttatgagccgtttgtgtggatattgttttaaggactgcgccgaattgttattagttgtaccaatgccttttactaagagatatcgtccacgaacttcaaaacactgtttcccctttgacagactcccgaggagaagatcgaatacttggaaccttaataagtgcagaggtggtcaccgaaaaaaattattaccttcaatatgtaggctatataagactctagtgcagtcaacgggactgtgaatgagctgttcagtgcgtcatggtgtttgtgtttgtgttcgtttctaatgtagctttgtgagatgtatctaggagtgccttcaaatacctcagggacaccacttgctgacaaaatcgaaaataaaaaaaaaaattgtgtaatccgtttttaatgaacaaatggcatcttgagtgtgaaggaataatatttttggtatatctaaaatattttttgattcatatttataatgtattttgaatacattacgcgcgtatttcgaatgcggccaaaataatacagaataaatacaaaatgaatattcgtactaaatatatttcaacttcgtttgtagtacggcctctttttgctaagggatcccgtagatccaaggtgctaaaacaatcgccgtcgttcagacatgcgaacagatcctcgatgcgtggcagggggtactgctcgagttcacacgcagggtttagtgttgccttgaagtccccgcagatgcgcaccgagtcatccttctccagcaccgggacgattggtgtagcctattctgagtgtgtgaccggcgaaataattccgacttccaacaatcggtcaagttctgctgaaaccttatctttcagaccataaggaagcagtcttgccttgcaaaacttcggtgtggtaccgtcctttaagtgcagtcgagcaggtggtcccgtgatcagtccgatgcccggagtaaacagatcctgaaactcacagaaaactgcctccagatttttcacgttgactggtttgctactcagcgccacgacattgcctgtcaggcttaacacagaggtgccggccttgttcagcttgaaaattaaatcacgtccacacaaacatggaccgcaccagttcaacacagtcaaactgcactctactagggtgcctcggtacgagacttgcatgtgcagctcacccagcacgggtattcttcctaggtagcaggacagtttcacctgcgatgcttgaagcttaggccagtgttcacggtgctgaatgtaaacctcccgcgagatgacacagacggatgatccagtgtctacttccatcagcagatcgactccgccccaagagaacttacgtcgcactgctggaaccagatccacagttttggtcttcaagctccatatttgcacgtcttcggtttccgtttcttcccacgaagtccctgctgcttatagtgctttggcttgcacatgcggcctggagtatgacctctgttgcccaggatgtttacagttccgggcccagtgaccacattttccgcagtggaaacatgtcgttcctttgtgctggcagcggttgccttcgtgctctcggcttccacagtgctcacaaacccttgtgtgttgttgtcgtgggcgaaatttttcggacctctttccttgaaccttcatcctgaggacttccgaggtttcattccgagtcattcttttgacgtccaattcagcagcttcagccgctatggctagcgcttctgcatctgctaatgtcagttccctttttgacagcagttgcttctgaaggttctttgaccgcacgccacagacgatcctgtctctgagcattctttccaacatcgccgaaaaattgcagttatccgctattctgcggatttcgactatgaattcgtgaatcgactctctctctttttgacaacgattgaaaaacataaagctctttggcttcggatcgtagtgcgcatctaaagctgctaccacctcagcatacgttagagcgttaggtttttgtggagccactcttccacagagtagtcgaactgttttggtacctagtgccgctacgagcagtgctcgtctcttcgcgtcatttgtaacctcattgtcctcaaagtaagcctctaccttgatgaggtacgtactccatttgtctttgtcttcgtcaaactctggcagctggtgattcatctttgaaaaacccgcagcctggtgcgctctcaggatggaagaaggatccccctcgctgtgggtgtcttcacagtcctggctcgtcgccactgttataaaccaagactccggagccgacgagacaatatcgagacgtgtagcggtttcagaacacagcagtcttcttctttatttttcacgcggctccatctgtcgcgaggacccacaccgtaaatattatggatctcgcgacatcgactatactctgtttcatacttagcgtacaacgctgtcaaggctactggcgcgagcgcgtggcttcatctatggttttgtttgcgcgagaacgcgtgcaaatggtcaacgacatcaagccccacgctcttgccagtagctttgacaacgtcgcacgctaagtatgaaacggagtatagacgctttacacacgcgccagattgagccgccatagttgcccttctcttgtcttaccgagatgccgagccactgaagagggcgttgacgggtcttcacaagggcctatgctgggcacaagaacacagtagcatctaaaatggcaataacctgtcctgctgtggtaatgatgaagtgaagcgaacggaataacagggaacaaaaactgaagatcagacgctttacagcagctgtgcatgggcgccaccataactgaccttcagtttttgttccctcttattaccacacctttttcgcataacctcaaaccagccaggaactgacgtaccctcgacctggtgcatttttggattacccgcttacaaagggtatgcaaccgccaagggcatgggcgaaaaggcttaaaaacggacgtcgtgcatgagttagttccgagtgctcctttttaccatgctgcaatttccgaaaatctacggttgtcttcctaccacagcgtggtcgatggaaaaataatttaaaaaagcataagaacaatagaagcaagtgtgccatgagcacaaaaagctgcagcacgagtgtggctgcaatgttgtccagcttcgcattttccccaagaatccttatttatgaaatcagtcgattgcgagcttgaattgcgagagattcgtaccagaatcaacgtcacgtttaagctcacgaccacttcgtctacgacaagaggaccgattttaattggcagtgtctattctgccggcagccggtagaataaccggggggaaaaagtgccggcagtagtcgcctattgggtctcgtataaaacggattgtaaacacgcctattctaagctgtggattagctcagagtagcgcgtgcccccgttcggaacggttgcaagtttgatgagctcccgagaagcgtctgcaacggctttcaccggccgtggttcatttactgaaatgtctcaggattcctaccgagtggttctgccgtctctgcccacaggtaccgaagttttgaactctgtatttgcgcattgtgacacctccgggcgaccatacaagatagacgattttcgaacacaaatggaacgccatggcgttctacaagatttgattggagctggccagtaccaaatgaaccatgtttggcttttcacgtttaactctctgactgcgaagaggaagcttcttgcggcaaaagaactgttcgtgaaagaaaaacgttgtttactcatcgaccctgacgaatgcgaggtccgactacgactgcactggacaccgattcacataagcgacgaagcagtacggagggccctggagccttacgggaaggtgaacgaagtgtcccgggacacgtggagggtggaaggattccagaatgttcagacgacaacgagatctgttaaaatgaacctcaaggagggcacaacaaaagatcatctcccgcaccagctggttatgttcggcagcaaggtcctggtcgtcgttccagggagggcaccactctgcctccgatgcaagaggacaggccacattcgcagagagtgccacgttccccactgcgacaagtgcaatcgttatggccacgagcaagaggactgcattcgaacatatgccaccgtgatgctgcctgctcctggggaagacaactcggagttcttcatcgataaagaagaagctgagaaagtcgaagacgacattcgacatccagtcactacctgtgacccaaagtttacagacggacgacaggaacacctagaacgaaagaatgacaccaccttgtcaagatgtccaaatggtcgtgagggaggccctgcacgagaggacggcagtttgacgtctaattgccaagctgatcgtgaaaatgacctatcccggaagaacgacaccatctcatccggtcctctggccggtcgagagggagacctagcacgggagagcgacaccatcttcccaagttgcctgggagctgacaaccccgcggttgggaacgccagtccggacgtcgacggtgctgcatcggacccctcaaaggaccagtcaacgaaaccagcttgcatgagcgatcaccattcggacatcacgtccgaagacgacctggaaatggatgaaggtgctgacccctcaaagaggcctttagacctcgtagaggaggggcctgactggactccagttcacgggaggaagaaacggtgcaagccccgccctcccccccaggcaatggacgagagcgaacctcgtagaaggtggttactttctggttacatccaaactgtgaacgctttaggtcatgtctttcttagattcattttcgctttactagtgccagttgcaaagttacgcctgatgtagcttccatgtgaggttgttcatatgtcgctttccaatgcgcgcttcctcctccaatcccaacaatgcttccgactaaaaaaactggcccttccactaaaggtttaacatttggaaccctcaacattagaggactaaactccactcgaaaacaataccagctgctacgtttgcttcacgaggagcaattagactttttggccttacaagaaacaaaaatggcggaggaagagtaggtgacgagggcgttacagccttttcttacctcgtacgaggtatgcgtaacgcatgcagttggcactgtaggtggttgttttttattccttaaaaaattctgttcccctttcagatgtgagtgtcattaccgacgaccatgggcgttttattttgtgtgactttaatttgttggaagggcagtggagagtaatctgcatctatgccccttgtaaagttagtgaacgggaggcattcttccgagggatttcgcattacattaaatgtgatcggaccactatacttctaggcgactttaattgcatttgtgaagcaagagacagaactccattcacgcgcgtaagtgattctagtgcaaatgtcctgagtgaaataatcgctgagaataatttggaagatggtttttacatttcaaaaagtataaagaaaattcagttcacacactttcagaaatcctctcacgcacgacttgaccgcatttatttttctagcgacattgtaaataacattggatcttatcacgtaaaacctgtgttctttagtgaccactgtctcgtaaatgtcacaattggaaaaaaccaaacccctaggtcaaagtttaactggcgattgtggaagttgaacgcaggcctacttaaagacaagatatttgaagctgcaatggacgatctccttgatagaatggttgagcaaagcgggatgtgccccttagaacggtgggagcggttcaaagaggaggttaaaatgtcagcaattgaaagatcgagcacgctcaagttttacgccagggcagaagagcgaaaactgcagcacaatttagaggccctgagtgaggcagaatgtactaatcctggtcaaggagtaaaagacatagaaaatatcaaagcccaactcgaacaatttcagaaagcgcgatatgaaggcgctgtggtccgcgcaagaacgcaagggtttctttgcggcgaacaacctaccaagcaagctttgatagccgaaaaaagatatgcaatgtccaaagaaataaccgaaatcgagaggaaaggcaccctcaccgcggatagcacaaacatcgaagaagcgtttgtagaacattaccgacggattttttcactcacttcaggaaggcacgattgtgaaatgaaagacctcctgtctcttatgccgaggctagacgacaacacgcgggaatggcttgaggaacccatcagcgttgaagaagtagaaagagcaataagtgacctgcccgggggtaaaacgccaggccctgacgggctttgttcaactttttacaaaaaattcaaaagtcggctgtgtcccattttgctcgctgtcatcgaaggatcttataagagaaaagtattgccgctgtctttcatgaaaactcgcacggttttaattccaaaatctgaggatatcgccaagttgcgtcgcgtagagggctataggccaataagtctctgcaatgtagattataaaatatttgcaaaaattctcaatagaaggctgcagcatgtaatatgccaattggtaggcgatcatcaaacatgtggtataaagggtagaacaatacaaacaaatattcacgtagccagaagcattctagaatgttgtaccgatagagaagatcagattgccatgctacagattgacctcgagaaggcattttaccgtgtgaaccataaatttctctgggccattttgcgacatgttaacattggacacgttttatatgacggagtgcgaatggcatatcaaaactgttccacaggactgagagtaaaccgcaacgtaactgagagcattcccgtactgtcctcagtgcgacagggttgccccctctcaccattgttgtttgcactttatttggaacctctctgtttgagcgtcgcgaacaacgcgaatgtacaaggttttctgttcaacgcgctcgaagtcaaggcattggcgtacgccgatgatgttgcagtttttttgcagcgataaaagaagtgtgaccaacgtcatcgcattggttaaacacttttgcgacgttagtggtgcggctgtaaatctagaaaaatgctacggtttttggcacggctcatgggctacgaagccattagagttcgaaggaatcaaatgcgcttgacgcctacaaaataccttggtgtgccactccagcatatgcacaatcctggtgtttactggtccgaagcaacagccgaactgaaacggaaggtatcacgctggcccagacttgtacacgttactgaaaaaaagtaactgattacaattacaattactacagtcaaaaaagtaaccgattaccgttactgattactgcctcccagaagtaatcgaacaattactgcaaagtaattgattacttttcaagttactttcacgttacttcttattgcgatgacagaaatacacaaatacacagtaatatattgcgtacacaattttgtttggttattgttcccttttttgttttcagacccggaccttgtcgtgtagctgacgcgtcgacctaaggaacaaagcccactaaaaagtcaatagcgagttcccgcttcccgtcgactttatcagcaatctgcaacgagatccggaactccccagccaaggctggtggcgcgcttgtagaagagcgtggcgtaaaagaaaaaaggatttgccgactaatccaagttttattttttttagatgttaaaaaaatgtcaatcatttttgctccatggctgagtgactatgctgatttttgtgagaaaaaagaattgtgggatgaaaaatgtaattggtaattgtgtaattgattttgtaattgattacagaaaaaaagtaattgaattactccgagcgttacagcttgacaaatgtaattgaagcgttacaaaattacacttaactgtaattgattacaagtaatcaattacttgtaacgcgttacgtacaagtctgcgctggccgaaccgtgatttgtcaatttttgtgagggcaacggcctgtaacatcttccttgtcgccaagctcatgtatgtgcttcaagtgttgcaatgtactcgaagttgtatgcaaaaagtccatagaatctgtgctatgtttatctggaaatcgagttgggaaccgatgagaagagataatcttttccgtcgcatctctcaggggggactgggccttgcacacctgtttgtactaaaacttgtgtcacgattcttttttctacgagacatcgaacaaccatttatgcgcactgtcattcaaacaaaattgacgtggcacttgcctacatttttggtctcaagctgcggggagctaccatccaaaataggaggttttctcaaagaactgacaattttttgtcagttcgcttttccagggactttttgtcatctgtaaataggaagggcctgtctaatgctctgtatgacagtctttttccagagcccttgtatcgcgcagtgcacaaacaaagccctggccaggatgttctttgtcgtgttaaaaaaatggcgatcccgccgcgtgcaaaaagtttcttctttaaacttcacacctcgaccctcccagtgaaagcatggctccacgagaaaggaatttttgttccttggaccaccaactgcctattgtgtaaaacgcctgagactatagagcacgtatttattttttgttgggacgcccttttgttttgggacgtgttacagaggacattgaaaaaggacttagaaataacgtcacaatcgatgcgttttcttccaattacttctcatgaacttgtgccgtacgacctcataatgctcgttggtctatacagtatctggtgctccagaatggcagttagaaacgcagatcttaacccacggccagttgaagcatacttcgtggaatttgtaacacaaatacgttgtatctacacggatcaagatgaccttcgtggccttcgtgggtaaagaaatgtgaaaaactatgtgaaaactccaaacgttcttaatgatgtgtgctaagcaaatgtatatgtaatttgaacatgccgttggtgaataaaactgttataaagacaaaaaaaaactgtggattagctcagtgggtaagatgtgcgcctcatacacagcaggatcttagttcaatcccccgagggtatttttttttcttcggaattttgttttttgttgaggtattaggcgatatttaggacatctctcttttagaattaacactgaaaaaagagtacaaaaaaaaaaaaagacacgaatgttgttgacgaaacacatcctttttgggggtgaatggaggacagcggggcttgggccggccggcacgccgccgcgatgcggtggtactggtgggccaaataggtcaatatatttctaatgagcagccgcagactgtcgccgctaaaggagggggatggggggggggggggggggggctatgttaacgagctccccactgatacacgcgccgtccgaatctgccggcatttttttcccagggctattgtgccggctgccggcacaatagcctcacccaaaatacaaatttcattagtttaccggcaggtgtcacgtgacttcaggcagccaatgggaggtgaccgccggtagaatttcggaaaaattattctgccggctgccggcagaatagacactaccattttaattctcggtgccggtggtccaattaggttatcactgcaagccccatggtatgtaaaaggtatgaaaacgtttacatgccaccactcaagatggagctatcaaatgtcgagagcttacctgcatagactacattaaactgctcatatatacttcgctgcggaaactcaatcaaaacacccaaccgtcttcgtcctcgttctctcgaggagggaaggtgatagcctgggagtagccagctggattcaaccagacaagctccaaccaagttattgcagcccaccatagccaagtctagccaagttccccccatacccacaccgttgcctatccagatagctgtgctgccagaactagccggtatttctttttctaagccgctagacgacgtcgtcggcgctgcaattctcaagatggcggcgccgttaaagaaaaggtctatagtacataacaaaaagattttttaatttttcttatttttgggggttttggggggggggggggggaggggggttggtttggaaggattgggggtgattttggaagtttcccgattatcaaaagtcgcgactttgatagcaccatatgcgttccccagaattaatgtaattttacgtggatttttccagattagctggaatgttttaattgattttagactttttatattttaaaacttaattaaaatgctgcaattggcaccagtgatgataattttgacacttttgattgccatatatattcgctcgtttgaaattagatcataagcagcaaattacataagagcttgagaaactacgtattcaaatatcttaattctattattgctattaagacaaattgcggcaatgtaaatgccacgatcacaaaaatacgccatttagccataaaaaacttttcagaaaggttttgtttgttatattttgagcacatgaaaccttctgacatcgtgattaagatatatacagacaaacagccaaacactggatgtaatatgaagtcctctatgcgacacgcgctgctttagaaaaacacgcacacttctgctgtctcactcggattccgtctttggaattttgtagtcaaaagttttttttatttatatgctttgtgaacatattctaaactgatcacccatgacgatattttgtaaactttgaattgattttgttattcttgtgcagcgaataatgttgaagcaattaattttctaaatacccaaaataccatttcaagttccgcagttcaatatttcaaatggcgcttatcagagccagaaaatggagcaagaacacaaagataggagcacatactttttgaacaaatacaaccttatatgttaccgctaagtgtaggaaacacactgtctttgaagggacactagactctccaaaatattttgaagtgtctggattgaacacgcatgtcacaaaataaagtttccgcaaatgactttcttagctcaataataacgctgtgagacaaaccgtgagttatgaaagaataggatatgcacgcctgttccgagaagtccgaaatagaggttagtttcggtttcgttcggtaataaaaaattgcctctggcgtaaatattacgctgaacaccgttttggttttcaggataaagatgtgactggcgctcataacaccctagcttcctcgtataagtaggaatattttgtttccctcagtgaagccatccccctagtcaggctcggcaactggtatacccgcacacgtctccgaccctcactctaaccgccatttcggaaaacatgtggcgccacctataattagttggagtcgcgaatactttcgcgtacctttattttcaagaatcgcatcgatgcattcttaacagggtacaaggccgcaggactgttttcgttgctcagcgcaacgttactgaagcacgctcagtttcacagctcctcctgcgacatgggctcagtggtgttcacgagaactagcagcgctgcagtcgagtcttacttccggattgtctagcccaccaagtgtgaatagcaaagatgaagatgaagtgtaatacgccacggagttgagagtcagcgctgtgtgagaattccctctttgattgttcgaaatgtgcgtctgtttcctcgtgctagaaagtgttagtttaaataacaacgtcaatatctgcatcaacgcctcgccctgtggttctcgccgagcatgagatgcaacaagatcgcttgattcgacgcttcgatcaccagtctttccttacttgaaattgagccgtcacacccaccagtctttcttctttttttcttatctcaccctgcgggctttttaaacaataaattgtccgtagcccagttccaacactgttaggacgggtcatgaccacctgttttgtgccgggatgcacgagcggttacagcaagtttgcctcagccgatcgacatttctttgcgccaccaagggacactgctgactttaaacggtgggagcaagccctgcagagaattgacaggaaacttactgctaagtgcaaagtttgtgacttgcattttgaggatgaagacattattattgatggcaaaagaatacttatcgcatgggggaaatggcaattggcatggggtgccatccctcgcctgttccctaggctgccggcgcacttctcatatcgccagcacttggcagcaaaaagtgggtcactcgacaaatgtgctatgacgtatgtgagctcggcagggaatttatcaaatgagaattcaccggacgtaacagaggtccttcgaaaagaggacaactttagttccgaggtcggcctaacgttagatcgcttatcaactgcttcgtttccatcaggacagtggatgtttgagatttttgacgatgaggtaacatggaagaggtgcgacatacatatgttacacccgtcgcttggtggaagggtatttccttgtacagaaggccattgttatagacaaaggtttcggctgcgtggtgaattgttccagcaagcatcatcacacgcagttgtcatagagcattaaaagtgacgctgacgttgaacgtgtactgagacaagtggatgaactcaagatatgtgaaggtgtaattacagacaattcaagcagcgtgcgagtgcacacacaaaaaaacctgtttcgtcttgtctaagcggcaaagctgccccagctgtcctcggctgcgtcaaaaaatgcggcaaagaagtcaccaagcacgggcatgaacctcagcaagttgaagatgcgtaacctgaatagatcactgctgcgagcactggcgactcgcgagaaaaagaataaagaagtgttggacttgaaaaaaaagcttgaaaagacatcgggggagcgtgttgaaaaatatttccctggccttccatctcttcaacggcttgccgtaattacggcatttcaacagataaaagcgaaaacaccatgcggagtgaggtattgtgcagagcggttgttgaactgtatgccctgtcagaatttctagctcaagtgcttacaagctgcagaatgacctgaaaatgctgccactccaaagtatgagtcgcttgacacaaatattgaaaggcatcccctgtagatatgtcttcaactctatttcactggaagctatgcaaacgcaaatgcacaacaaatctcagcatctcacagtcgaaagtcttgttctggatgaggtgaagctgaagcagtggtatgactttaacaaatcaagttacaaagtcgatggttttgtaaactatggcgacatcacaagagaaggcacaaaccagctagctgaccatgctctggcgtttatgttcgtgccacgtttaaaagggtgggtacagcccatagctagcttcgccgcgaaaaacgcagcgccagggcgtgtcttggccgaactcgtgcttgaagctgtcatgcagctctacaagtatggggcaaccgttattgccgtagtgagtgatgtcgctagaaacaacaagctcatgtggcaacagtttggaatgagtggctgtatagtaaacacaaggcacaagattcaacacccatgtcttcctgatggacaatacttgcaatttatttgcgacgtgccgcacgcactcaagtcaagtgtgtgagaaaccatcttcttaagcaacagtacggccaggtagcacattagtctccacaaaaatcatcaaatatattcattgttttgcacatagaccctaatgtttacctttgcacatggttttcaggcaggagaacacccaataaatttagctttttacaaagtgctcttcgagactgcaaaagagacgcacctgaaggctgggcacaaactgacagcagcacacgagcagccaaccaatttgcaaaaaaatgaacgtgcgacttgctacccaggcatggcatatactactaatcttcatttcgaagttgattgccttttatatgactattcaccaacattttattctttcgtgactattaacatgaaagctttatatattataatttattacttgcagttgttcaaccgcagcacagcattagcgcaaagcgagtgtaggaaggccggtgtcggttgaatttcaagactcgtctggtacagtggtttttaccagaatgatgaacgatctcttcgacgcacttaatgcaaagcatcctcttgaaggcaccagagaaaactctccaaagtttcaggtacgaacatttaaagcacctgcattcactctgtttgcactccttgtgcgtttcactaggtcagatacatgtttctgacatttcaggtcatcaggaactactttgggatgttgaacgaaatggaacacaattacttacaccgaaacatgctgctgttcgggtgaccctgctttccaccttgaacattattgaggatctccgcaatgcgggggtactgtacattctgacagccaagctgaaccaggatccacttgaggtaatatgcaaagcagattataaatactaatcaaaagttaaataacctgcaacagcggctgtacatttttgaacatgtaacgtttataggcgggtatttagttgaaagtgaatgactaactggtgactgactgactaccacctcgaatgtgaataattgaagcatcgcaggacccacacaatattttgtgaccaggcactctccctcccaggacagtcgccatagcccccccctcctcccctcaccccaggacgctcgccgtaccactgcaaccccgcccttattcccaggatattttgtttccaggtacctaaccctttccccctcccaggatctatcgctaccggatacccctccccccccccccccccccccccccccccccccggtatttcgtgtccgggtacccctctcccgcgatatttcacgttcgggtacccccctcccctctcacccccaccctcgcgtattaaccaacgaacgttacctgtgcccacactagtgctttgcactttaccatacactttcttgccttattttttgcagagggtctttagccttgcccgctccttcaaaaggaatgaagaccatccaactatcgcacatttcagccaaatttacaggctgttgtttttgtacacaccgattgaaactgccatcaaaggcaattgccctggcacgtgcgactcagttctcgtttcgtttaaggagagcttgggtgagaaagttaaggctgtagctgatattaaatcggccgttgagtcaaagctgtatgagaaggtccagcacgttagctttcccttggaaacacattgagcgtgattatcagaaacctgacgttcaggacaggcttatttattacctttgtcgatatgttcacaagaaagtggaaaaagttaatcattttagggaataccagcagtctctcacagtccctcatgaagagcttgcacacatgccagccgagagtcacctgaaaacgataaggtcttttaaaaaaggttgcttacgctacccattgcgcaggtttttctgctttacaggaactagttcaccccctataggtcacgaaagttgcaaatataacttattccttattttactaactaaattgtgcgttcttttatcttcaccttcgcctttaacaacgtgacaatataaaagccagtgttcggagttacacttagtacacagggcgctggttgtgatgaatccatcgctttatcccggtccttgcgagcaacatatggctacggtcacttcagatttccgatagctaatgttccaatatttcttctgttgcattctcactcgaaatgctctccattggctccattgttccttaacctgatccacccaagtccggtggacattcatcgctcgttgccctgggctgctcttcatttcgggaagccttgggtgtcccaggcgtcctcgcctgaatcacgcagcccaggtggacactcctgactgaccactggagagtgctgttcttgttaaaaaatgatgggaaccagtcagtaatctcctgtcacacgtgcattgggagatcactgtcgatgagttgtcgggagcgcccagatttttggatttcccgataacgtttcaatctattatgatggacaactggccgctgccgttaagaagcttcataccccattcgaaacgctgcatctgaaagtttcgtaataacagtataaggtacctgtcatagtaattggagcttcaacaattcaccacgtttcactgcggggaaataaagtagcactttgtcgccaacgttaaaattctgttcatgaatgttccgattaatattgtttattcacttcttcgttatgcactgcagcagccgcaagcactatctgtaagttttctttagtctgccagacgctttgtcccagcgtgctaaaatcactgataacatgttttaaaaaggggtatggagcgaaatatcagcgcctatttttgtgtaaacctggccaccttgtttggatgtttacatgtacgttttaaaaagtcacgaaggtgacgtattggcgtctgattgcctccaccaatcggaagacaatttgtcacatctgtgaccgtttaaaatgcacatgtgaatgtccagcctagccatcacggtctcgtttgtaaaggagtattcacacgacggagaaatcccggggatttctccccggcacgcgcgcatcacgagatcaaaacgcgaggcctttgcacatcgcaaagcatgacgttttcgtcgtgggatgcgcgtgccggggagaaatccccgggatttctccctcgtgtgaataccccttaagagtagctcacaaacagcagggggtgttcgtccgtaaacccaagaaaagcaaaatgaaaacgaataaaacgatttccccataccccctggtagttgaggg

SEQ ID NO: 172 - DNA, 21566 bp, Ixodes sp.
  source 1..21566: mol_type = other DNA
tggccctgatgtgtttgaactgttgcgatgtattaaacaacgacacgcgcgcctcaatagtgacacaagtacatgctgtgtattcattcaaaaaaaattctacgagaaattgcgcacgttggcagttaaattctatgtaaatgatgcccgagtcggccatgtctcgattaacttgttcaagatatgcgtcggccatgtgcgacccgcgtcggccatgtctacgctcgcaccaccctttgttaatcgtcgttccaagcgcttgcgggtttagtttcctttctctccgctttcccggggtggcggtcccgtcgcgcgtcttgttttctccggctcctcggggcgggtctgtgccgtgtgcaaaacagcttcgttggtcaaccaccttcagagtggaatggctcaagcgttttttttcctttttaattgacgcgttcttttggtgttcataacattacgttttatgaattatatcactgttgtttgtgaaaattggtctcaaatgaccaacagctttgagaatatttcgtgtaatatgtcgtatgcggacctcgaacccgactcatgacctgcgcttttcgtgtataaaaacaaacatattttgagccgcaaatatttgtatttgcagttaggtcctcataaatcgtgtctcagttgtgacatttcagaaagtatgaataccttggcaatgccccgttaatcttgatgcttgtctttactgtgacgcagtgaattatgagtatggctattttaattgaaatgcaagttttcaagaagactgagtgtacgaacgggtatatctggatgcaaacatgatattaaggctatcaaaacgttgtggatctacgtcctctaagatctgttgaagtaaagtattcattttcgattttatttatacagtcactttcgattccctgtaaatgacatttgttcaatcccgctagttcaacacttgtaattgtaaactagacatgtaaggtatcttacatgtctagtttacacacttttatgcgcttttattaaagtcgccattcacacaatacttacaaaggtgtttctgactcagcttcttgaagtttgagtacagatatgattggtttcatgcctgtcacttccttagggttatatccacatacgattgcaattaagcaaactttgagcgaaataaaaaaaagcgagtacttgcctcaagacatcccggatacaatatgtttatattttccatgtctaggtaatcaagctgccctccctctgcctagatccggtgactcggtaccaaaaggcacagaacaagaaacagcgaacagtcctgacggcgttggcgatgttatcgaagacaaagaaccaccaacgacaacgtcaacgaggaggagtagaggcgacgctttaagcggcggcaccattgtcgtaccggtagtcgtaagcagtaatggtaatggggaaacgaagaacaatatcgacacgccttcccaagacaagcacaaacctaaccaagctccagaaggcccggagcttggctctgcaactggccatgtggacaaaggaccattgcagaacatcgaaagcggcaaaccggattcaggcgctcacgaccctttggccaacgtgaacgtcacagagttcatagagcgaaattgtggcaaagcccattcgagaaagcgtcggatagtgggtggcactataagctcagtgactacgtacccgtggaccgtgagtacttacctcaaaatagtataagtgaaaaccaacccataaaggttggttcatacattagcatgtgggtgtgaccgactacgtgacggctcctggcgtttcacttcttcgcgttgcgcggacatcggttgccacagcgaccatgtcctcgtaagaagtcacaagcgagatctgtcatgcttcctgctttttaccagggacaaccaggacacctgagacatttgtcccagttggatattctgttcgagggacgacactgttgaaatcagggaaactaataaagggagcgggcttggactagaagccgttagtgtggagtagtctactttttttacagccataatggcgccccgagcttgacttttgttcactagtaaatgcaaactcaagccttcattgtcacctttccaaggctccactgaaacaaatatatataccacggataattgtaatgttttgcagctgaaatttatcaataataaaaacatctccatcttggtccattgtacaaagtaaatattaacagaaaatctaatcagctcttagcttttgcccctttgccgcttttcacgtttcaatatcaattccaaacagcgttctcgggacgacaatcacgaaatctgaacatttagtatgcccatacagttttgtgaataaaagaatctattgaacttgtttcaggtgggaatctttatggtaggctcttccaagccatactgcggggccgttctcataacgccatggttcgtgctgactgccgctcactgcacccgcgggtgagtccgggaagtctttcatacgatgcgacaccgctttttttaaagccgtaatagaaacaaatgcacaggctgctttcccccagcaagaaatacttcttaaccctaactcaaagcgaggatttatgatttgaattgaactaccactcgccagctcaaaatgatagttcgaacatggtgcccactagagtcacaaaatacgctatacgcttagagtaacggcacaccattccccggttttcttggagacgccgccgtttttgtgcttagtgaagagcgggcggaattcgcgacagaaaggatttgaaaatgcgatttcctcagcttcaggtacggtgtccgaaagctcaggcgatgttgattttctctgtcgcggactgttttcacagatctgggcccgtttgctcgaagccggttaactttaaccgcggttaaaagttaaccacccttccctattaggtgcctacaagtacctagccaagtttgacgagggctggatgagcgatagctccgtgttttattatagggtgacagctggtgtcacctactggttgtagcgattataaatgggttccgtgtaaaaagctcccaaaaaaaagggggggggggggggggggggacccgacaacgcgcgctctaccgggttcttgcgacgcagcgcggcatacacttgaacagacaaattttttgctgctcgtggtacagatattgggtaaggtaaaactaaattcacccttgtttggaaaatttctaaatgcttggctgcctgaattgaagacaagcctcgttgaaattttcttccaagtccgaaagaggacgacgaagttcagttctaaaaacgacaaggaagaagtgagcagtgaaaggcgggaggtacaccggcagcatggttggccagcatgtatgaactgtatttaacaccatcataaattgaaaaacctgtaattcggctccagtgaaactaggcctattagtaaattaccaaggcatcgaggagaacgctggacgtgtacttctacagtccgcgcgtggcggccttcctcttataaaagattcaaagtaaataataataaggccttgacgaacgcgcgtgcaaggcaaaatttgttttagactttttgctttagaacaattactactgcacatgccagcacgtgcaacgcgtgcaaggttactcgttgtacagtgtactagaatgtcgtagcatgcacctcggtgcttgggaaatttagaaaaaggtctattggggcgctgtctgcttttgtgtcaaggcaatccactttccaaagaagttgtcatgccgacaattatcgcgttcatttacgcttaggaatggccagaatcaaaagactatctaaaaaaatgcgtcgaggtcattgctcatgctttctgacttaagtgaggtaaggcaaagcgaaaggctcccgcaccattcattgctgactaacgcgcccaatattgcagatacaacgacatattagttttaaagcgagcggcgctcactcaccggggcaccgccaggtttcccgcatccctaccgagccagtcacgtgacttcaaaatctctctcctagctactgcggttaactttagtcgcggttagcgcttaaccgcgctttgagcaaacgggccctagaggacagaaaagcgttatctgcgatttcaaaaagagcttcaggtaactggcaaccatgattttaagcacaaggatggctgaagtctcgtctcacttcagctgaagccaggattgctgaagcgatgtgcttcagtcatcttagcttcagcaagatgcgcttcggccatcttggctgaagcacattccatacgtcatatcggtttacttctatgaacgaattggagaattttaggcatgaaaaagaaactccggttgcagaactcgtgcagcagtcatctcctactcctgatcattgccttctttgaaaacggattgtgaaaaggtggctatacttggtatcaactattttgtgctacgttgtcaacgctagcatacatttgacagtgctgcaaccttgcattgctgcgagagcacgtctacgcatgcgcaaagaaggcttcatacaaaccactctccaagtagctttcacggcgttgaagcactgaaaaagttatgctagtcttgacaatgtaacacgaacaatacgtcatttccttaaactgaaaaacacgcgcatcacaaaaaaaaaaaaagaaaaaaagaaaacggcgacacgcgtttgttgcttgaaaattagcttttttcgctttacagaagaccagcagcggatctaagagtagcctacgggctgcagaccataaacgagcgcaccttggaagaacggcaagagcacgtagcggttgttatgaagatacatcagcacaagaaattcgtggacatcgtgcacggagacgacatctccatgttgcagctgaagacacccttgctcgcggacggacagctagtgccgcccatctgcacgccccaggtgtcccagctggaccgcagctccgtggtgaacacaatgggtgtggttgcaggctggggcaggacaacgtacagtgagttcgctttggtcgttgttaatgggaaagcattaactatccgatggagcgaagccggcaacgtcagtaaccgaaaaaaaaagaacgcgaaagaaaatcccatttttccattgcctgagcaaagcggctcttagatagcttcataatggagcagcgcgaatttttgcaaggacagaggaaggaactggacaggacgagcgctgactaacaactgaaaggattattttcaggaaaccaccaagaaaaacatacaacacgactctctaatcacgatggaaatgcgcatgcgcctcacaaaattggatgctatcagttacacaatgttatatgcgtcatccccgatctaaaaagtgaaagccgtttacaactccctgtaacgccgaattggagcgcagctcttgaggaggaggagggaagggtagtgaagggagaataggcccctcctcctcctgctcctcccctcattctttaatatgctccgggggggtcacgtgacttcggggggagggggtcacgtgacctctgggaggggccacgtgaccttggggggtcacgtgggggccacatgggggtcacgtgaccttgaggtgcccttggaaggggtcacgtgaccttgggaggtcacgtgaccttaggggtaacaaggtcacgtgacctgggggtcacgggaccttggggtgacctggggtcacgtgacctttgggagtcgcgtgaccttgggaggggtcacgtgcacctggaggtcacgtgaccttgggaaaggtcacgtgacctggggtcacgtgaccttgaggtgaccttgggggtcacttgaccttggggtgaccttggttgcgccgacggcgacgccgctgaagccggaaacgggcgcctaaaggcccgaccacactagcgtgaacggcgccaccgggcggcgccgccgggcggcaccgccgtccggcgtcccaaagtgaggagtccacattgacctccgttttgcaggcgtcacgtgacagcactggttcccgcgatcgcgcctcccgtcggatgtcccgctctttcgtcgtctgctcttcgttagattcttccgttccgcactcgctgccacacatggtaggaatccataatgacctggtgatcagcgtgaatgtgattatcctagcctgttcgttgatcttgcgacgtcgccgcgctctgaagggaaggaggcgcaggttttgggtccggccgagttggttctaccgaaacactgcgggacaggacaggtctggcgcgtcgccggggctttgctgacccggcggcgcgccagagatgaaggctactttcgaaactgtcaccaaatcaacacgacatccctcacaacacagacgacatgcaacaagtgccacggagaaactcacttgtaattccgaattcctctcctataatttcccagcggttgttcttagcgtccttatctaggtagtctggctgcgtcttgtcatataaaaagggaaacagtcgcgcagtttcaaggaaccgctccgttggggaaggcaccgggggaaaataggaagagcagacgacgcgaaacacgtccttcggaacgtgaaagacgagccgaggaccggcttgagcgttgccatggcatcgcgacgccactatctacgccacttcccattggttcctctcttctgcggcgtgcggcgcccggctttgaaccgcgcacggagcggttgactctgcggcgccgtacgtcgcgccgttgaagccgaaaactggtttgggtcggcaagcggctgcgccgaccgccgcgccgcaggcctccgcgacgccaatgtggtcgtgccttaagagctgcgctctaaaattcgacctcactgtcagcaaattcaaggaagcctgactcacgcaggctggcccctccttctttattctatgagcttcaacaatctctcgagctttttggtccctgtgtttatacaaaacaacggctttgtcaagtaacggtgtgcaggcgcagtccctgcagtgtaacgccaagtgggaacttgccgtacctgttaaagggacactgacagggtatttatgctcgccgaggtttttagttgtacgtgacatatgagagctcaactacccagaacagaatttgcgactcgaaattcggtttctttccgcccgaaaaccgccgatcaagaactggccggttcgagtctcgctcactctctttttcgcggtcaaggggccgttttctaaggtatcgatgcgaccaccaaatttaatcaaagtcgtgggccactgaaggaacacactcaatattaaaaatagaaaaaaatatgaaacccattttttgtggcttctaaaaagctgtaaatacgttgattgaaaaaagaagttccacagacaaccggaagcattctgtgcgttcgtcgttcgcgtatcgtgggactcgcggggacggcgatggcagcggacggcgggcgtgggacctctatttcagaactgtcgttcgttttaccggcgaattctgtctaccattaaaagagaaatttgggactgatcaaaagaattgctattcatcccgtacgacacgcccggccaccaagcctatttgcacgaagacgtcgccgagccgtcgctcccttctcgaggctgaagacatcgctcgcgcaaacgtcaagcacgacgtgtctacttcgagttgaatatgcacgcgtatgatttctttactaggtgcgaatgtgcccaaagcgtggtgcttcccgacttcgacccgggagtgcttttgctagagaaaaatcgacagcaaactttccaacttacagtttaccggctgaactattactaaggaaagagatccaccagaaaagagatgccccagtagctcgagagaagcgcgtgcccccgttcggaacggtcgcaagtttgatgagctcccgaggagcgtctgcaacggctttcaccggccgtggttcatctactgaaatgtctcaggattcctaccgagtggttctgccgtctctgcccacaggtaccgaagttttgaactctgtatttgcgcattgtgacacctccgggcgcccatacaaggtagacgattttcgaacacaaatggaacgccatggcgttctacaagatttgattggagctggccagtaccaaatgaaccatgtttggcttttcacgtttaactctctgactgcgaagaggaagcttcttgcggcaaaagaactggtcgtgaaagaaaaacgttgtttactcatcgaccctgacgaatgcgaggtccgactacgactgcactggacaccgattcacataagcgacgaaacagtacggagggccctggagccttacgggaaggtgaacgaagtgtcccgggacacgtggagggtggaaggattccagaatgttcagacgacaacgagatttgttaaaatgaacctcaaggaaggcacaacaaaagatcatctcccgcaccagctggttatgttcggcagcaaggtcctggtcgtcgttccagggagggcaccactctgcctccgatgcaagaggacaggccacattcgcagagagtgccgcgttccccactgcgacaagtgcaatcgttatggccacgagcaagaggactgcattcgaacatatgccaccgtgatgctgcctgctcctggggaagacaactcggagttcttcatcgatgaagaagaagctgagaaaggcgaagacgacattcgacatccagtcactacctgtgacccaaagtttacagacggacgacaggaacacctagaacgaaagaatgacaccaccttgtcaagatgttcaactggtcgtgagggaggccctgcacaagaggacgacagtttgacgtctaatggccaagctgatcgtgaaatggacctatcccggaagaacgacaccatctcatccggtcctctggccggtcgagagggagacctagcacggaagagcgacaccatcttgccaagttgcctgggagctgacaaccccgcggttgggaacgccagtccggacgtcgacggtgctgcatcggacccctcgaaggaccagtcaacgagaccagcttgcatgagcgatcaccattcggacatcacgtccgaagacgacctggaaatggatgaaggtgctgacccctcaaagaggcctttagacctcgtagaggaggggcctgactggactccagttcacgggaggaagaaacggtgcaagccccgccctcccccaggcaatggacgagagcgaacctcgtagaaggtggttactttctggttacatccaaactgtgaacgctttaggtcatgtctttcttagattcattttcgctttactagtgccagttacaaagttacgcctgatgtagcttccatgtgaggttgttcatatgtcgctttccaatgcgcgcttcctcctccaatcccaacaatgcttccgactaaaaaaactggcccttccactaaaggtttaacatttggaaccctcaacattagaggactaaactccactcgaaaacaataccagctgctacgtttgcttcacgaggagcaattagactttttggccttacaagaaacaaaaatggcggaggaagagcaggtgacgagggcattacagccttttcttacctcgtacgaggtatgcgtaacgcatgcagttggcactgcaggtggttggtttttattccttaaaaagtctgttcccctttcagatgtgagtgtcattaccgatgaccatgggcgttttattttgtgtgactttaatttgctggaagggcagtggagagtaatctgcatctatgccccttgtaaagttagtgcacgggaggcattcttccgagggatttcacattacattaaatgtgatcggaccactatacttctaggcgactttaattgcatttgtgaagcaagagacagaactccattcactcgcgtaagtgattctagtgcaaatgtcccgagtgaaataatcgctgagaataatttggaagatggtttttacatttcaaaaagtataaagaaaattcagttcacacactttcagaaatcctctcacgcacgactttaccgcatttattttctaacgacattgtaaataacattggatcttatcacgtaaaacctgtgttctttagtgaccactgtctcgtaaatgtcacaattggagaaaaccaaacccctaggtcaaagtttaactggcgattgtggaagttgaacgcaggcctacttaaagacaagacatttgaagctgcagtggacgatctccttaatagaacggttgagcaaagcgggatgtgccccttagaacggtgggagcggttcaaagaggaggttaaaatgtcagcaattgaaagatcgagcacgctcaagttttacgccagggcagaagagcgaaaactgcagcacaatttagaggccctgagtgaggcagaatgtactaatcctggtcaaggagtaaaagacatagaaaatatcaaagcccaactcgaacattttcagacagcgcgatatgaaggcgctgtggtccgcgcaagaacgcaaaggtttctttgcggcgaacaacctaccaagcaggctttgatagccgaaaaaagatatgcaatgtccaaagaaataaccgaaatcgagaggaaaggcaccctcaccgcggatagcacaaacatcgaggaagcgtttgtagaacattaccgaaggattttttcactcacttcaggaaggcacgattgtgaaatgaaagacctcctgtctcttatgccgaggctagacgacaacacgcgggaatggcttgaggaacccatcagcgttgaagaagtagaaagagcaataagtgacctgcccgggggtaaaacgccaggccctgacgggctttgttcaactttttacaaaaaactcaaaagtcggctgtgtcccattttgctcgatgccatcgaagaatcttataagagaaaagtattgccgctgtctttcatgaaaactcacacggttttaattccaaaatctgagcatatcgccaagttgcgtcgtgtagagggctataggccaataagtctctgcaatgtagattataaaatatttgcaaaaattctcaatagaaggctgcagcatgtaatatgccaattggtaggcgatcatcaaacatgtggtataaagggtagaacaatacaaacaaatattcacgtagccagaagcattctagactgttgtaccgatagagaagatcagattgccatgctacagattgacctcgagaaggcatttgaccgtgtgaaccataaatttctctgggccattttgcgacatgttaacattggacacgttttatatgacggagtgcgaatggcatatcaaaactgttccacacgactgagagtaaaccgcaacgtaactgagagcattcccgtacatgtcctcagtgcgacagggttgtcccctctcaccattgttgtttgcactttatttggaacctctctgtttgagcgtcgcgaacaacgcgaatgtacaaggttttctgttcaacgcgctcgaagtcaaggtattggcgtacgccgatgatgttgcagttttttgcagcgataaaagaagtgtgaccaacgccatcgcattggttaaacacttttgcgacgttagtggtgcggcagtaaatctagaaaaatgctacggtttttggcacggctcatgggctacaaagccattagagttcgaaggaatcaaatggggcttgacgcctacaaaataccttggtgtgccactccagcatatgcacaatcctggtgtttactggtccgaagcaacagccgaactgaaacggaaagtatcacgctggccgaaccgtgatttgtcaatttttgcgagggcaacggcctgtaacatcttccttgtcgccaagctcatgtatgtgcttcaagtgttgcaatgtactcgaagttgtatgcaaaaagtccatagaatctgtgctatgtttatctggaaatcgagttgggaaccgatgagaagagataatcttttccgtcgcatctctcaggggggactgggccttgcacacctgtttgtacgaaaacttgtgtcacgattcctttttctacgagacatcgaacaaccatttatgcgcactgtcattcaaacaaaattgacgtggcacttgcctacattttttggtctcaagctgcggggagcaaccatccaaaataggaggttttctcaaagaggttgtcgatacgtacaattttttgtcagttcgcttttccagggactttttgtcatctgtaaataggaagggcctgtctaatgctctgtatgacagtctttttccagagcccttgtatcgcgtagtgcacaaacaaagccctggccaggatgttctttgtcgtgttaaaaaaatggcgatcccgccgcgtgcaaaaagtttcttctttaaacttcacacctcgaccctcccagtgaaagcatggctccacgagaaaggaatttttgttccttggaccaccaactgcctattgtgtaaaacgcctgagactatagagcacgtatttattttttgttgggacgcccttttgttttgggacgtgttacagaggacattgaaaagggacttagaaataacgtcacaatcgattcgttttcttccaattacttctcatgaacttgtgccgtacggcctcataatgctcgttggtctatacagtatctggtgctccagaatggcagtcagaaacgcagatcttaacccacggccagttgaagcatacttcgtggaatttgtaacacaaatacgttgtatctacacggatcaagatgacctgccttcatgggtaaagactatgtgaaaactccaaacgttcttaatgatgtgtgctaagcaaatgtatatgtaatttgaacatgccgttggtcaataaaactgttatgaagacaaaaaaatgccccagtagctcagtggcaaagacgtccggttcacacgcggtaggaccgggttcgatcccccgtgaaacttttttttttttttcaatcattttttgatgttacatacctttttcttttttttacaatcatcactgaagaaagaaacaaacaaacaaacaaatgttgtggacgatacttcgctgaattaaatggtatgggatttccgttttggcacctgcgaactcgatgtaatcacttttcacaaaatgcaaagagcatataaatcaggtagcgtccgctttccgaggtgcccgtatatgttctacaggaattgcagccagccattggtcccgatcccgttcatctttcggaaactctgtcgcacaatgccactttttttcggatgcaggacatgtgagccagctcttcacgcaacatcttgggtgtattcttttcggagccgatcatggaaattcaccacgggcactcactactcatctccaactcttcaatgtacaaaacaactcatcttgagtacagaacaacgagcggaacaaacataactgcaaaagaatcgcacgccgcatgtcgtgtcgtctgctacggagaggagaaaaaaaaacgcacggtagggtgtagccacgtgacttccgccactcactctcttctctccacttctccgacctccgtcgggtttcggtttccagcagttgcgtcttttggctttattaaaaaaatacgctactctgttgcaaaatattaattgggtagtcctccgacaccataataaagcgcctggcaaaaaattaaaaaaaatttttggggggtttcagtgtccctttaaagaagtacggtgttcccgcaggcgaatgttgaggcaccgccccgtttgtccgatgtataccttcccgcaggtggaaggtatcttgtatactacacccaaggtgcatggcacgaaatcaatgcggtgttttatgccgcacgggctctccccctgtttctctaccttgttaacgcgcttttccactgcagagcaaatactgcttagcttgttacatgccgagaacacaacatctaccccgaacttcgaggctgctcttttaaagccgagaaccttgggtgtatactacacccaaggttctcggcacgtaacaggctaagcagtatttgctctgcagtggaaaagcgcgttaacaaggtagagaaacagggggagagcccgtgcggcataaaacacctcattgagttcgtgccatgcatcttgggtgtagtatgcaagatacccttcacctgcgggaaggtatacatcggacaaacggggcggtgcctcaacattcgcctgcgggaacactgtacctctttaaagggtacggcaagctcccacttggcgttaccccgcagggaatgcgcctgcacaccgttacttgacaaagccgttgttttgtataaacacagcgaccaaaaagctcgagagattattgaagctcatagaataaagaaggaggggcgagcctgcgtgagtcaggcttccttgaattagctggacagtgaggtcgaatttttagatcggggatcacgcatataacattgtgtaactgatagcatccaattttgtgaggcgcgcatttccatcgtgattagagagtcgtgttgtcgtatgtttttcttcgtggttttctgagaataaacctttcagttgttagtaggcgctcggcctgtccagttccttcctctgtccttgcaaaaattcgcgctgttccattatgaatccataccgactcgcccagttatcctgttttcttagatatcattggcggccacttcacgagagcgcgcgatcggccgcctgtaaaacaatcatgctgatctgcatccttcaagttgatgttgccgtctctaaatatttgaatggctagtttcccgtcaagcaatcgctccagcggtatcctttgtcttcaccagatggcgaaagtagctcggaccttcgagaggtttctctgcccatcgtgtccaacaagcgatgttcggaggtgttcaaggacgttgtcgaaatcacggacgggatgatctgcgctggagacatcacaggaaagaaggacgcctgtcaggtgggacacactaaagtcacttccgagtaccttgaggcaaacgtacgaggaaaagcggatttgttggcaacttgcgtgctgcatgtgtcaccaaaagcaaggtacatagacgggacgagaagctttccccttctcaacgaaggaaggaacttggccgtgaaccgcgacgtcacggtgaagatgcctcctgttgtgtcctgccataggctatggtcctgcttgtgccattacttggatggagagcaggacaatgaacttgtatgcgacgtttccagaaggggtttaatgttgcagtcgcgcaaaaggcagcgggaggaagtagcaacacaaaagcaacatggcgcacatactactctcgaacagggggtcgctccgtcagtcagtaagagtcttgagagcaaggaaatcaaaggaagtgttgctgagccggaagctcaatatgtcacctttgggtcgctcctagagcagcacccttctggtgggtacacaacacctcccattaaagttaggcgtttgtaaagtcatggctcctcccccacggccacgtcacgatgaacttacttcgtcggtttgaccagcttagacataatgctcttaatgtgtgacttccctcttagctgcgtgtcattttaatgacaaattctctttaaaggggccctgcaacaacgttttgactggttttgtagtgtgggctacactggccgaggacgagcagtttcgcgtgcctcgcataatgagccctgctccgtactgcgcatgcgcgaggagcagtgacgtcccacggcgcacagctggcgcgccggagccgccgccgccgccgcgcctgcctcgccgttctgcacattccagaggagtgacgtcctagccgcggcagacgcactggcgccgccgcgtgcccagctgtgcgcctccgttgcgcagtagccaagtctgacgctggcccggagccgcttgatagcgcctctcattttgtgcgcataagctcacgctacgcatttcttggcatagccgagctaagccaccgcattattttcatttgcaccgaacctgagcgcaccgaacgtagtagcttagtgaaacttttgtcgaatttcgctttagtttaaaagttataggcaaattaaaatgacaaaaacaagccaaaaataacctcattcatgacgtccttgcttgggtggccgtcaactagaggaggggtagtgagctcagcgagcgctcacggctgccgcactccgtgtcgacggctcgggagggcgccactaaagcatgtgcaggaaaccatgttgaatatagctgagactggggtagaaaggaacataaaagtcgaagaaacagaaagggacaggcgtcgtcctgtccctttctgtttcttcgacttttatgttcctttctaccccagtctcaggtatattcaacatggttaacatccaccagctcgcctgcacccttactattttatatgtgcaggataggctggatgaagcgggcggctcgcattgcatttgcaatgcgatccgccctgaagctaatttggcatgacacttcattgcccacaaacgacagtaaaaacggggtaaagatcagttcagaacaggagccacttcgcgctgccaaactaccaaacggccaaaccacaagccaaacctggtcgccgaaggtcttgggaacgctcggagccggtcggatcctcgagccctcatacgaccgcagcgccgccacgtacatccgggacctttccgggtcggctcccgatcccactacccctttctagtatgcgccgccttttccaccgcttgctggcgggtatatgtcgacgggtcatttcttgttttcctatacattataaactgcatttctttcttttctgatctaaaatactgagcaaaactactttcataaataattgaaacggttcgcaccacttatattctgaatttcgacggaaaaaaaaaaaaaagcttttagcggctctgaccagtagtaaggccaggaccaaaaacgtcacgatgtcgtcacatattgcgcgctttcggcaccgcgggtcgtccccgtaggtggaggaggtttctgcgtcgttcggttaaaatatgacgcactgatatttagttagtctctccgtgcccgctggcttgcccgaaccgtagataacgcgatgtctctgacatttggccatacaccgtttcacttttaagtcctaccgcagtcgacaccagtgatttccatacactctcccccctttgtttttctgaaggcacccccttaattcacgactcctatattctcaatgccccccccccctcaaaatttagaccccccccccccccctagtttcaattcctggggaaacccctggtcgacgctacggtccgattgagccaatcaaggagcgccaaaagtacaacgtcactgcgctcgtcgccattgtacgttcgctgtcaccgaccaaaccagtcacgcaccgtgatttcgccgtgatcatacgtttttaaggcgaaagccttacttgtcccattacgcaaaaaagcggcggcgttgtgcctgaaaaatggtcataaaaatatgtcatcaagcacgcacctcaaaaataaaacacaaagaaaagcacagcaacgcgggtgcttcgtcatggaagccgtcggggttcaccgcgcctgcgcagtgagggagtgtgacgtcaccgccggagtgccgtgtgggataggaagacgtggcgcgctgcttgtagtgcgctctgtgtaggaaagctttcgcattcctacacgcagaaatgcttgtgtagggacgctttcgcattcctacacactaccgacgggctgtagcgcgatacataaaataaaagaggccagggttacgaggctatcatttcgaacagatggatgtcggatgcaagatgatgtggcaatgactataggtttcgctatatagtgtgtatcctcgtgtagtgagatatatcatgggcactctccgtcgtcgttagtgatcaccaaagggaaaataatcgaaaatatgtagatgaatgaaccatacttgatcgaatgaaagaaagtctacgaagccgccgaaaggcaaaatcttaggcggagtcggggtgttgcctttcggcggcttcgtggactttgtttcattcgatccagtactattcctccgcatattttcgattaattcatgtagagagatgtattgactctgctgtggttataaataactaggaaaaaattccgactttcatgttaactgttcgcttcgagtgttggacaattttcgttatttttataatgctgtagaacgttgaacgcggcagtatttattaaagataaacttgagcaagccgctggtttttgcaaagtttaaaactattagcacggtatgtggatcctgcagggtttccccatttggtcactgcagcaggcgtctgtcaacctgcggcatcattggcccatgtgcgaattcatcaattacaatttattaaaagattatgaacgccgcgccgttgcttttcttgttttcgtttcagggagactctggcggccccctcatgtggtactcgagcgtctttgagcgctggtacgtgatcggtgttgtctccttcggcgtcaagtgcgccgagaaaggctactatggcacgtacacctgggtcgagaagtacctggactggatatgcaagatcaccgaagggctggtctgcctccgaaccacggggcgccagcagaaacaaccaacatccaaaaccgaaccagggacaaaggaaccagaactagatgaaaccacgaagaacagcaccgacacacaagagggagccacgtccactacaaccagcaacgaagagtcaccgcttacagcgccagaatcaaccccgcaacaagcgaccacgtcaaaccaatcagaccatgccgaagaccaaaagaaggcggaactacctgctgaaagcccagcagaggctataccaccgacaacacaaatggtcatgccatcattaccgaaaccagagtcaatgccagcgaaacccaatacgtataaaaagtcgcctctccaaaatgggttgggctatggcggatacaggaaaaggaggcggcgtaaaaagctcaggggcagaaatgaataaatggcgatcattatggcaaccgacagcgatgagccaatcaccttaagaggttttgttgtctgtatgttggtatttgtttgtgtccggctagccgctactttcccagatccaatgactttagctggcaccagtaagcgtcgactaagcggaatgcgcgtggaaaaacaggcattcgagaacccaaaaggaaattcgccattaaactgttccccgaataaaggctgaagtatattggcttaaacgaaatataaacagaactgctaattgatcgccatcttgattttagatttgacatcatccggtacgacgcacctgccatgaaacaaccaaacctgattgctggtttttcctaccgttcgatcagatgaaatgcgtaggcactgcactggcagtggaaccaagaacgctgcaatgaaaacgtagttcacgcatgaaaaactccgaaaacaacacacacttttttatcgcaaaattgtgtatacacgtccagcaatttcaacccactacaaattagcatgcttttgcgaacaattcaagaaggaacaccgccaatcggcagatacaaaataatactgtcgagaccggttataacaaagtcggttataacgaaatagcggctacagcgaagcgatcgcaatttcccattcccttttgcacttcgttataaccgaagtcggctataacgaaatagcggctacagcgaagcgatcacattttcccattcccttttgtacttcgttataaccgaagtcggttataacaaaatagcatatatatcgaagtgatttccgatttcccattcccttttgcacttcgttataaccgaagtcggttataacgaaatagcggatatagtgaagtgatttccgattcccgttgacgtcgttataaccggtctcgacagtacctatcctgtattcggtgattgaaagccggtttcgaagacaagggtgtccaggcaaatcacaaacatgcacactttgatgtgtagtgagagtgagcggtagcttcgttcgtgcccaagagccgaaaagccgcagattaatgttgtaggtcggttaccgtgacaccaagtagtgaaagaagttgtcacaacgaaacaacaaactgcactaattatggctaaaaaaagttaaagaaaaggccatgcacttacgacctacttgaaataaaatcgtttaaaataactgacctgtttcttaaaaaaagaatatctggatatgcgagtgaccgttgataacgcccctgttccgtcttcgtgtatttttctttttttcattgtagtgcttttcatagatccaaaatttataaaaaaaaaattgcgttaggatttttttggccctggagctaagttggtggtcatcgggggaaccagaaaagatgcaaaattagctaattacctgtcaaattcattcaagcgttaaatcaacattaaattcatactcgtttttagaaaggaggggggcattatgtaattggtgaatcgaggctcgagttattattgtctagctgtgatgtgaaaatcatttaaaaagtcgtgtatttcgcccacaatgcgcgaaaaaacgaaagctgcagcacggtcacgcaatgcggttggaatggcgccgtcacgaacctgaggacggaggagcgacggggttaattctcatagccgtcgtggatgccactgacgacgactgccagcagggatccgtggagcgggtaagcgtggtggaagtttctacaaccatccaacattacgcacagcaactgggtgctgccaaagcgggatttcgcataacgcgagtgatgtttgaaaacaagtctttcaagcagacgacacgaggattctcccttcgtcgcgccattcttggcgggacgccagggctgcccgcttcgctctcttcgcgcgacacggctgacgcaagccgacgggaagcaacacccactaggtaacaaagccgtagcgctgaatcagatggcgtcatcatcgaaagccaacgctgatcaccgattggacacgacgattacgtcaacgttcggctcaaacttgactcgaagccgagcattgtgacgcagcactcgtctccaatatgcgtccagtgttggccttcgctagtgaggcaaaagtgtcagcactgcgggcggccttgtcttctaggcggtgttgcgggaagtcccgacttccccctctccgcggcgagaggagagaaaaagagttttttttttcattctttgcgcgcgtggcgacggcaacctacgaggacgaaatctctgcaaagtctcgccccataaaggtatcgctttaaaaactcatagtgggtgttacggtgcaagaaatggcatccttgtacacaaactcaaaccgaaaccaagccggtaaagagcgcccatgacgtcgattccttcaccctgtgccagctccgcaaccgacgtacgcgccgcgccgcaggtaacg

SEQ ID NO: 173 - DNA, 22469 bp, unidentified
  source 1..22469: mol_type = other DNA
  misc_feature 1..22469: note = Fanzor polypeptide
cctctaacagatttggggtccggcagaaacggttcggtaaaactcatcgcgatgaacgggcagttttttgcattgaaaacaggaagtgtagaggcagatcgtgcgaacgaaatgcgaattcgtagtgatttcaatactgacttgttgcattatgcatactacacaaccgtcgtcgagcgtctaccgcattggttggcaaataacgagaatctactcttgtccgatttcgccgccaagtcgtatgataaagtgccgttgcacaccatatcatccattaggaatgccatgaattcgatgctgaaattctatttgcgttcgttagaattggagaggaacggactgtaccacgttgatcaaaagcctccgaacattatcaaaatgtcgggtaaggcgtttatctccgattttggaaacatgtggcactcggattacgggtcggatgtgctgtgcacaccctattactcgttctacatcgaagggcgctacgcacataaaattgctaagaaaatcgaaggtcaccttaataatatacgcaatagacgtgatgcttttcgtgttaaacttactaaacctggtgaattgtggtcaagtaacatctacggtcacgttcggtgcgtggccttgtatcaaattatagtaacgactctcgagtgcatgagaacaagtgtgttgaatacaagacaaaatacaaggcaattcgatcggtttcttaatgaatttgtggtgcctcttgtagaggttctgctagaaggaccccgcggttccgatcatagtgacagaatccagtccgtgatcgataaagggctccacgaggaactccggattggctcgactgcaactggaggaggaggaggtagcgatgattttatgcttggtgatgagataacaaaccatgatgagttccagataattccagagaatttactacataaaacagaattattccctattaaaggatcattagataagatttaccatgatccggaggacaagatgtacataaacacaacatcccaaccaaggggcggcggaggtctatccaagacgcgctatgagctggtatgggcgtcggtcgccttgggtttgacgactctggtctcggcgttctctcagtgacgaacgaggccaacacagctgatccccgttcgaaactggttccgactgtatttattcagcgccgcgtgactttgccaaaccgaggacaccccggaagtacactcgccttcaccgcggtttgggggcgggtagccgacagccggttctcctgtcgaacatcgtacctgtacccgagaggccgcgccaaccttcccgtcggtgccacaatatcgcaaaatcggcgcggctgggacggtgtgaacagaccgtgtgtatcgccggtgttctccatagggttattgattttttcaccgggagcgcggcgcccttcgaatgcgagcaacaccaagagcgcggcgagcgtggtgagcagcgtgccggtggcgagctggaagcgatccgacgcgtcccgaaacgccagcgtcgcgcacgtcatgaccggcaccgttacagcaatcatgggatcgaaccaggggtaggaatccgagggggcgaccatacactctttgcaatctaaaacctgtacaccactttttgggcaaaggactctggcacagacacgcgagtgtattctacgacttcgcgctgatgcgctgaaaagggccggacgcttcgcgccaacacgcgctcaggcgtgcatctcggcgcggatccactcccgcgtcgcggggtggctaaccgcagcagtcatgcatctccacgcgttccacgggcagccgtgggcgcgcgcccactgcaggacctccaggcagccgaatatcgccgcatcctcgcacgtcaagtcgtcccaggggcagccgtgggcgcgcgcccactgcaggacctcaggtggccgccggccgccgcgaattggcacgtgaactcgtcccaggggcagccgttggcgcgcgcccactgcaggacctccaggtggcctccgagggccgccgtcgcacacgtccgggcgtcccatgggcagccgtggtcgtacgcccactgcaggacctccaggtggcctcgttccgccgccgtcgcacacgtccgggagtcccatgggcagccgtgggcgcgcgcccactgcaggacctccaggtggcctctttccgccgccgccgcacacgtccgggcgtcccaggggcacccgcccgcgcggagccactgcaggacgcccaggtggccgcctttggcggcgaacgcgaacgtcgtttcgtcccaggggcagccgtgggcgcgcgcccactgcaggactcccaggtggcctccgagggacgcggcgtcacacgtcgactcgccccagggacagccggcggcgtgcagccactgcaggacgtccaggtggcctctttccgccgccgtcgcacacgtccgggagtcccagggacagccggcggtgtgcagccactgcaggacgtccaggtgccctccgagggccgcggcgtcacacgtcgacccgccccagggacagtcggcggcgtgcagccactgcaggactcccaggtgccctccgagggccgcggcgtcacacgtcgactcgccccagggacagccggcggcgtgcagcaactgcaggacgtccaggcatccccgtcgcgcggcggcctcgcacgtctgccggcccataacgccgccgccatcgctaaccgcctccagcaggagggggtagcgggggtcggcgcgcgcggcgtcgcggaggtcgcggcaggtggcggccagcaacgcgaacgcccacgggggcatgtgtgacatgatgtccagcaccccaaggcacgcgacggcggaggcggaggagtccatagtctctgatacgacggtcgatgatacggggagggaggcaggcaagcaggttttcggcccgggcgcgtgacgccttcaatttgtatgtatcgttggctggcctcggcaatgtgaagcgcccgccggcaaaaaacgtccggaaatcgataccccaatggttacacgcggtccatctcggcgcggatccactccagcgtttcgggctcaaactccgcagcgtcctcgcacgccgacgcgtcccaggggcacccctcggcccgcagccactccaggacctccaggcggccgaagaacgccgccaccgcgcacgtccgctcgtcccaggggcagccggcgccgcgcgcccaccgcaggacccccaggtcgccgcgcatcgccgcgcccgaacacgtcgacgcgtcccaggggcacccctcggcccgcagccactccaggacccccaggtggccgccgagcgcggctttcgcacacgcggactcgtcccaggggcagcccgcggcgcgcgccagcttcaggaccgccaggcggccgccggacgccgcggcggcgcaggttgtcgcgtcccgggggcagcccgcggagagagcccaccgcaggacctccgggtggccgccttcggccgcggccgcgcacgtccgggcgtcccaggggcacccgcccgcgcgcagccaccgcaggacgtccaggtagcccagcctcgcggcgcactcgcacgtctcctccgtgtcgcctctgccgacgccgcttatcaccaccaggaggcgggcgcggcgggggtcggcgcgggcggcgtcgcggaggccgcggcaggcggcggacagcaccgcgcccgcgcgcgggggcatgtgccacatgatgtccggcgaccccaagcacgcggcggcggaggacgccatagtgggcggggtggaggctccattggccggggccgaccgcgttagattcgtcccacaatcggacgcgcgctggccatgaagcgggccacaatcgtacaagtgtgcgcgtgcgcgtgcgcgtgcgcgtgcgctgtgtgtcggaaatggtacaatattttccgttacaaaacaacgcacccccgccaattttcacgcacaaaaatcacttccagcgcgccattgcctggaactcggctgcggacatcttccagtcgccctgtatctcgggggcgatgcacgcccagtcgtccttgatttccgaggcggtgcacatccagtcgttccggaggggagaaggaccggaggtcggcgtgtcgtacatgttgtggatgaccttcgcaatggcggacttgccgccgccgaccgtgccggtggcctcggtcgcggggcgactcgggctcgggagctccatcgatccgctcgtgggcggtggttggtctgtgaggttctgacgccgggaggttcgctcaccgcctgtatacactcctgccagcgcgctcgcaggcttccgggcgcctgcaaaaaccacaccgccaggacgcgcgctggctgtagccccggacgcttagcggttcatctcggcgcggatccactcccgcgtcgcggggtgcctcgcctccgcggcggcctcgcattgccccgcgtcccaggggcagcccgcgccgcgcgcccactgcaggacctccaggtggccgccggtcgccgcggcgtagcacgttgtctcgtcccaggggcagcccgcgccgcgcgcccaccgcagcacctccaggtggccggaagacgccgcgaagcggcacgtgagctcgtcccaggggcagccgcgggcgcgcgcccaccgcaggacctccaggcggccgtgcgacgcggctgcaatacacacctcggagttccaggggcagcccgcgccgcgcgcccactgcagcacctccaggtggccgcgtcgggcggctatcgtacacacttcggagttccaggggcagcccgcgccgcgcgcccaccgcaggacgcccaggtggccgccggtcgcggccatccagcacgtcgaaccgccccacgggcagccgttgccgcgcgcccactgcagcacctccaggtggccgccgagcgccgccaccgagcacgtgctctcgtcccaggagtagccgtgcgcgcgcgcccacttgaggacctccaggcgaccaccttgcgccgcgccccagcaaacggccgagtcgaccgcacgtcgctcggcgtgcagccacttgagcacctccaggcggccgctggaagcggcggcagaaaacactccgccgtcccacgggcaccccgcggcgagcgcccaccgcagcacgcccaggtggccgccggacgcggcgttcacacacgctgcagagtcccaggggcatccgttggcgcgcgcccaccgcaggacgcccaggtggccgccggacgcggcgttactgcacgtccgggcgtcccaggggcagccggcgccgcgaagccactgcaggacgcccaggtggccgcctttggcggctttaccgcacgtccactggtcccaggggcatccgttggcgcgcgcccaccgcaggacgcccaggtggccgccggtcgccgcggcgtcacacgtccgggcgtcccaggggcacccgcccgcgcgcatccaccgcaggacgtccaggtagcccagcctcgcggcggcctcgcacgtccgccggcccaggacgccgccgccgttgcgcagcgcctccagcaggcgggcgcgccggggttcggcacgggcggcgtcgcggaggccgcggcaggcggcgcccagcggcagggccgcccacgggggcatgtgcgacatgatgtccggcgaccccaggcacgcggcggcggaggccatggttcaatcgtcgaaaaacaaagactcgcgcagtgcgttatatgtccggcgtccggacacgaatattttacacgcgctccctctcggcgcggatccactcccgcgtcgcggggtgcctcgccgcagcggcctcgcatcgcgccgcgtcccaggggcagccgtgggcgcgcgcccacttcaggacctccagctggccgccgaccgccgcgaaggtgcacgtatcggtccaggggcagcccgcgccgcgcgcccacttcaggacctccagctggccgtaagccgccatatcgcacgtccggtcgtcccaggggcagccgtgggcgcgcgcccactgcaggacctccaggtggccggcgagcgccgccaccgcgcacgtccgggcgtcccaggggacgccctcgccgcgcaaccaccgcagcacctcaaggtggccgccggacgcggcgtctctgcacacattgccgtcccaggggcagccctcgccgcgcaaccaccgcaggacctccaggcggccgccggacgcggcgtctctgcaaatttcattctcgttccaggggcagccggcggcgcgcgcccactgcaggacctccaggtggccgccggacgcggcgtacttgcacacgtccgagttccacgcgcagtccgcgccgcgcgcccactgcagcacgcccaggttcccgccggacgccgccgtcacacacgtccgcgcgtcccacggacagccggcgtcgcaaagccactgtaggatgtccaggtggccgcctcgggcggcggccgcacacgtccggccgtcccaggggcacccgcccgcgcgcagccaccgcaggacgtccaggtagcccagggccgcagcggcctcgcacgtcttccggcccaggacgccgccgtcgcgcagcgcctccagcaggcgggcgcggcgggggtcggcgagggcggcgtcgcggaggccgcggcaggcggcgcccagcggcagggccgcccacgggggcatgtgccacatgacgtccggtgcccccaggcacacggcggcggaggtcgcggtcatctcaatcgtcgaaaaacaaagactcgcgcagtgcgttatgtgggagtccggacgcctatatttttacgcgcgctccatctcggcgcggatccactccgcaatcgcggggtgctccgcggcagactcgcgtcgcactgcgtcccggacgaccccccgggggatataaaaggggagtgtcgcacggtttgggctcacaacgcagttgtccagtccctccaatacctaccagcccctccaatgcctcgcagacctttcaaactgtgccggacaacgggttttgtgatgcccgagcccgagagcgagagaggccgggagaaccttcccgacgaccttgcgtgcttgatatcggacaaccttcaacccatggacctcttggcgatggcctttgtgtccgcgaagtggcgccatgcaaccggcaccacccgccggacccgtccccttgacatcccgttggcaccctgcgtgatcatgacctccgccgcgcgcgaggggcgcctcgagtacgcccggtgggcgcgcgagaaaggatgcccctgggacgagcgcacgtgtcaggccgccgccgaggcaggccacttacacgttctgcgcttcgcgcgagagaacggctgcccgtgggataagaccacgtctgaggccgccgccgaggccggccacctggacgtcctccggtgggcgcacgagaacggctgtcattggaacgtgacggcagccaacctcgctgcgaaccgcggccacctacacgtcttacgatgggcgcgcgagcagggcttgacttggcacgacggaacgtgctactacgccgcgcgcggcggccaccttgaggtcctccggtgggcgcacgagaacggctgtcactggaacgtgacggcagccaacctcgctgcgaaccgcggccacctacacgtcttacgatgggcgcgcaaggagggcttgacttggcacgacggaacgtgctactacgccgcgcgcggcggtcaccttgaggtcctccggtgggcgcgcgacaacggctgcccctgggacgacaacacgtgctgcggtgccgtcgaggcaggctacctggacgtcctccggtgggtacacgagaacggctgtccctggaacgtgacggcagccgacctcgctgctaagcgcggccacctacacgtcttacgatgggcgcgcgaggagggcttggtctggaacggcgactggctgttcccctccgctgctttcaacggccaccttcacatcctccggtgggcgcgcgagcagggcttgaattgggacgacagaacgtgctactacgccgcgcgcggcggccaccttgaggtcctccggtgggcgcgcgacaacggctgtccctgggacgacaacacgtgctgcggtgccgtcgagggaggccacctggacgtcctccggtgggcgcacgagaacggttgcccctggacattgacggcagccggccgcgccacggaccttggccacctacacatcttacgatgggcgcgcgaggggggcttggtctggaacgacgacttgctggttccctccgctgccctcaagggccaccttcacatcctccggtgggcgcgcgagcagggggtgccctggcacgagatgacgtgctccttcgccgcgagaggcggccaccttgaggtcctccggtgggcgggcgagaacggctgcccctgggacgacggcacgtgcgccggcgccgcacgcggcggccacctgaaggtcctggcgtgggcgcgcgagcaaggatgcccctgggacgacagcacgtgctggtccgcggcgcgtgccggccatctggacgtcctccggtgggcgcgcgagcacggctgcgactggaaagagagcacgtgcatggccgccgctcgcggcggccacctggatgtcctcatatgggcgcgtgagaacggatgcccctgggactatcgcacgtgcgaggccgccgaccagaacggccatcctgaggtcctggcgtgggcgctagagcacgggtgtcctcaggtcgtgatgtaattacactccggacatcttgaagcgcaagtgatggagggtgtgtagaaaagatatggcagagtgtataataccatgcagcgtgcgacaatgccgacgggatgcatcatctacctgaaggaagcgggacatttcaagacgtacacactggccgatgtgggagaaatcaaagcgaaagtgactgtcaccatcccacaagttgccggcactctcaccctcgaccgcggagatttgacgaaggaggagctacgaaagagatcctccgttgcaaattcctgacgattttgtgttgatgaacaccagtaacggaactcccgtacatcctgtcaacgactactacaccccttgccatatttttctgcacaccgggtaatgtacgacaagcaacttgtgcatcgtgcagtcattcattacttgcatttcaaccgctcgttgcggaaagtggccacagtctacgggtgtggctacacgacgctgggaggatgggtcagaaagcagctcggtacatcgacaccgcctccgcgaaaacggaaatcgccggtcagcgacgtgatacgcgaggcggtagcgcaatgcgtcgaaaacaacccgttcaccacactgtccgatatcgtgaaacggatacgtgttgacgggcgaaaggcgtcggcgtccacagtcaggcgggttatgcaaaaagcaaacatgtcgaggaaacgggccagggtgcgcttcgcgcccaagaaacccaccaagcagcaggcggagcagtttttgcacgagattcgaacgcccgctcaagaagtaatttccatcgacgaaagcagcgtcgtgctagaaagcgtgccgacgtacgggtacagcctcaagggcacgagggtagtaaagcgaaccaacaaaccggtacgaggcaaccgcgtgacgctgctcttggcgatatcgaatacgcgaggtgtagtgcaccatgcgacgtattcgggtagctgcaattcccagaagttcgccggatttcttggcggcctcccacagttttcgtcgcggacacccattattctggacaacgtgcgattccatcattcacacgtggtgaaagccgccgcacacgcaaacaacctgcacctcgtgttcacgccgccttactgtccggacttcaatccgatcgaaaacgcgttctccgtcatcaaatccgtgaccagacgcttcgacgactcgctccccgatgccatacggagcgtgacgcccgagaagtgcgcggccttcttcgccagatcgataaggcacgcggcgacgctagcggagacggccccggacgcgatgcaaccccccggacgcgtcgacgagtgaccggacgccgtgtgctgtgctgcgcagcgcggtgcggcgcggcgcgcccaggcggtgcgttcggcgagcgcgcccgcgacgcacggacataaagggaactccatgcagcgagcaaggccagaatccactccgccctcgacaccgccgaacctaccgctcacggagtatggaggcggacgtggccgaaggccccgtcctcgggacggggcgaaccacgaccgtcaagtgctgcttcaaagccgccagcgcgtgcaagcgtcgcaacgccgttttcggccgcgcctgtctccgtcgcagacgccccgtcaccgcgcagcgagtgcgcgcggccaagactcctccgacggcgttcaaagacctcgcggacatcgtggacagcgtggtcaatctggtttccaaggcggctcgtcgaggctccctcgtcgccatgctgacggtggtgcgcacgctggagaggaacaacggcaccctgcccgctgggttcttcggcagcagcatggacaccttcttcggacagtgcttcaagtttggcgcgttgaagcgcacggagtacggcatgacaccggacatgccgcgcgctgctaccagcaacccgtggatcctcgccgccctgcgcgatcataggattgcccaggcgctcagcaagcaccgtgtccgccgacagccaggggactccaacctcctccaatccgccgccaacgcctaccagaccaactttgtcaactttttcgactacgagctgcctcgccgcgtcaagaccatggtcaaggcgctgtggcggcgcagctacccggactacaacgcgccgcgcccgaagggacagcttgccagggcggtcaactacgccgccgtcctcgtcgacggcgtgcccgagccggtcggcgtgccggacgcctttctgcatgcggtccgcgagctgcggactcggcatttcgctgccgtttcgcccgccgccaccgagaagctgcgtgcggacgtgacggagctgactcggcggcgtgccgccgagcccaagaacagcaaccgttggaaggccttgtccgccgagctcctcgaggcgcggcgtcgcgtcaagtacgcggcgctcggcgggaagatcgagttcgtgtactggctgctccgtcggctgcaggccatggaggccgcggacggcgtcgtctacaagaagttttccatggctccgctggctagggagcagcgcgcgcacatcaccatcgacggcaaagtgctcagagaatacctctttccgcgcctcaaggacatcggctactacgccgccggcatgacggcgtccgccttggacgaccccgacatccgcgcggcccacctcgccgcgctcttccccggctgcgagaacctccggtctcggcgacgaggatgggtgtcgtcgtcgtcgttcaagacggacggctactccttgtgcgcgtcgtttgctcgcgactccaacctgacggcgaagcgcgggagcggtccgaaacgcgtcgcggagagcaagaagaaaaagtcggagaaacgagccgagaagctgcaaggcacgttcggcgccatccccgagggcgccgtggtggtggggtgcgacatgggcatcgtgtatccgtacgccgtggcgtggttcggcgcggacggcaaacggcacacccggctgctctcgcgctacgcgtacaagaagctctctggcatcaaggctcacgagaagatcatggcgcgtcgccagagccgcctggaggaggcgcaccgtccccgcagcgagacgtccgccaagagctcgcgactcggagacgtcctcggctacgcgaccgcgtgcaactcgagctgggaggagacgtggaagcagaacggcgaccggaggtctttcaggtcgaggatggcctcgtacattgggagggagcgcgtgctgacgcgcttctggaacggcgtgctgcgcgacgtgctcgctagccaccctggcaagacgcgcggcgatgtctacgctgccgcgggattcccggacttcaactgctgcacccgcggctgcccggcgtctccgaccaccgcggcgttcaaggcgatgaagcgcgtggtgcaggtggttcccacggacgagtacaagacgagccaagtgtgcgcgaggtgtctctcgagcctccgcaaaccaatgaatcgcattacactcccagacggtcgcgtccggtaccaagagctgcgaggtttcaggctgtgccaacagtgttttctggagtctcgtgcgcagccagcgtacccgtgggagacggagaggtggcgaggttacaagcggtttcatcgcgacctcaatgccgcgatggccatcctcctcgtggcgggcaagacgaacgaagaacgccccgagccgctccgtcgaccaagtagcagacaacgcgaagtcgtagaatacactagccccagcgactgctgcgcagaataggcgcctctgtgccagcgtcctttgccaaaaagtggtgttcaggttttagatggcaaagagtgtaccatatccaatccatacattgctacaagttattgtattgctcgcgcccagtcctatcgctagattctcagattcaacacgctacaacccctaaggaggactagcaaggaggggggaacccctgtgcacaccacttgggggcaaaggacgctggcgctggcacagagacgcctgttgtgcgcagcagtcgctggtattctacgacttcgcgttgcaggatgatggccatcgcggggcatgtgacacggcatgtgccacggcatgtgccaggccatggctcaatcgtcgaaaaacaaagactcgcgcagcgcgttgtgtaggagaccggacgccgacattttcacgcgcgctccatctcggcgcggatccactcccgcgtcgcggggtgctccgcggcggcctcgcaccgattcgcgacccacgggcagccgttctcgcgcgcccactgcagcacctccaggtggccgccggacgccgccagcgtgcacgtcacctcgtcccaggggcaccccgcctcgcgcgcccaccgcagcgcctccaggtggccgccgtacgcggcgccccgacacacgaacctgaccggacagccctcgcccaccgcccaccgcagcgcctccagctggccgccgtacgccgccagcgaggacgtcgagtcgtcccaggggcacccggcctcgcgcgccaacttcagcgcctccagagcccgcgcctacgcccgcgggggcaggcgccccagcaggtccgggcccaggcaggcggccgcggagaccatggccggcgggcggatgcgatgcgcaggaccatgactgtgccggtccgggcgcgtgccgccctcaatttgtataataccttgcatgcaacaaatgctcgttgacgctgcaccgaacttcattcctccaagtcaatatgacgtgctggtcaccgacatatgtgaagaagacttgaagtctgtatgcatcgagcttgggcaggagtacctttctgttcaagagaacaaagcggaatttccgctatccggactgttctacggaagcaatcatcgattgtttgtttgtctgccagttgaacagaggaacatcaagctcaatgtgccgtttctgatcgatactggggcaccgtatacatatgtgacaagagacgtgtttgaaaaactgggttacgtagaaaattgcccatcttccgccaccatacatgtgaatgataccgtaatgaatgtcaaccggtctgttggccacttcaaaaatgttaatttgttgggccaatacttttttctttacgctaaattgacattatcggtaaactatagcgagcgcactgttatcatttcaaagtgcatttagaactatgcaaaaaacgtagccgtcgcgtggcgcatctgctcgctggtgctgcgccgccgctctacatttccgagcggatccactccagcgtcttggggtgcctcgccgcggcagcctcgcactccctcgcgtcccaggggcagcccgcgccgcgagcccacttcaggacatccaggcggccggtggacgccgcgaaccaacagacctacgagctccaggggcagccgttctcgcgcgcccactgcaggacctccaggtggccgaaagacgccgagaagttgcacgtggtctcgtcccaggggtagctgcgctcgcgcgcccactgcaggacctccaggtggccgttttgggcagccgcttcgcacgtccgggagtcccaggggcaggcttcgccgcgcgcccacttcaggacctccaggtggccgtttttttttgcacgtccgggagtcccaggggcaccttttagcgcgctcactccagcacctccatgtggccttcggacgccgcggccatgcacacgccctcgtcccacggacagccggcctcgtgagcccaccgcagcacctgcagcaggcgggcgcggcgggggtcagcgagggcggcgtcgcggaggccgcggcaggcggcggtcagcggcagggccgcccacgggggcatgtgcgacatgatgtccggcacccccaggcagccggccacggaggccatggccatggcagcgcggatgatcttttggccgggatgaaaaaaatgaaaatctatcccgttcaacaattcgtgtgcagggaacctcgcgccaacacaccgcgcgctcaggggcggcgcatctcggcgcggatccactcccgcgtcgcggggtgcttgctcccaagcgcccgtgcatctccgctctgagataatgcgcggcgcgacggcacagcaaagaatacctttcagtgcccctgattttcccgccctccctcgacgcacatcctctccaccatagcggtcaggctcgccagctgcacgcggatcgcggccaggtccggcggcggctccggagccgctggctccgccgacgcatccaactccggagccactgccggccccgccgaccctggagccgccgcctccgctgactccggggcggatgactccggagccgtcgccggctcgtccgacaagtcgatcagatccggggcatggctcacgtcggggatgagatcgatctcgtccgccacgcccgtcacggtatcgtcctcgccgtcgaccgccagcgtcgccaggatggacgcccggagcatctccgcctgctcgcgccacttgtagttagccaggatgtgctcgcggcacgcgaggccgtgccggcgacgcagctccgggtccttgtaatacagctcgatgccctccgccatgtcgcggtagtcgatcagctgcgcctcgccgcccacgccgtcccgcgtgcggtccacgtagtacgccatcacggggtcgcacagaatcgcccgctccgcgctgaagaaatccttgtgcccccccacattggacaccacctgcggacaccccagcgccgcgtgctcaaagttgcacaggccgaatccctccccgtccgacgcgctgatcccgatgtccgcgcagttcatcaggatggtcacgtccgcgtcgctcaggcgctggggggcgtccagcatcaccagatgcttgcggccctcctccatcgtcatcccgcgcttccccagctcgcgctcgtacacggccagcaggtcccacgccccgtgcagcgacgtcccgatcagaagcttcacggactcgcctcggtggcggctcacgaagtcggcgaacgccttcaggcagatgtcccaccgcttgcgcggctggttgcggttcatgttgagcacgatgaagtccgtgctactgatcccgaagtaccgccgggcgatcgccctgtccacggggaacttggccgcggggtccaacgcgtggcgcaccacgtccacgggggtcgtcacgccctgctcctccagatgccgcttccagtacggcgtgaacgccagcacgcggtcggcgcgcgcgttcagctgctccacgaacgggcgcttcatgtgctcgtacacaaggtcctggtacaccatcaccttgaacctccggttcggcaccgccgccagcttctccgtcaagaggctcaccaccacgctgtcgttggagatcaagaccacgtccggatcgcgctccgcgatgtactccgccagaaggtcctcgccgaaaccctgcttgcgcgggacctcgtgcgccatcgcgtcgaagacctccaccttgtccgggagcacccgcttgttccggctgtcatcgcccgtcgtgttctggaacccgaagtagtatatcttctccatctccggaaatgcgcacagatgctgcgccagactggtcatcaccagactgtacccgttggtgttccatggatgcgtggcgcacagcacgagcttcatgcctttggcaaagccgctcagggaaaaaatcgcggacgggcaacgcgagggagggggggcgacggtctttttctgttgcgatcctgacaacgaacccccctcccgcatgtgcgacctcgcactcgacagcggcaagcccgcctcgcgctcgctcgccgggtacgagctggtccgcgcgctccaaggcggcatcagcggcgcccgggtgtcgcacgcgcgggacaccaagtccggacgccaggtggtcatcaaatccctcgagccgtcgcgcatcacctccgagattctcgccagctgcctcaccaacaagctccccgcccagcaccgcagactgttccctcgcgtcatcgacgccggcgtcgccgacgcgggggcgcccgggatgtgccccgccggacacgcattcatcgccatggagctggtggacggcgtccccatggacgagtacctcgcccgaaacccgccgcccccccggcacgccacggccatcgtgttccaggtggccctggccctgcacgccatgcgcgaaacgcacggcctgcgacactgcgatctccacgccggaaacgtcattgtggacgccgaccgcccccacacgcggaacaccgggcgcttcgttctcgcgggacgcaaacaccgacacgtgttcaacctcgccgggtgcccgcgcgtcaaggtcatcgacttcggactcgccgaggcccggaaccccgcccaacgcgccggtaacttcttcgcgcagtacctcctccgcatgtaccagctctacctcaacccgaacgacatagagcgcgtccggctcaagattcgcaccggacagcgcatatcgcccgagctcgcccgcttcatgcgcgcaaacaccgacctctgccgcagtcagcggtcggacatcgaaagcgtcctcgggttcgaggacctcctcctcggtctggtcgggatggacgcggacaccccggccgccgcccgcgtgccccgtccgggcacctccaccacatactaccgcattctcacctcccgccggtttgacaccctccgctcccggtctccgtcctcaccaaacggataagttccacacgatgcccggacaagttacaggcgtgcgcgagcccgggctcacagccccccgcatccgtcagcactgcatgggcgacgggtcgcgcgtgcaaaacgtctcgaacgcgtccgtcacccgctccatgtcgcctacaaaatactccagcccccggccgccgtagcgcgagaaacgctccttgaacactccgatcagccgccgctcgcagtcatggcagtccacgatacacccgaacgtccggacaaagtagcaccccttcgggtactccgatagccgtcgcttcaggtcgcacgtgcgcccaatcttgaacacgtttccgggcatcgacgggtcacgcaggacgtacaggtacccctgcaccgccagcgaggcccgcgccctcgccctcgcgcccgcgcccgcgcccgcgcccgcgctccacgcggcgtttccctcgcgtcgcccggactctagcatgctccgccgagtcgacgaggctccggaggctcgctcaggcttgggtgtatgtcggtctcgggtcccttaaactctatgtctgggaaaatgggacacccaagacagtttatggcttcgcgctcaaactcgcgctccaccggtcgctaaaaaaccgggctaaaaaaagtgtcccgggcaagccgaaccgaatcgccgccccctcgtgtgcgacgcgtgcggtcacgcagtcgaacgcactccatgtgtatcgagtctacgcgcgggtccgcagtcgcaacactttcaacggctcggcgcccatgcacgcggacgctcccggaatctcggaaggggggcgtccggcccggtcggaaaccccggtgcggagacggatacggagtccgcgcttccgggctgatcgcgcccggtccggaagcaaaagagctaaaccatcggacaagaaccggctgtcccagacggaacagccgggcctcgcccctgagctccatgagccgggggtggggtggggtggggtggagtactcacctcctcccctggatgagaaggaacatgttgtcctcgcgcgcgcgctcattgatcttctcctcgagggtcatggcgcgcggcatcgtgggttttgacatcacgatatgcttgcttccgggattcagagtgaagatgtacccaaagaaggggaacccatgcaactcacttgcatggcaatgggcgaacaaggactcgggcgtcaccccgcaacgggggacctccgaggcagacacgccgggcccagggacgatggtgtagccctgggagcgtgcgttggcatatccgtagcccatcgcgtgtgaatagtgtgcgtgtgcgtgtgcgtgtgcgtgtgcgtgtgcgtgtgcgtgtatgcgtttgtaggaggagaccgcgtcatcgtcgcttcaatttttctccactcccggagccgcgtatttcttgcgcgcactctatgtccgggagaaacgggagaaacactccgcgcgcttgcacctgcccgcgcggttggtcggggcgcatccggcgcccggatgtttccgtgcctacgtgtacgcgatcatgacaaagaggaacaggagcatcttgacccagctcatgatcttggcggcgacgttggtggggtggatgtcgccgaacccggtggtggtccacgtcgtgatggtgtagtgaacggtgtcgaacaccgacatttcttccacgttgtatttggccactttcgtcaccaccagaatcacgttgaccaaacacatcaccaccagaagggaaaagtgaagcgcgagcttggtccacactcgctcgggcggaagcaacggagcgaacatttctttcatgtgcaagaaatacttcatgtgcaagaaacccttgagaaaacccgagaaacaccggagtgacacaacggcggtcgcccctccggcccgacgcctcccgacgaggctgctcgtcgtataggaacgattcttgaagcccgcacctcgcatcatcggtaccaatccccgcccccccatcccctcgagtcgcaggagccatggacgaaaaccggatcccgaacgtggtgcccgctctggtgagcaaaaagggcaagcgtcccaggccggtcgggcaggccccgccacccgataccgcgccgggggcatacgggacgtccttcgtgcagaaggtgtacaacagcatgccgcggacgtgccccggcggggaggtggacgccgcatccgccgcgggcacgtcgtccgcggccgtccggaagggcgccgcccgtgcccccgcccgttccggcgcgcacaagtcggagctctcgaaccaccgctcagagattgtcgagctccgcgcgcagctctcgatcagccgcgccgaggcgggcacgctccggacccagctcgcggacagccgcggcgaggtgagctcgctcggcgacgagctcgcggacgtccgcggcgaggtggacgcgctccgggcgcagctcgcggaccgcgccgcgacaaccgcgcggctcgaggccttgcaatcccggctgctcccatatgcgcgcgccggcctgatgtaccagcgcgcgagcgtggggctggacagggcccttggcacgatcagggcaacgcacgcggagaccgttgcggagctctcggccgcccgggcgccgctggactcgtgcgagatgtgcaccaaccacgagatagagctcctcgtggacgacgcggtgcttcggtgctacatctgtccgggctgcgcaagacccaactggtgctgcaactccgcggagtgcgtcgcgatgttccggaccttgggctgcgtggactgcaagacccccctggaaatgtccgactaggtgtccgactagtggtgtccgaccaggcgtcgcccggacgctgtaatccattcccctcccgccatgcagacggccgtacccgcgggctgcctcgcgtcgccgccgcgaaagttttttaatcgccgaccgcccgcgcctgccaatcattacctgcgcgaaacgacgccatcatgaccgcccccggccgagagttggccctgtttctgtcgagccatgcgacgagctccgcctgggccgcgagggagcaccaagacctcgtgaaggcgctcaggctggtcaccagcgggctggcgaagtccctgcccgtcagcatgtgcgtccggatctggcgcccctcgaggagcgccgcgcccctcccgcctggctggttccgccacctgacggccgtgcaagagatcgacctgacgaagtacaccacgcggccgccgatgcgggagctggagagcctgtccctcttcgcgtccctgacgaccctcaacatgtgctgctccgtccagctcaccgttccgtcggagatcctggagagcctgccggggtccatcaccgacctgaacattgccagcctgaaggtgcgcgccgacgcggcgtggctggagcgactggtcctccgcatgccgcgcctcgaggccctggacatcacctcgtgccgcccggtgccgaggatgccggcgccgctgccctccgggctgacgcgccaggaggccggcgagctcgtcggggtgtccgggatcacttcggggggccggctccagcacctgtcgctgcgggggcgcacctcgctggagcagagattggcgtccgacacgctggccggaatggtgcacctgcgcgtgctggacctgtcgtgctgcagccgacacctcagtctggtcgggcttcacacgctgcctgcgctggaaacggtcatcctccggtgccgcgagttacgcaacacggacacggtggtgctgtcccactgcaagcgcatgacccgcctggacctgtccggtgcgaggctggcgtggagtctggacaacgggctgtacggaatgcccagcctaaccgacctcggtctggccggcgcggtcctggaccccatgcacctgataggcgagtcggtcgcccccggtctgacgcggctggacatgtcggccaacgcgcaactgcgcaacccgctgacgagactgtgccagttccggagcctgacgcacctcgacgtctcggactgcccgcgcctgacggagggcgccgaggtggccgacacggtccggtgcctgcgcgcgctgcccagcctccggaagctgtacctcaccagccgcctggtgccggaggagccctcggcgtgagcgcggagcgcgcgcccccctcccttgccattagtttctgcgatatgtggtcctggaacgcacgaagtccagcgaccgcttcgctcctaggtgactcctttgccgccaaaacgtggtgtgcagtttttatgtggcgaagagtgtagcaatcgtgtgcggcccaatgctgaagcacctgtccgagccgtggttcagcctagtctacgtcggcgccaaaacgtttgaggggcggctgggaaacaacgccgacttcaaaaacgcgccggtgggctccgaggtcgtgtggttcaacgacgacatgggaaccaggcgccaggcgagaacaatgatcacctccaagagcacgcacaggtcgttcggaagcatgctgcggagaaagggggtgccgaagtgtctgccgaccgtccagagcgtggcgcacggcgaggccatctacgaaaagttttactccaaggccaagcaagacgaacacggcgtgctgtgcatggggctgcgggtgatcggccggtgaagagcggcgggggggcaaggatgggcggcaactccccacgcggccggacgtgacctccggccgccggccggcgccttcccgtcgcgcactcccgtccggtgttggatgccgggtggaagatagatctcgggggaagtgtaactgagccaaaaatggtttgccaagtcctggtacagacggtggtggtctttctcacgttgtttgcggtcgggggaggcggcgggagcggcggcgggagcggcggcgggagcggcggcagagggcggatgcggccggtcccggtcccggttcgcgtgagaaaatactccggaaaatattgatttctcaacgtctgcagcgcgggggcagccaacccgatggacgcggcaaagtattccaaacagctgttgagcaggggcttctgcgtggtgcctctggggcaccatgcggctgcaccagccgtca

SEQ ID NO: 174 - DNA, 22463 bp, unidentified
  misc_feature 1..22463: note = Fanzor polypeptide
  source 1..22463: mol_type = other DNA
tgctcgcccttttccgccgactctccgccggccattctcgccttcgaagagcgcttcctcgccccccgcgtgcctcctcgcctgggcatttttgtgtaacacgacagaaaatcaaacggaaaaaaatgtgattaaacgggcacgtgcgcgtgcgcgggctcctcgggcaccatccggcatgacaggtacagcgtcctgaggccgggcagccgccgcagggacgccctcgccgcgtccgcgtcgaggccggggcagtccgacagatccaggcgcgtcaggcgcgggtacgcctccagcccttcgatcggccccgcgaggccggcgcacgccgacaggtccaggctcgtcagtccgggggcgagcgagttccccatgaggcgcatggggtccgcggccgctccggacagattgaggtcggtgagggccggcatgccggacaggccgctctccagcgacgacgtcgccccgcagaaggacaggtccagccgcttcaggcggctgcatctggccagcacggccacgtccgtctcccgcagcttgcggcaccgcagcaagagcgtctccagcgcgggcagccggtgcagcccgacgatggagacgttgccgccgcaggaagagaggtccagagtccggatggtcgtcacggcggcgagcgtcccggacgccaggtccctctccaggctcaggcgggccctgagggacaggtgctcgaggcggcactcggggccgggtcggatccccgacgcgcccgacatgacgccggcctccagacgccgccagccggccggcagcggcgccggcatccgcggcaccgggcggcacgacgtgatgtccagcgcctccaggcgcggcatgcgggccgccaggacctccagccacgaggcgtccccccggatggtgaggtaggcgacgttcaggtcggtgatcgaatccgaggtcagcgcgtccggtgacaggccggggaagaccgagccgcacaggttgagcgccgtcaggccggagaacgcggtcaggcggaacgcatccgccggcgcgagtcgccgcccgaccgccgtcagatcgacgacccgcgcgcgtctcaggcggagggcccagtcgctcgggatccgggtggctcgcctcgaggggcgccactcccggacgacctggctcacgtcgagctccctcgccagcccgcgggtgacgagcctcagcgcccgcgcgaggcgctggtgctcccgcgcggtccaggcgaccgccgtcgccctgctcgtcagcatcagtgccagctcggcgtcggggtccatggcgactctttttctttgtttccttgtccttgtcccttgtccgtgggcggcgtgtcctctggcttggctttgcccccctcccgcggctgttcccgcttcaaaaaaatgagatggaaatgaaaaaaagggggggactccttttattttacatgctcggtccgggggactcggtccggtatacgaatcgccacacgcggaggaccccggaccgaggggggcgctgcgccctccccacgatctgccggtccatccgggagtccacggcgtgatagatgatgacgtcggtcgcccggctgaggttgagcccgcagccgtagtgcctgcagttgaccagcagcgcgcgcggctcggacgcccggtcgaactcgcgaacccgcttgttgatcaccgacgcgttgcccttgagcgcctcggccctgatgcccgcgcgctccatcgcgcgcttccccgcgttctccagcgcgtactcgttgtcgcagaagaacagcaccttgctgccctccccgctgcccaggtgccgcaggaggcagtcgaggttgtctattttgggacgcaggcggtcgaacgcgacccccccggaccgatactcgtcccgcggcggactcgccggctccccgtctcggcacaccaggaagtcgctggtgagcagccgccgcttgcacatggggcagctgcgggaggcggaggtgacccacgtggtgatgcacgacaggcagaacgagttgctgcagcagggcaccaccgtcttgttggccatgtgggagaagcagatgaggcagtcggcggcgccctgtattcggtccttgacgttctggatgttctcccggatccgggcgaccttggcgcgctggcgcgcgaccgccgtctccgcctgcgtccgagtggcgtaccgccggcgctgcatgaactccagctccgcgctggcgttgtccagctcgaggtcgaactgcgccagcgccgccgacacgatgttctgctcgctgtcggtgcgctccgggtgcatgtacgcgagcgccgtgtccaggtcgcccgcgtggagccgatccaggatgtcgcgggacgcgatgcccgacagcgcgcgcgtgtgcagcggggccaggcactcgacgagcaccgtttcgggcggctgcaggtcgaacgaggcgtcgacgaacgcgttgtcggtgatgacgaccgtccgggaagcgaatcgcgaccaggtgacgcagtcgaacgagaagaacgaccggatgtgcctgctgttgcagccggaccccgtgacgatgtcgtcggcgacgacgccgtccgagtgcagggccaccacgggcccccgggagacgcgccacgtcgtgaacaggttgtgcacggacgcggtcacgaaccagtggaagcgcgcggggcacacgccgtcgcggaaccgcaggctgtccgcctcgtcgaacaccacccgcgtcgccctgcgctggtggccgcgcagcacggtgcagacgtccgggtagagcgacgccgacaccatgatgagccggaccggggactccccctccgccagcgcggcgacgacctccacggccgacgagaggtccccggtcctgctgacggccgtcgcgcgctcccccgcgccgaactgggcgagcacccgcgaccactggccgacgatgttgtgcgggaccacgaggacgttgagcggcagggggtccaggtggtcctcggcgggcgccatggtcgcggacatgttgtggcatatccgggtgcggacggcggagcaccccgggatgtggtcgtgcccgcagtcgagcagcagggcggcgaccacgtacgacttgccgctgccgggcttgtcgcccagcacgcccatgcgcgtggagacgctgtccccgtcgcccaccgccaggtcgtcgcagccgcgctcggtgtcgagcatggcccgcagcgcggccagctggtgcggcagcagcagggggtggctcgcggcctccgcccggggggcggtcggcccgacggtccggatctccatgggggtcggggtcggtcaggaggagaacagccccagcaccgagcggaggatcttgccgaggctgcgcaggtggtcgaacccccccatgaccagctgcgttaagtccgcgtcggcctgcgcctccacaaagtaattgacgacccccagggtgagcagcgggatcgcttcgacgagcgccgccttcaccgcccccatgtcgaagctgagcgcggccttgagcgcggggatgacggccatgacggtgacgacgaacgccgtcccgcccacggtggtgctgatggcctcggccaccgccgacacgaacgacgtgaagtcccccgtgacggggtcgtgccgcaccgagatgcggtacacgctgtagaggctcatggcggccacgatggggcggtacgtggggaacaccgccatgatgccggtcgccagcatgaggtacatcaccatcgggtcccccagcgcccacatgtacacgagcgtcgccgtcagcagcgcgagcccgccccccagcgtcagcatggcggacgcgttttcagagtccatggtcgcgtccccggcgcagttgacacaaggccgagttttttctgagccgcagagaacggagagggacggggatggcctggttcgcgctcaccaacgccgctcggatagcgatggttttgctcgtggtcggcggctgggccgccctggggcagctggccatagcggtgatgcggagagcgtacaccacggggctcatgacgctgaggacggcgacgcgcaagcggcggcgggcgcggctcgcccgggtggtggccaccgtctggatgtacgccatcgtgttcacgatgatgctgacgaccttcatcgggatgggcgtcctcatgaaggacacggccgactttttcgggttccagaagcacattctgagctgggagtacgtgctgcaccccaagttcgttgcgctgctgtgcgcgtgcgggctgtcggccagcatcgcctccgtttaccgcttcaggcgggccaaggtgatgaacgccgccgcgtacgacgccgcctgcaagttcgggttcaaggtgttcatgggcgcggcgggggtcgggttcgcgatcatcatcatgctggaggcggtcaggctggcgggcgacgtcggcgccaccatgccgacgggcgagggggtgtccaaggcgctggcggtgctcgtggcgtcgcgggccccgctggccgggttcgggggcgtgcccaaggaggaggtcgggtggttcgtggacggatacatgaagaggatgggcgtcgcgggccgggacctgacccgcctgagaaacttcgcctactccctgccgaagcgcgtggacgtggccatggagtcgctgcaggggcgcatgctctcctcggggttcgacgcggagacggcgcgcgacgcggcggccgagctgcgggccgcggtggtgcgcctccgcaagagccgcggcaagcgcgacccgccgtccgccgagcgggtggcggagatctccgggctgaagaggatcgtttccaagcagcgggagagcggggcgacgccggcgccgaagggcgtcggcgacctggtggccgtgttcggggagcaggcgtaacggcggcccggcgcgtcgcggggggcgctatcttttccgagagcacccgtcagtcatggagaacgtccttgaaatccggaccgtgcagtcgtcggtcatcaagacgctcgtggaggcgctcaaggagctgctgaccgacgtggtgctcgaggtggacgagaccgggctgcgggtgatcgccatgaacaaggcgtgcgcggtgctggtgcacctgcggctggacgcgtcgcgcttcgagcagtttcggtgctccaggcccctcaacctgggcgtcaacatcatcaacctgcacaagctgataaagacggtgggcaacagcgacaccctgacgctgtacgtggaggagggggagagccacctgggcatcaaggtcgacagctcggagaaaaacagccgcacggtctacaacctcaacctgctggacatggagaacaccaagatcaccgtgagcccgatgcagttcgaggacgtcatcgtgctggggtcgtccgagtttcagaagatgtgccgcgacatgcacaacatcgccgacgtggtggagatcaaggtcgtgaacgacgaggtgaccttcagctgccgcggcgacttttccacgcaggagacggtcctcgggaacgggtgcctgcagaaggtggcccccgaggaccgggaggagcccgacggcggggccgaggcgacgcccgtggacatggacggcgactcccggatcacgcagggcatgttcaacctcgactacctcgtcatgttcacccggtgcaccaacctcagcccgaccgtgcagctgtacctcaagaacgacttcccgctgtttgtgcgctacaccgtcagcaacctgggcgagatcaagctggtgtgcgcgccgcagtcggcccagtagtgatgtagtcccgggtccactcccccgaccggtccgggtgcgacgactggtcgccgcggtccatggcgtcgaacgtgtcgatgatgcactcgagctgcgcgaggcagtgccgcatgttcgccgcggcgacaaagcgcctggcctggggggacgcccgcaggtcgagcgcgtcgccgcgccccgcgatgtagcgctcgcaggtctggcaggcgtccaggctctgcccggtgtagccggagcacaccacgtaccgctccgagttggcggggcggctggtgctgggcttgcggatgtcgtggcgctcgaagcgctccacgaacgccgccagcagctccacggtgtcggggttgaaggcgtcgaacaccttgatgaccgcgcacccgccccgccgcagcagccgcatcgccaccagcacctccgccgccagcaggcgcgtcatctgcgcctcctgctcgttaaagttggagctgaagtcgaagccgccgtcgcccgtcaccatgtcgcacgacccgtccccgccgcagtcgcgcacgaacgccgcgatgttggccagccgggtgacgtcccccgtcccgtccgcgccgcggcacagccccacgccgaacgcgcgcatccagggccactgcagcttccagtgcggcacgctgcggcggtccgagcccacggtgatgccgcggtgccggtcccggggccgcccgtccgccgccgccgccgccagcgccgtctcgcggaacgtcaccaccgcctccacgaacgagccgggcgcctccgccacgtaggcgaagctcttcggccgggggtccagcagcgcgcggcggatgccgtcgtcgtcgcacacgatctcccacatcttgtagaacgcgcggctgatggggtgcttcctctcgccgtcgacggacaccacgcacggcggcgccgtgtacaccagctcgtacgggttgcacgcgatcttgtaaacgtcccactgcgcctggttgcgccctatcttgtccttcagcagcgccaggctgcgccgcacgtgctccgccgaccgccgccgctgccgctcctcttcttcttcttcgctggacatagcatacaccggacactttctgccgcgctcacccgtcgcgcggcggggggtcgacgctcggggtgacgaagcgctccgccaggcgggcgcccacgatgctggagctctcctcctcctcgttggcgcgcatggtgtccaccatgaaccggagcatgttcatgtccagccccgggcggcacgccttctggaacagcaccgggcactgctccatgaacgcggggtacttgcggctgtagcgctccgctttcgcccggacgtcacctggtccggactgaatctccgacacgatccggagaatggtctccgagtccagcggcgccgaagggggccggctcacggcgctcttcatgctctcggtcatgatgcgcgccgtcgccacccggtcctcggcatccgccctcgcggcccgcgaccgcttcttcgtcccgccgccgctgctcttgtcgggcatgctttggttttcccgtccggtgagaaaatagggcgccccccgttcacgcgcgccccgtgatgatgcgcgggatgtagatgccggccacgcaccccagcaccacccccagtatgtccgagtacatcgggaacgagtcgcggccgctggtcacctccacgatcttggccaccatcagcgcgcagaacgtgccgaccgtgtccgagatgaggttgccccacgcctggcgggtcagctcgccgtccgggagggaggggcccagcaccgccgccagcatgttggacagggtcatcggctcgtcggaccagatcgaggtccacagcgccatctgatccacgaatccgaacaccgccccggggatgaggcccaggaagaacgccgtgaccgaaaacctcgcgtcgccgttcaggaaccacgccagcccgcgccactgccccgcgcgccacgtgaagaacaccgccgccaggaacagcgtcagcatcagcgacagcaccaccacgagggtcagcacgatgtcgcgcatcctcttctccggcgtcgctccctccgcccgtccggattcgcccccgccgtcacccgttctcacccctcgtttcgacgccattgttcctttccacgcccatttttttcaaaacgaataaatacagggcccggccggtccccccgccccatttttcttcccgtcgccgccctctcccccctctccgccatgacgaagacgtgggccgacatctgcggcgacgacctgtcccacaggatcctgtacagggtcatcgacccggccacgatgtcggccatcgacgacttttcgcccgcgatgcacgagctgtgcgacgccgtgcacgcggctcacgccgaccacaaggccgcgatcgatcgcctcgtgggggcgctgaaggaaggcgcccgcctccccggcgccaagtccaacctggccttccactccgcgctgctggccatgtacaacgaaagcatcaagcggttcgtcatgagcatgcgagggacgctcaagatcatcgcggtgacggaggtgcacgaggtgagagacgacaaggcggccctggagcgcgtgagccgcgtgtcgcagctggaggacctccagcgccccctggacgcgcgcatcaaagccctcgccaggagccagaccgaggagaagcggcgcaacgccgacgcggcccgccggatggccagggaggcgaaggcgcgcttctgccgcaggattctctgcgtgatgtacggcacgcacaccgaagagagcgacgaccaggaggcgtggagcgaggcgtccgactgggcccgccaacggctggggggcggcgagtgcgtcatggacaggatgcagcgcgtcctctcggagatcgtccgacacaagagggcgatcgactgggagatagactcgcaatgggcctacgacggggcgtcgcccagccgccgcttcgtgggcggcgcactgtaatcaaaaaaaaaaaatcactctatctgctccgccttgtccgagaggtggcggacggcctcggacagcagttccgccgtttcgtcgggaacgcgcatcccctccgcgacggacagcaggcgaagcacgaactcggaggggcgcgcgacgggcgccgaaaaccgggtctcgatcctcccccggtgacggtgccactccgccgtcacgcagacggacatcccgtcgcttgtcccctggatgcagacccgctcgtcgctctggccgtcgacgtttttccactgcagctgcagtcgcaccgtccccctgtccgtcaccaccgtcttgtccacggtgttcgtgtcgaccaacatgtatgatatacaccccttgccatatttttctgcacaccgggtaatgcacgacaagcaacttgtgcatcgtgcagtcattcattacttgcatttcaacctctcgttgcggaaagtggccacagtctacgggtgtggctacacgacgctgggcggatgggtcagaaagcagctcggtacatcgacaccgcctccgcgaaaacggaaatcgccggtcagcgacgtgatacacgaggcggtagtgcaatgcgtcgaaaacaacccgttcaccacactgtccgatatcgtgaaacggatacgtgcgaaaggcgtcggcgtccacagtcaggcgggttctgcaaaaagcaaacatgtcgaggaaacgggccggggtgcgcttcgcgcccaaagaacccaccaagcagcaggcggagcagtttttgcacgagattcaaacgcccgcgcaagaagtaatttccatcgacgaaagcagcgccgtgctggaaagcgtgccgacgtatggatacagcctcaagagaacgagggtagtgaagctaaccaacaagccggtgcgaggcaaccgcgtgacgctgctcttggcgatatcgaacacgcgaggtgtagtgcaccatgcgacgtattcgggtagctgcaattcccagaagttcgccggatttcttggcgacctcccacagttttcgtcgcggacatccattattctggacaacgtgcgattccatcattcacacgtggtgaaagccgccgcacacgccaacactctgcacctcgtgttcacgccgccctactgtccggacttcaatccgatcgaaaacgcgttctccgtcatcaaatccgtgaccagacgcttcgacgactcgctccccgatgccatatggagcgtgacgcccgagaagtgcgcggccttcttcgccagatcgatacggcacgcggcgacgctagcggagacggccccggacgcgatgcaacccgccgtgcgcgtcgacggttgaccagacgccgtgtgctgcgcagcgcggtgcggcgcggcgcgcccaggcggtgccgtcggcgagcgcgcccgctacgcacggacataaaggaacgccatgcagcgagcaaagccaggatccactccgccctcgacaccgccgaatctaccgctcccggagtatggaggcggacgtggccgaaggccccgtcctcgggacggggcgaaccacgaccgtcaagtgctgcttcaaagccgccagcgcatgcaagcgtcgcaacgccgttttcggccgcgcctgtctccgtcggagacgccccgtcaccgcgcagcgagtgcgcgcggccaagacgcctccgacggcgttcaaagacctcactgacatcgtggacagcgcggtcaatctggtttccaaggccgcgcgtcgaggctccctcgtcgccatgttgacggtggtgcgcacgttggagaggaacaacagcgctctacccgccgggttcttcggcaacagcttggacacctttttcggacagtgcttcaagtttggcgcgttgaagcgcacggaggacggtatgacaccggacatgccgcgcgctgctaccagcaacccgtggatcctgagcgccctgcgcgacccgagggttgcccaggcgttgagcaagcaccgtgtccgccgacagccaggggactccaacctcctccaggccgccgccaacgcctaccagaccaactttgtcaactttttcgactacgagctgcctcgccgcgtcaagaccatggtcaaggcgctgtggcggcgcagctacccggactacaatacgccgcgcccgaaggaacagcttgccagggcggtcaactacgccaccgtcctcgtcgacggcgttccggagccggtcggcgttccggacgctttcctgcaggcggttcgcgagctgcggtgtcggcatctcgctaccgtttcgcccgccgccaccgcggcgctgcgtgccgacgtggcggagctgactcgacggcgtgccgccgagcccaagaacagcgaccgatggaaggccttgtccgccgagctcctcgaggcgcggcgccgcgtcaagcacgcggcgctcggcaagaggatcgagttcgtgtactggctgcttcgtcggctgcaagccatggagaccgcggacgacgtcgtctacaagaagtttgcaatggcgccgctggctcgcgagcagcgcgcgcacatcaccatcgacggcaaagtgctcagagaatacctctttccgcgcctcaaggacatcggttactacgccgccggcatgacggcgtccgccttggacgaccccgacatccgcgcggcccacctcgccgcgctcttccccggctgcgagaacctccggtcgcggcgacgaggatgggtgtcgtcctcgtcgttcaagacggacggctactccttgtgcgcatcgtttgctcgcgactccaacctgacggcgaagcgcgggagcggtccgaaacgcgtcccggaaagcaagaagaaaaagtcggcgaaacgagcggagaagctgcaaggcacgttcggcgccatccccgagggcgccgtggtggtagggtgcgacatgggcatcgtgtatccgtacgccgtggcgtggttcggcgcggacggcaaacggcacacccggctgctctcgcgctacgcgtacaagaagctctctggaatcaaggctcacgagaagatcatgacgcgtcgccagagccgcctggaggaggcgcaccgtccccgcagcgagacgtccgccaagagctcgcgactcggagacgtcctcggctacgcgaccgcgtgcaactcgagctgggaggagacgtggaagcagaacggcgaccggaggtgttccagatcgaggatggcctcgtacattgggagggagcgcgtgctgacgcgcttctggaacggcgtgctgcgcgacgtgctcgctagccaccctggcaagacgcgcggcgatgtctacgctgccgcgggattccccgacttcaactgctgcacccgcggctgcccggcgtctccgaccaccgcggcgttcaaggcgatgaagcgcgtggtgcaggtggttcccacggacgagtacaagacgagccaagtgtgcgcgaggtgtctctcgagcctccgcaaaccaatgaatcgcattacactcccagacggtcgcgtccggtaccaagagctgcgaggtttcaggctgtgccaacagtgttttctggagtctcgtgcgcagccagcgtaccagtgggagacggagaggtggcgaggctacaagcggtttcatcgcgacctcaatgccgcgatggccatcatcctcgtggcgggcaagaagaacgaagatcgccccgagccgctccgtcgaccaagtagcagacaacgcgaagtcgtagaatacactagcctcagcgactgctgcgcagaataggcgtctctgtgccagcgtcctttgccaaaatgtggtgtgcaggttttagatggcaaagagtgtatgacgagcgacattctgcagagatttttgtctgccttgagaaccaaagtcacatcatgagcagcggatgggtgttcaaagcggccgcgtccaacggcgacacgctgtcagacgcgctggagggggacgccgtgctcgcgaccatcaactccgcgcatcgctttgcctttgggtgcggggcggcctcggcggcggtcctcttcatcgactcggacggcatcgacgccccgcggatatcgtgcgggggcaccgtgctgaccacgccctcctcccgcatcgacgccgccgccgtggagggccccctgtcgccctctaacgtccccgacggcggcgtcaccgacgccaagatcgcggagtccaacgtccggacgcaccacctggaggactccgcggtcaccgactctaagatcgcggaatccaacgtccggacgcaccacctggaggactccgcggtcaccgactctaagatcgcggaatccaacgtccggacgccccacctggaggacgccgcggtcaccgacgccaagatcgccgagtccaacgtccgcacgcaccacctggaaaactccgccgtcaccgacgccaagatcgccgagtcgaacgtccgcacgcaccacctggaggacgccgccgtctcggcagccaagatcgccgagtccaacatccggacgcaccacctcgaggactccgcggtcatcgacgccaaaatcgccgagtccaacgtccggacgccccacctggaggacgccgcggtcaccgacgccaagatctccgagtccaacgtccggacgcgccacatcgatgacgccgcagtcaccgacgccaagatcgcggaatccaacatccgcacgcaccacctggaagacgccgcggtgaccgtcgccaagatcgcggagtccaatgttcggacccaccacatcgaggacgccgccgtcaccgacgccaagatctccgagtccaatgttcggacccaccacatcgaggacgccgccgtcacggacgccaagatcgccgagtccaacgtccggacccaccacatcgaggacgccgcggtcaccgacgccaagatcgccgagtccaacgttcggacgcaccacctggaagactccgcggtcaccgacgccaagatcgcggagtccaacgtccggacccaccacctcgaggacgacgccgtcacggacgccaaaatcgccgagtccaacgtccgcacgcatcacctcgaggacgccgccgtcacggacgccaagatcgccgagtccaacgtccggacgcaccacatcgaggacgccgcggtcaccgacgccaagatctccgagtccaacgtccggacgcaccacatcgaggacgccgcggtcaccgacgccaagatcgccgagtccaacgtccgcacgcgccacctcgaggacgccgcggtcaccgacgccaagatctccgagtccaatgttcggacccaccacctcgaggacgccgccgtcacggacgccaagatcgccgagtccaacgtccggacccaccacctcgaggacgccgccgtcacggacgccaagatcgccgagtccaacgtccggacccaccacctcgaggacgccgccgtcacggacgccaagatcgccgagtccaacgtccggacggagcacctggaggacgccgccgtcacggacgccaagatcgcggagtccaacgtccggacggagcacctggaggacgccgcggtgaccgacgccaagatcgcggaatccaacgtccggacgcgccacatcgaggacgccgcggtcatcgacgccaagatcgcagagtccaatgttcggacccaccacatcgaggacgccgcggtcatcgacgccaagatcgcagagtccaacgtccggacgcaccacctggaggacgccgcggtgaccgacgccaagatcgcggaatccaacgtccggacggagcacctggaggacgccgcggtcaccgacgccaagatcgcggaatccaacgtccggacggagcacctcgaggactcagtggtgaccgacgccaagatcgcggaatccaacgtccggacgcaccacctggaggacgccgccgtcaccgcagccaagatcgcggaatccaacgtccggacggagcacctggaagacgccgccgtcaccgcagccaagatcgcggaatccaacgtccggacggagcacctggaagacgccgccgtgacggcggcaaaggtattcgagcagctgccggtgtcggtgggcggcacggggctgtccaccgcctccgaaggctgtctcctagtgggcaacgccgcagacccgtttctcaccagcccactcctgtactgggaagactcgacagaaaccctgttcgccggaggactgtccgccagcaacgccgctgtctcgggaaccctggcggcgggcggccgcccggacgtcgagcaggccctcgcggacatcgagtcgggctcggccatcgtcgacgacggcatcgtcggtcgccacctggcggacgccgccgtcgtcgaccgccacatcgcggagtcgaacgtcaggaccgtccacctggaagacgccgccgtgaccccggacaagatcgacggccccgtgccggtgcccacggggggcacggggctggcgtcggtccccgcgggggcgctgcttttcggcccggacgtcgacggggaccccctggcgtactccgacgcgctgaggtacgacgcggcggccgccaacctcgggtccagcaacgtgttcgcggaggacaggctgcacgcggcgtccaacatcatcctaggcggggtgggggcgacgaggttccggttctccgtcggcggcgccagcaacgacgacctcgtcatctcccgcatagacgagaaccaggtggagtcgtcgtacctcaacctgggcgacctcgtcgcgctcctgtccaacgtcaacatctacgacccgtgaggcgacacgcgcgcatttttttccgggcaaggaagcaaaacacccttcgagggcatgagtgaaaactacaacatatccgtccgggacgcgctggacgtgttctcccttgacccggatttcgacctcgactcgctgaagcggtcgtaccggacggtggctctgagggttcatccggatagaggaggcaacggggagcttttccaaaccgttaacgagtgcttccaggtgctgtgcctggagcacaacgcccgcagcgggggcgccccccacgaccagctcaagcgcgacttcgacgccgacatccgcaactacgacgccaccacccgccgcgacgtcaagttcaacatccagcagttcaactcggtgttcgagcagacccgcgtcgaggacgggatccgcgacaccgggtacggcgggtggctgcagtccgacgaggacctgccgtcgtcgcgcgcgaagccccgcatcagccccggcgcgggggtcgacgccttcaaccgcgcgttcgaggagagcgtcccggctccgaagaacgaggagacggccatcgtcgtgcgccccgtggacgtcgcgtgcggctcctcgctgtggctgaccgacctgggggaggactccgtggaggactactcgcaggcgggcgcattcgactgccgcctcgcgcacagcacgcagcgcctcgccgaccccagatcggtgcacctgtccggggactgccgtcgcatgactccggagcagatcgaggcgcagcgctccgccgacatgagccgcggactgtcgctgcacgagacggacgtgctgcggcgcgaggaggagcgcgcggcccgactggaccgggtccgccgcgagcgggagatggaaaagcaccgccgcttctccgacgcccacgccagggccaaccgaatgtttctgggagcgtgatccgacgctttttttttttttacctttttctttttcccatcgatgatcggatcttcgccaacgcgcccttattcgtcttctccttcttcggctttttcgccttcttctccttcgccttcttgaccccgtcgacgacctttctcttcagattgccgggcgcgttccggaccgcccgcttcgccttccgcttcatcgtctctcgcttggtctttttcaggttcttcttggcctgcttcgcttccgcggctcgctcctttttgattttggcctccgtctccgtcgccttcttgtcggcgctctccgcgttgtccttggcgtcctgcgacttggcgtccaggtccgccgcctccgcgtccagccgcttccgctcctcctgcttgttcttcaagtcctcgttcagctgatccctctccgccggagaggcgctctctttcagccgcttcttcaggctctcgatgtcggcgtccgcgtcgctgacctccttcctctttttcttcgccgcctcgtccgcggcccccgcctccagctgcgcctgcttccgcttgttctgcgcgtccatcttgtcctgctggcgcttgacctccgtgccgaattccttgtacgtcatctttccggacgcgcgcttctgatccagcaccttcatgtcgtcgaccgtctttttcgccgcctccaggtcggcgtcccccgcggccttctccctcttcatggcgtccagcttctcctccaatcgcttcctttcgatcgggtccaggctttcgtttcggaggatgcgctcggcgtcggcgatggcgtcctcgcgcttgtcctgctgcttcttgatctcctcggcctgcttctccgccatccgggtggggtcggagacgcggctgtccatcagcaccgcgttgaggtcgttggtcttcttctggacttcggcctgggcgcgctggatctcctgcacgctggccttcttctcctccagatccctcgtgtactcctccaggttggcctccgcccgccgctggaaatcgcccagttcgttcttcttcctgtcgatgtcggcggacaatttcgctttcttttcgttgctcgaccacagctttgcgtttatttcgcgggctttctttttcgcatcggctttggtgatgcccacgtccattccgttgttgaccatctcgatggcgtgactgttccgcttcccttccaactggttgcgttccttcttcttgctttccagctcttgtgttaactgctctttcatactttcgggcattttcttaatcgcctcctccatatttttgatttccaggtcggcggtctccacgtcggccttcagcgcctcgtgtttcgtggtcatttccacctgacgagccatcttggccttttccttttcgtaggaggcgatgtcggaggtgagactcgacacgtcgctctgcgccttgtcgatctcttgctgccggtcttgcgtgtgcttttggaggtcggccttggtctcttccaccgttcgggcggcgtcctgaagctcggcgttcgtcgcctgcagcttcacgcccagcgcctcggactccgtcgtcagcgggcctatcttttcctcgtagaccgcctcggcgtcggcctcctggcggttctgtttgatctcttcgtcgcgtttcttcatctcctcctcggcgtcctccagcttctcgttcagctcctgcagctccttcggatcgtcggtttcttggatctcctccctgatgtcgtccgcctcctccttcttctcgtcggccgcttccatcgcctcttcgttcttctccgcgacctctttcagcttggtggccgtctcttcgccgagcgcctcgttcacgatggccgccttctgttcgtcgggagccgtcaacataggcgcggcttccagaccatgatcgaatagttcattaccctcgtcctcctcttcttcctcgtcttcctcgtcgtcctcgtcgtcctcgtcttcctcgtcgtcctcgtcgtcctcgtcttcctcgtcgtcctcgtcgtcctcgtcttcctcgtcgtcctcgccgtccttgtcctcgtcctcgtcgccgtccttgtcctcgtcctcgtcgccctcctcctccacgccgtcgccctcctcctccacgccctcgccctcgccttcgccctcgtcgtcgtagtagtcgtcctcctgctcgacgttctcttccgcggcgacctggtcttcgcccgtctcgtgcttgcgcacgcggttgacgatccacctcagcagcattcccgccaccaccaagcccgagaccaacaccgtggtggtatgcgcctgcagcgcgatcagtttgctcaccgttttgggcaccgtggccccctcggtccccgaatcctcctccccggacgtcgacgtcgacgacgatcgcacgcaggacgcgacgatgtccatggcggagctggcggcctcgcagtcgttgagcgcgctggcgacgttggcggggaggtagacggacgcgagggaggtgtcggcttcgaacagcatgttgcccatctcgatcaccagccgcaccgcggccacgatgcccgcgaaagtcaccccgcgcaccagcacgtggccgatccgaagaaagggccgggacttgaatgcgaccttttggacgactcccaccagggcgaggatcgccatcgccgtggccacggtgagcgcgtccaggccgatcaccgaccacatgacgcgcgtgtcgctgtaccccgcgcactcgcacatcccgttttcgcaagatcgctccacgcacttgtcaagcgtcgctcgcgtgtcggacacgcacgggtcgaaccacggccaccacctccgcgtcaccatgctcgaccagaacagcgtgtgccagaaaaactttatcgtgtccacaaactcgcactcgccgtcctctcgcaggcacggggtgtcgaatcggatccacgtgaacaggttcgccagattcggcacgttgaggaacccgtgccggtggatggggtcccaccaccagaacagcagcagcaggcaggtgacgatggcgtctatggcgatcttgacaaagagcagagagcgaggtttggtcacactgggacgcggggggaacccccacagctttttgccgatgggcaccaggatcgccaccagcaccgccgcgacaaacagcgccgtcatgaaaacgaacagccacatcccccgcgtattggcgtatcggcacgaaaattgctgcgtacccgcgcgacgcgcgcaagcgcgtgcaaaatattttgaatcgtgcatgccacatttcgccgccacacgcaaaccaaaatcgctctcgaaaacagaaagccacccaacgcgatcgaccgaccccgacccctaaaccgccaacaccaacatcatcatcaacatgtcgaaccccaagggaatggcggctcgcaacggcttccggatgtcgagcgggccgctgaaggtcgccgtgccgcacggtctgcagctcaccctgcagctgtgcaagcccgggcggctccccaagagccacccgcaccacttccgagtcgtgcgcctgtgcttccgctgcgaagcgccgggcccgctcgaggggtgcgagctggtagtctacatttccacccccctgttccgtcacggactcaacatccgcgcgagatggttcctggcgaccgccctctggctcgtgggattcgagctggagggcgtccacgacccgcgcgccgccatgtacggctatgtcatggcggcgtttcgggccgacggattcgccgcgcccgccagcccgccgccgggatgcccgcgcgcggtgtcgctcgacgcgtcgcgccccgcggcgcccatagcaaacgacttcgaagcgttggccgccgcgctggggctctggacgagggatagcgcggacgagtcgagcggtatggtgcgccgtaccgccgacgaacgcagcaggtcgctgacggccaacatcgtcaccgccgacatgcgcgtcggctcgaaccagtggggcgacccggaggccgagaacggcatcgcgggcgccgtcgtccgcgcgacgcacccggactgcgagttctcgccgtggacctgcctgttgtgcttggatggtcccaagggcgagcacgacgagtgtccccactgccgcgtgcaattccacgccgactgcgcggccatgatgctactacacgacagggcctgcgccagctgtcggaagccgatcgtcggggggtccgacgaggacgaggacgactacgggaccgactacgggaccgactacgactacgactactacaccgacttcgactacgacaccgactacgacaccgacaccgacgacgggaccgacgacgacgcggagccggagccggagccggagcacgtgacccgcgagatcatagaggctagcggctaccgtctgggatcggtgtttgtcgagcggtggggcccgcacaacttcgtcaccgagaccctgctcgcggcggcgaccgccgtctgcgaagccagaccctgcaccatggacgagatcgccgactacctgttgggcaagggatgtctcgcgctccccgccatcgccgccaacccgtcggacctagccgccgacgtcgagcggtacttggcgagcgacgacgtgtaaaataaataaaaaaataaatagtaattgtataaattacacattttagattatttttttttgctttgattttctttcgggcgacagacagaaaacgctgcgctcttctcacttgcgagcttctaccagccacacgatggtgtccagcatgccgggcatggccggggcgaacccctccggcttgtcccccttcaaggtggtgctgcaggtcaccaagtcgacggtctcctccatgagccggtcgcagtcggccaggatgtcgcgcctcccggcggccaggacgtgctccaccacggcgacgcatatctgggggtctcggccctcgaacgcgcagcacacggcgagcgagtcgacggcgcacgtggagtccttgatcgctttcgcgaacgccgcgcgaagcatctccaacttggcggccggcttcatgtcgcactcgatgatcccggggacgacggcgaacgggtcgcgctcgatgcgctcttggagctcccacgagtgatacatggccatgacggcgtccggggtgaagcgatcgtcgctcttgagatcgaacgactcggaccagttgcgggtggcgcgcgcgaagggagacatctcgaggccgtggtggcgcgacatgatgatgcgtgatgcgtgatgcgtgctgtatatatacacggccggcgtgccgctttcaaaaaaacaaaaacaaagcgtccgtccggtcagcagaacaggccgttccggagcgcctccgaggccgaggggcgggcctccgggtccgggtccagcagcgcggcgcacagcgcggcggccttgggggcggccgggttgcgccacagcacctctgcggcggcggtcccctcccgctcgccgaacgggtgcgccgtgagcgacgggtgacccaggcggtacagcagcacgccgagcgaccacatgtccatccccgggtgcgccggtccggtatctgggcacgcgtacacccccgaccccggctcgtcgagcgcgaccccgatctcggtggcggcgtgcaggtctgtcagcgtgcatcgtccggaccacatgcacgccaggttccccggacggatggcgagatgcaccagaggggttttggcgtgcagctccgccacggcggcgaacgccgggcgcgcggccgcggcgatctccgcgtcgcccctggcccgccgctcgatgcgcatcgagcgcctcgcccccggacaggtctgcaggacgacgctcgggtgcgccggctcgggggccgcctccgcaaacggcccgaagtcgacgtccgaatcgaagcacaggcggtggaacgcgccgcccaccaccagcccccggtcgcacgtctccgccttctcgagggcgtggaactcgcggcgggcggaggagtcgtctcggtggcggtggatgacgacgcgcctgcggttggctctgtcccacccctcgtaggcggtcacgcgcccccagccggtgatgggcctcgcgacgacgaagttcggctttgtcaccgtcatttttgcaggtag

SEQ ID NO: 175 - DNA, 22427 bp, unidentified
  misc_feature 1..22427: note = Fanzor polypeptide
  source 1..22427: mol_type = other DNA
tttttacaagccgcggcggcgccggccggccccaccgcctaggaggaggagtaggaggaggcgtcgctgcaccgccggacgaacgccacgacttcgcgggccgcgtccgccacgtcccccgccgcgtccacctccagcgtgcccggcgcccgctcgcccgcgtacttcgcctcgtgcagcgcgtggaggggcgccagcgtcgccgcgtccaggccggcctccgagggacgccccctggcgcgcacccgcgccatgcaaagctccggagacgcccgcaggtacacgcggcccacgcactcgaaattcagagcctgggacacggtgttcaccagctccgtgaagcagcggtgctggaacgcgtcgaacaccccggactgcagcttgtactccgcgaacagcgccgtgtcaaaggggtcgcgctcctgcaccaccacgccctgggcggcgtcccccgaaagcagctgctggatgcgcgtggtcaggacgtggacctgaaagcccagcgcgtggcggtggcggtcgcggtagtacaggtccagcggcgcgtccacggcctcgccgcggtgccggaacggcgcgcaccagcgctccacgggctccggaatcacgtgcagccccaacgccgcgaggcgctgcaggagggtcgtcttcccgctgccgatgttgccgtcaaccaccacgtaccgccgactgggcgcgcccgacgcttgcatcgcggctccgggtgcggaccgccgtcgcgcttaacccgcgccagacgcgcccgggattattgttacgtttgaggaaaccctgaccagcgcccgcccgtccgccatggccatgttcaccgactttgtcagggacaccaccacgcgcggcgacggcaagaaggtgcgcgtccccggccgcctggagtttacggtctccgggcaggacgtcgcgctggtgtccggcctccgccgcgcgatcatgaccgacgtcaagatcgccgccttccgcttcgacgcggtggaccccgccgcgcaggacgtccgggtgtccctgaacaccggctccctgcacaacgagatcatcggcgagcgcgtcgggctcctgccgctgcacctggacaaggcggccctcctggacttccggccggccgcgtggcggttcgagatcgacgtggagaacaccggctccaagcccctcgacgtcaccaccgccgacatctccatcgtgcccacggacgacgccgccgccgccgacgccgcgacgaccgcggcgcgcgtgttcagggcggaccccatcaccgggcggcaccccatcgtcacggtgctcatgccgggccagcggctcgccctcgaggccaccgcgaccctcggcagcggccacgagcacgcgcggttcaaccccgtcgcggcgtgcgccatgttcccgctgcaggacaaggccgccgtggacaaggcgcgccggggccgggaggacaaggcaaccttcgacgcgctggacgccaagcgcatcgtgctccgggacgcggccggggccccggccgcccaccgcttctgcctcgagacgcagtgcggcatgagcgccgaggaggtcgtggaggccgggtacgaggcgctggccagccggctccgcgccctggcggacgccaccgacggcaccgcccgggtgcacgacgtgcccccgcagaccgggtcgcccccggacatccacagcctcaagctgtccggcgaggaccacacgtccggcgcgctggtgcagaccaagctcttggagaagaccgacttcgcgggctactacctcccgcacctcctggagcgcgccatcgtcgtcaggatccgcgtcccgcccggcgcaaccgcgcgggggatgctcaaggaggcgtgcgagtcggcggcggacctgtgcgagcacgcgctggccgagtggcagaagaccgcgaaccccggcaagtgagtgagcgggatccggccggtcagtcgaacgacagcgtggtctgcacccgctggtggatgccggccgccaccggccgcgcccccgccttgccgcccgccgcccggtcgccgccgccgggcgcggggacggcgggcgcggcggcgaccggggcgcgcttggccacgccgccgtccaccatggcgcgctcgatggccctcttgttctcatggatgtaatccaggacgcccgtctcgatggcccacttgaaaaagttgagctgccccaccgtcgtctcgatcgcgtcgtccgggccgtcgccgtacacgaaccggatgcgctcgtgccgccggaacggatcgaactgctccttggaaaacgtcttgagcgcgctgcggtagctgtggtacacgttgaactggccgccgtcgcgcgccaggatcacgtcgttccgcttggcgtggttggtgatgaaccactcgatcatgcgcagggacgccggcgagctcccgtgcacgaccgacaccatcggccggatgttgtccgccttgctgtagaaacggtttatcgccagcatcaggatgtcctggttctggtgcatggcggcgggcggcgggcggcgggcggcggctcctcgcgcgaaacctcgggcgctgcttcactcgggcgggcgcgccgccgggctccgggcgtcttacaccccttcactccgggccgccggcctcctcgcccgccgcactcgcagccgggggcacgtgcacgcccagctcctccgggccccagaacgccttgcagtgctcgcagctgtacaggaaccgcaggttgagggcgtcgtacttgacgtacagcaccctgcccttctgccgcggggcgcgcgtgcaccccttgttggggcacggcaccgtgtccacgcgcggcagcgtcgggtcctcgtggagcagcggcgtcagcaggtggtggtacttggcgcggtcgtcccggtagtccgtctccactatcggctcgctggagtcgccgacatcgtaggtcgaggagcagtagttgcactggtagatgacctcccctccggacagcttcacatacaggagattgtcgcacacatcgcagaacctcatggcgaggaggccggggatcggttccggagggacttgctctacccgccgcctataaaaggcggcacacttacgcgcgcagccctaacgccccgagccggcgcccgtcccgtccgtcgtccccgcgaccccggcgtacgcctcccgctccacgttgcggtagtcgatcatctggcacgccggcagggtgtccttggaggcggtgccgatgtcgggctgcggcgggcgatacatcgaggggctgctcaccacgcccttcttggggatatagtcgtagctcgggcaccgggtcgccgtccgtgtctgcccgcgcaggtcgttctccagcgcgatcatatccccccacgcctggtgcacggcgtccggctgcggctgcgggcccaccgtgctggtcgtgttccccgcgaccaggccgcggtcgtgcgcgcacgggtcggtgtgcgtgaagcggttgatgtccaccgtgtgcgagaatatagacacgttgtcccggatctcggccttcgtcgcgcacgagtcgtagcgcaggcggttgaacatcctcgtttcgttgtcaaccacgcagaattttttttcctcccccgccatgacgacccgcaggaacgccggcgtcccccggacccaggcgtcgagcatcaaggccggcacgtaccgctccctaagtctcaacgacaccccggtctcggacgccttctcccggatggtcatcgcgcgcatgacccagcgcggcgtggccaccaccgacgagaagcactggtccctcggcgagatgctggacgagttctcgagcggaaacatcaacgtgtaccccgactaccagcgcggcatggtggccaccgtccagtgggcgcgcgagctcatcggcgtctgcatgctcacgtccgccccgatcgcccccatctacctctacgccacccccacgggctgctacgaggtcgtcgacggcgcgcagcgcctcgccgcgtacttcctgttcatgatgggcgcgtttcccgtcgtcgacgacgcgggcacggagtggtggttctgctccgggagcgacccctgccactggacccgcgtcttgggcggccccacgcacgagaccggcgtggccgccctcatagacgactcgcccgtcccggaggccatccgccgcttccacagccagacgcgccccttcctcaagcccccgcccgccgacgcggccctgctgtccggcgagatccagggccgcctccgcggccggaagcagtccatcgtggtcatgcccaagacctgggaccgcgagctggccatcctctacaccgtgttcaccgggctgaaggcgtggcggcagaccaaggacgagtgcctcgtccacatgcacgaccacgcctcccgcgcgctcaaggccctggagcccgacctcgtccaggcgctcgcggaggcgggcgtgcccttcagctcgcccacccgccaggtgtacggcgtcctcgtgcggacgttcgcgtgcctcgagaacttttcccacgtgccggtcgagcaggacgagcgcctgtacgtggacctcatgatgaagctcgccgccgactacgcgaccgccgccccccccgcgcgcaccatcgccgccctccggaagggcgtcgactggctgcacgccaacggcgccgcgctgatgagtaccctccccccgcgccccccgaagatcaccccggacaccctgtgcgcgctcctctacaccgcgagctcccggtccaccttccgcgtcaagtccatggtcacgatggtcctctttgtctccgcgaccaagcccaagcgcctcctgctgctcagaggcggcaacatcgccaacgccgacgagatactaaacgactaccaggccgcgctcgaccggaggcgcgcgtccggctccaccaacctcgcggagctgtgcgccaccgcgtctcggctggtgaactgagagcacccgaacaccttcgtccggagcgctgcttcacgcgagccgcgggcacggagctagccaaccagggaaaagccggggacacgttcgtagcccgggtcgaccggtggagtgcgagtcagcgcacgaagccatgtccggtccggggtttcccgttttgccatacactgagtttacaccccttgcccgttgtgcaccgtgcggtcattttcatttcaaatgactgctgcgcagaataggcgtctctgtgccagaaaacccagaacgggcgtggtgcgcaggttttagatatttaaaattctacgcgatgtccgccggcacgctcctcacccccgagctggtctgaagccgccgcgcggggggggaggcgcccgcgccgtggcggtggtgcgactcgtggcactcggcgcagagcggctccaggttgaaggcggcgtcccgcacgcgccgctccgccgaggcctgcggcacgcggtggtgcgtgtgcaccgccggacgccgcccgcaccgctcgcacacccccatgaacacgcccgcattgtagttggaccgcttccgcgacacggcgtagtccgggtcgtggccctggagccgccgcagggcgtgcgcggcgcgctccaggaacgtggcgggcatgcccagggaccggcacaccgtcacgccgtacgtggtctcgcccacgccgtcgcggagcgtgcgctcgtagaccaggcaccccgagtcgtcggtccggaccgagaggtgccggacggccacccccccgcccccgcccccgcccgccaggcccagcatgtccacaacgtcgtgctggtgtgtggccagcaggaaacggcacccgcggtcgcgcagctcctccacgcccgcggtgattatggccgtggccgacacgcgctccgtgccgctgcacagctcgtcgcccaacacgaggctcatggagtcgctgtgccgcaggatctggttgagctcgctggcctccacgctgaaggtggacaggccgcggttgatgtcgtcgttgttccagatgcgggtgaagagccgcgcgaacggtcccaccaccaccgagtccgcgctcacgtacatgccggcctgcgccatgcacaccgctatgcccaccgacttcatcaggcagctcttgccgctgccgttgatgccgtacaggagcatgccgcagcaccggtcgtccatggagacgtcgttgcccacgtactcgtgcggcccgtccagggcctccaccaccgggtgccgcaggcccgccgccgtcacgaacgcccccttcccggacacaatctccgggcgcacaaacccgcgatcctccgccatcaccgccaccgcggaggccacgtccaggtcctccagctcccgcgcgcacaggaacaccgcgtccgcggtggcggcgccgagggccgcgcactgcgccgcgtgcacggacgcggtcagctcccgcacgcggcgccgcgcgtcggccaccgcttccagcgcgctgtccagatcggggtgcgccagcaccatgtcgctcttcttcgagcggtgcccgcggagcgagaggtccaggcaccggatccgacgccccgcgatctccagcgccgggtcccgccggcgcgcctcgcgcattgcggcatcgaaccggcgccgggtgacggcgatttccagcgccgcgggcgattcatccacacggaagtgagactcggacaccgctccggagcacccctccaggctccggagcgcggccgctagctccgcgtccaaggcgccgctccgggcgcgcgcggcatccagctcgccgcacacccccggccggaacaccgtcccggacgagtagcgggacgcctcgacatcgacgaccgcctcgaaggcggccgcggccgagtcggcggggtggtgcggccgcgcgcccagcacctcgacggaggcctccttcagcagccggagcgagtccaccatcgccgcaaacccagcgggcctgaaggtcgccggcctcgccagtccccggtggagcgtctcgaaatcccggacgtccccgaggagccgccgcagcgaccgcagccgcggcaccgccgccgccgcgacgtccaggcggcgcaccatctccgcggcgtcgcgcgacggccggcacagccgctgccggaacgcccggcgaccgggggcggtgcagcaccgcggcaggtggtccagcacgccgtccttgccgatgatgtccagctgacggagcccgccaatcgcgacgtccaggtgcgcgtgcgaggagatgagcgtgggcgtctccatgatgcgcagcttgctgtcgtcggcgcggaacacaaagtgcacgaggtgcgaaaacgcccgggcggcgtggcggcgccctcccaggcacgcgtaggtgtcggccgaccccgtcatcagcccgcactcgtcgaactgcctccggatggtctcccgcacgtgcgagtcgcgcagcgtgacgcactccacggggcggtagtccacgcgcttgccaaagacgcgcatgctgcccgcccgctcccggaagcgcgccaccgcggcgtccccgtcctccgtatcggtgtgcaccaccagcgtgtgcgccggggcgtccgccaggaccgcgcccagaagcccgccaaacgccgcctcgaagtcgccctccacaaactcgcatgcgcgcgtccgcccggtgttggactcgaacgtcgcgtaccccatgatctccggacggttgtccaggtacaccaccgcgcaaacagcgctgtcgcagtcgtacggcagcgcgatgggggtgcccggcccgtgcaccgccacgggcgcgcggtatatctcctcgcagccgttcttcttgcgccgcgtgaactggtccatcaccaccaccacgtacccctggtccgtgaaccgcgtcacccagttggcgagcgaatgcttcgggaacccggccatgtcctgcgcgttgtagctcagtccggtcacctcgtgcgcgatgcgggcctggtcgtcgtagaagttgtacatgctgccctgcatcatcgccaccgtcgtgcgctggccataaagcccggcgaactccgccacccgctcgtggtaaaacccgcgcacgctcgtcatcccggccgccaaaaataacgcgctccttttactaaaatgcaggccgcgcaggaggacgccgcgaccatcccgtgcgagtactgcgggatgagcctgccgatcgagcggtacccggggctctcgctgttatgtgccctcgggatcggcctcgccggaatcgggagcccgggcggcctcctcggcggtctcctcggcgaggactcgtacgaggacaacctccggctgcaggacgccatgggcggcccggtcaagaaggcgtgcaaggacatcaacctcgcggcacccgtcgtcgaccacggggcgcactccctcgaccggtgcggcgtgtgcctgtccggcgtcaccgaccggacccgcgtccgccgcgccgccaagtgcggccacgagttctgcgccgagtgcctggagacctggctgtcggagaacaccacgtgcccactgtgcatctcggacctgtccgaggtcggaggctccaggtacatcatggactgccccgccgcgacgccgcgcgcggcggatcccatccgcgtcccggcgcgtctgggaccccctcttccgccgccccccgccccgaggactggacggaggcatgtttggcgtcatcatgccgccccagccccgcgcagccccgccccgcgccgccgcgcgcctcttccccgcaccgcctccgccctcggcggggttcgcgccccccgacatgttctacccgtacttcaggtcgcccctcgaacacctgcggccgctccaggcgcagccccgccccgccccaaccgcgcgcccggccccgtcccgccggagcgaggacgacatccggcacgccgcggacgccgtgtaccatttcagcgccgtccaagacatcctcgaccggcccatgagggacgcgcgcgacccgtgaccgaagcccgcggtgaccgcggcccttcccccggagatgtaaactctggtgtttgagcgcgaagccataaactgtcttgggtgtcccattttcccagacatagagtttaaccatgtgaatcatcacacacacccacaaaacaggggtcgagggggcatgatacaccccttgccatatttttctgcacaccgggtaatgtacgacaagcaacttgtgcattgtgcagtcattcattacttgcatttcaaccgctcgttgcggaaagtggccacagtctacgggtgcggctacacgacgctgggcggatgggtcagaaagcagctcggtacatcgacactgcctccgcgaaaacgaaaatcgccggtcagcgacgtgatacgcgaggcggtagcgcaatgcgtcgaaaacaacccgttcaccacactgtccgatatcgtgaaacggatacgtgttgacgggcgaaaggcgtcggtgtccacagtcaggcgggttatgcaaaaagcaaacatgtccaggaaacgggccagggtgcgcttcgcgcccaaagaacccaccaagcagcaggcggagcagtttttgcccgagattcgaacgcccgcgcaagaagtaatttccatcgacgaaagcagcgtcctgctggaaagcgtgccgacgtacggatacagcctcaagggcacgagggtagtgaagcgaaccaacaagccggtgcgaggcaaccgcgtgacgctgctcttggcgatatcgaacacgcgaggtgtagtgcaccatgcgacgtattcgggtagctgcaattcccagaagttcgccggatttcttggcgacctcccacagttttcgtcgctgacacccattatcctggacaatgtgcgattccatcattcacacgtggtgaaagccgccgcacacgccaacaacctgcacctcgtgttcacgccgccctactgtccggacttcaatccgatcgaaaacgcgttctctgtcatcaaatccgtgaccagacgcttcgacgactcgctccccgatgccatacggagcgtgacgcccgagaagtgcgcggccttcttcgccagatcgatacggcacgcgacgacgctagcggagacggccccggacgcgatgcaacccgccggacgcgtcgacggttgaccggacgccgtgtgctgcgcagcgctgtgcggcgcgtcctggacataaaaggtacgccgtgtggcgagcaaagccaaaatccgctccgcctctcgacaccgcctccatctaccactcccggaagatggaggcggatgtggccgaaggccccgtcctcgggacggggcgaaccacgaccgtcaagtgctgcttcaaagccgccagcgcgtgcaagcgtcgcaatgccgttttcggccgcgcctgtctccgtcgcagacgccccgtcaccgcgcagcgagtgcgcgcggccaagactcctccgacggcgttcaaagacctcgcagacatcgtggacagcgcggtcaatctggtttccaaggcggctcgtcgaggctccctcgtcgccatgctgacggtggtgcgcacgctggagaggaacaacggcaccctgcccgctgggttcttcggcagcagcatggacaccttcttcggacagtgcttcaagtttggcgcgttgaagcgcacggagtatggcatgacaccggacatgccgcgcgctgctaccagcaacccgtggatcctcgccgccttgcgcgacaataggattgcccaggcgctcagcaagcaccgtgtccgccggcagccaggggactccaacctcctccaagccgccgccaacgcctaccagaccaactttgtcaactttttcgactacgagctgcctcgccgcgtcaagaccatggtcaaggcgctgtggtggcgcagctacccggactacaatacgccgcgcccgaagggacagcttgccagggcggtcaactacgccaccgtcctcgtcgacggcgtgccggagccgggcggcgtgccggacgccttcctgcaggcggttcgcgagctgcggactcggcatctcgctgccgtttcgcccgccgccaccgagaagctgcgtgcggacgtggcggagctgactcggcggcgtgttgccgagcccaagaacagcaaccgatggaaggccttgtccgccgagctcctcgaggcgcggcgtcgcgtcaagtacgcggcgctcggcgggaggatagagttcgtgtactggctgctccgtcggctgcaggccatggaggccgcggacggcgtcgtctacaagaagtttgccatggcgccgctggctcgcgagcagcgcgcgcacatcaccatcgacggcaaagtgctcagggactacctctttccgcgcctcaaggacatcggctactacgccgccggcatgacggcgtcctccttggacgaccccgacatccgcgcggcccacctcgccgcgctcttccccggctgcgagaacctccggccgcggcgacgaggatgggtgccgtcgtcgtcgttcaagacggacggcttctccttgtgcgcgtcgtttgctcgcgactccaacctgacggcgaagcgcgggagcggtccgaaacgcgtcccggaaagcaagaagaaaacgtcggcaaaacgagcggagaagctgcaaggcacgttcggcgccatccccgagggggccgtggtggtggggtgcgacatgggcatcgtgtatccgtacgccgtggcgtggttcggcgcggacggcagacggcacacccggctgctttcgcgctacgcgtacaagaagctctccggcatcaaggctcacgagaagatcatggcgcgtcgccagagccgcctggaggaggcgcaccgtccccgcagcgagacgtccgccaagagctcgcgactcggagacgtcctcggctacgcgaccgcgtgcaactcgagctgggaggagacatggaagcagaacggcgaccggaggtgttccaggtcgaggatggcctcgtacattgggagggagcgcgtgctgacgcgcttctggaacggcgtgctgcgcgacgtgctcgctagccaccctggcaagacgcgcggcgatgtctacgctgcggcgggcttccccgacttcaactgctgtacccgcggctgcccggcgtctccgaccaccgcggcgttcaaggcgatgaagcgcgtggtgcaggtggttcccacggacgagtacaagacgagccaagtgtgcgcgcggtgtctctcgagcctccgcaaaccaatgaatcgcattacactccccgacggtcgcgtccggtaccaagagctgcgaggtttcaggctgtgccaacagtgttttctggagtctcgtgcgcagcgagcgtacccgtgggagacggagaggtggcgaggctacaagcggtatcatcgcgacctgaatgccgcgatggccatcctcctcgtggcgggcaagacgaacgaagaacgccccgagccgctccgtcgaccaagtagcatacaacgcgaagtcgtagaatacactagccccagcgactgctgcgcagaataggcgcctctgtgccagcatcctttgccaaaaagtggtgtgcaggttttagatggcaaagagtgtatatcgcaccctgtcaaacctgaaatggccgattgctttcaacgctgtcccgcaccggccggcgacgcgcctcaactgccgggaagagttgcaaccatccccgacgagcagccgttcctcaccatggacggtcgcgtgacgagcctccgcacccgtagactcaaaccaatttccgcatgctagtgcgcaagaccgaatattttttctgttatatattgaaatgaaactatttaaaactgaggaactgtcgattgccgaccttcacattagccaagacgaaaaaaataacattggtaatagagaggtgcggcgagtggttccaaagaacaatggatacccaaagacatcggatcaagtgatgcgcctcgcgcttctgatgttggtcatgttttcagagagcccgatgagaacgcttaacgagctgaaattgggtcgagtcaagagtagcacgggtgatcctattgtgttaaacggtatcagttttttcgcggctttccgcgatctgtttcagacgttgacgtcgaaaatgtccccacagatcgcccacatgaaaacgaagggaggaaccaacaatgggtatcttgtaattgatggtgaaaatgcatatactgcaaacgtcgcccctgcccccactgaaaatgtaaaggtctacgacctgtcgctagatggaatgctgtatatgggtctagatgcgcgcaaattcatcatcgtgccgtcgtgcccggcggatttcaatatagccagtttcgacgacttcgaagcctacttccagtcgaacaggaatcccgaggtatccaattatgagggacacggtggtgacgctttcaacttccatacttacgtcgacgtgaagtgcgcagcgggaatcattttcggtcacccgactgaaatgatgaggtcaatgtacgggcacgagagggccgcaccgtcctcgcccgggtttgtcaggagaacggacgtgtgggtggcggaaatagcggctggtgaacagaccaacaccgtaacatatcgccccctacgccacaatgagatcgccggagaaatcagcctaagtgatcttgaggaagcgatataccgcgatttaatgaaattatctactattgttgaggagccaaattacgacaactacaaaaacacatttctgccgaccatctcggagtatgaacaagcatttgaaaatgcaaagaatcggctggagcagtcgcagtcgcaggcgcaggcgcaggcgcaggagcagtcgcaggcggaggcgcaggagcagatagaggaggaggaggtttggataactctcgacgaggacaagattcctgttttcacaacacattctctaggcatagcgccgtcggtgaagatcaccaagagcacgttggattacaacgtggagagaattctgggtcaaccctttgtgtggattccgggctgcaagcccaaccaaatagatgaggacggagaatcggtacaaagttacaaaacgtttaaatctagcctcgaattaggaagaaatgctgtttgcgcgagcggtcctagggtggatccggacttcgatgtttatattttcgacatggctttacaatacgatgttttcactgcagccggcaccggcatccgtgtcccgttcctcgacgttttgcttggcaacaacatgattttcaattcaaacagtataccatcccaagcggaggcaccggaagggattatcgcggcacatgtcaacgccgccgaggacagcgccgcgcctcaagatccgacgccgcggcctcgttcgacgccgcggcctcgttcgacgccgcggtatcgtcgtgacagtgatagtactccgtcgacccgaacaacaccataccggggtgcgactagtattcatgagtatatccgcatgatccagttgaaatgcgaaacacttagtcaaatgtcacgactaagttgggatgacatcaaagcactactgcagcttacgctcgacacatgtaatgccgtgcttgggtcacgagatgatgtagaatcgatcaggaaaggttttccggtgattgtcagcgcaattatctacctaaggcaactcgggttgaggctgtttgaacaactcacgaataccctgatcggcctgtgcaattcggcagccacagggacggcgttcaactttgatctgatcactgtcagatatgaagtccaatcactactcactaatgaaaacttttctgaaaacttctatctcggacgtctgcgtcaacaccactatgtccctctaacagatttggggtccggcagaaacggttcggtaaaactcatcgcgatgaacgggcagttttttgcattgaaaacaggaagtgtagaggcagatcgtgcgaacgaaatgcgaattcgtagtgatttcaatactgacttgttgcattatgcatactacacaaccgtcgtcgagcgtctaccgcattggttggcaaataacgagaatctactcttgtccgatttcgccgccaagtcgtatgataaagtgccgttgcacaccatatcatccattaggaatgccatgaattcgatgctgaaattctatttgcgttcgttagaattggagaggaacggactgtaccacgttgatcaaaagcctccgaacattatcaaaatgtcgggtaaggcgtttatctccgattttggaaacatgtggcactcggattacgggtcggatgtgctgtgcacaccctattactcgttctacatcgaagggcgctacgcacataaaattgctaagaaaatcgaaggtcaccttaataatatacgcaatagacgtgatgcttttcgtgttaaacttactaaacctggtgaattgtggtcaagtaacatctacggtcacgttcggtgcgtggccttgtatcaaattatagtaacgactctcgagtgcatgagaacaagtgtgttgaatacaagacaaaatacaaggcaattcgatcggtttcttaatgaatttgtggtgcctcttgtagaggttctgctagaaggaccccgcggttccgatcatagtgacagaatccagtccgtgatcgataaagggctccacgaggaactccggattggctcgactgcaactggaggaggaggaggtagcgatgattttatgcttggtgatgagataacaaaccatgatgagttccagataattccagagaatttactacataaaacagaattattccctattaaaggatcattagataagatttaccatgatccggaggacaagatgtacataaacacaacatcccaaccaaggggcggcggaggtctatccaagacgcgctatgagctggtatgggcgtcggtcgccttgggtttgacgactctggtctcggcgttctctcagtgacgaacgaggccaacacagctgatccccgttcgaaactggttccgactgtatttattcagcgccgcgtgactttgccaaaccgaggacaccccggaagtacactcgccttcaccgcggtttgggggcgggtagccgacagccggttctcctgtcgaacatcgtacctgtacccgagaggccgcgccaaccttcccgtcggtgccacaatatcgcaaaatcggcgcggctgggacggtgtgaacagaccgtgtgtatcgccggtgttctccatagggttattgattttttcaccgggagcgcggcgcccttcgaatgcgagcaacaccaagagcgcggcgagcgtggtgagcagcgtgccggtggcgagctggaagcgatccgacgcgtcccgaaacgccagcgtcgcgcacgtcatgaccggcaccgttacagcaatcatgggatcgaaccaggggtaggaatccgagggggcgaccatacactctttgcaatctaaaacctgtacaccactttttgggcaaaggactctggcacagacacgcgagtgtattctacgacttcgcgctgatgcgctgaaaagggccggacgcttcgcgccaacacgcgctcaggcgtgcatctcggcgcggatccactcccgcgtcgcggggtggctaaccgcagcagtcatgcatctccacgcgttccacgggcagccgtgggcgcgcgcccactgcaggacctccaggcagccgaatatcgccgcatcctcgcacgtcaagtcgtcccaggggcagccgtgggcgcgcgcccactgcaggacctcaggtggccgccggccgccgcgaattggcacgtgaactcgtcccaggggcagccgttggcgcgcgcccactgcaggacctccaggtggcctccgagggccgccgtcgcacacgtccgggcgtcccatgggcagccgtggtcgtacgcccactgcaggacctccaggtggcctcgttccgccgccgtcgcacacgtccgggagtcccatgggcagccgtgggcgcgcgcccactgcaggacctccaggtggcctctttccgccgccgccgcacacgtccgggcgtcccaggggcacccgcccgcgcggagccactgcaggacgcccaggtggccgcctttggcggcgaacgcgaacgtcgtttcgtcccaggggcagccgtgggcgcgcgcccactgcaggactcccaggtggcctccgagggacgcggcgtcacacgtcgactcgccccagggacagccggcggcgtgcagccactgcaggacgtccaggtggcctctttccgccgccgtcgcacacgtccgggagtcccagggacagccggcggtgtgcagccactgcaggacgtccaggtgccctccgagggccgcggcgtcacacgtcgacccgccccagggacagtcggcggcgtgcagccactgcaggactcccaggtgccctccgagggccgcggcgtcacacgtcgactcgccccagggacagccggcggcgtgcagcaactgcaggacgtccaggcatccccgtcgcgcggcggcctcgcacgtctgccggcccataacgccgccgccatcgctaaccgcctccagcaggagggggtagcgggggtcggcgcgcgcggcgtcgcggaggtcgcggcaggtggcggccagcaacgcgaacgcccacgggggcatgtgtgacatgatgtccagcaccccaaggcacgcgacggcggaggcggaggagtccatagtctctgatacgacggtcgatgatacggggagggaggcaggcaagcaggttttcggcccgggcgcgtgacgccttcaatttgtatgtatcgttggctggcctcggcaatgtgaagcgcccgccggcaaaaaacgtccggaaatcgataccccaatggttacacgcggtccatctcggcgcggatccactccagcgtttcgggctcaaactccgcagcgtcctcgcacgccgacgcgtcccaggggcacccctcggcccgcagccactccaggacctccaggcggccgaagaacgccgccaccgcgcacgtccgctcgtcccaggggcagccggcgccgcgcgcccaccgcaggacccccaggtcgccgcgcatcgccgcgcccgaacacgtcgacgcgtcccaggggcacccctcggcccgcagccactccaggacccccaggtggccgccgagcgcggctttcgcacacgcggactcgtcccaggggcagcccgcggcgcgcgccagcttcaggaccgccaggcggccgccggacgccgcggcggcgcaggttgtcgcgtcccgggggcagcccgcggagagagcccaccgcaggacctccgggtggccgccttcggccgcggccgcgcacgtccgggcgtcccaggggcacccgcccgcgcgcagccaccgcaggacgtccaggtagcccagcctcgcggcgcactcgcacgtctcctccgtgtcgcctctgccgacgccgcttatcaccaccaggaggcgggcgcggcgggggtcggcgcgggcggcgtcgcggaggccgcggcaggcggcggacagcaccgcgcccgcgcgcgggggcatgtgccacatgatgtccggcgaccccaagcacgcggcggcggaggacgccatagtgggcggggtggaggctccattggccggggccgaccgcgttagattcgtcccacaatcggacgcgcgctggccatgaagcgggccacaatcgtacaagtgtgcgcgtgcgcgtgcgcgtgcgcgtgcgctgtgtgtcggaaatggtacaatattttccgttacaaaacaacgcacccccgccaattttcacgcacaaaaatcacttccagcgcgccattgcctggaactcggctgcggacatcttccagtcgccctgtatctcgggggcgatgcacgcccagtcgtccttgatttccgaggcggtgcacatccagtcgttccggaggggagaaggaccggaggtcggcgtgtcgtacatgttgtggatgaccttcgcaatggcggacttgccgccgccgaccgtgccggtggcctcggtcgcggggcgactcgggctcgggagctccatcgatccgctcgtgggcggtggttggtctgtgaggttctgacgccgggaggttcgctcaccgcctgtatacactcctgccagcgcgctcgcaggcttccgggcgcctgcaaaaaccacaccgccaggacgcgcgctggctgtagccccggacgcttagcggttcatctcggcgcggatccactcccgcgtcgcggggtgcctcgcctccgcggcggcctcgcattgccccgcgtcccaggggcagcccgcgccgcgcgcccactgcaggacctccaggtggccgccggtcgccgcggcgtagcacgttgtctcgtcccaggggcagcccgcgccgcgcgcccaccgcagcacctccaggtggccggaagacgccgcgaagcggcacgtgagctcgtcccaggggcagccgcgggcgcgcgcccaccgcaggacctccaggcggccgtgcgacgcggctgcaatacacacctcggagttccaggggcagcccgcgccgcgcgcccactgcagcacctccaggtggccgcgtcgggcggctatcgtacacacttcggagttccaggggcagcccgcgccgcgcgcccaccgcaggacgcccaggtggccgccggtcgcggccatccagcacgtcgaaccgccccacgggcagccgttgccgcgcgcccactgcagcacctccaggtggccgccgagcgccgccaccgagcacgtgctctcgtcccaggagtagccgtgcgcgcgcgcccacttgaggacctccaggcgaccaccttgcgccgcgccccagcaaacggccgagtcgaccgcacgtcgctcggcgtgcagccacttgagcacctccaggcggccgctggaagcggcggcagaaaacactccgccgtcccacgggcaccccgcggcgagcgcccaccgcagcacgcccaggtggccgccggacgcggcgttcacacacgctgcagagtcccaggggcatccgttggcgcgcgcccaccgcaggacgcccaggtggccgccggacgcggcgttactgcacgtccgggcgtcccaggggcagccggcgccgcgaagccactgcaggacgcccaggtggccgcctttggcggctttaccgcacgtccactggtcccaggggcatccgttggcgcgcgcccaccgcaggacgcccaggtggccgccggtcgccgcggcgtcacacgtccgggcgtcccaggggcacccgcccgcgcgcatccaccgcaggacgtccaggtagcccagcctcgcggcggcctcgcacgtccgccggcccaggacgccgccgccgttgcgcagcgcctccagcaggcgggcgcgccggggttcggcacgggcggcgtcgcggaggccgcggcaggcggcgcccagcggcagggccgcccacgggggcatgtgcgacatgatgtccggcgaccccaggcacgcggcggcggaggccatggttcaatcgtcgaaaaacaaagactcgcgcagtgcgttatatgtccggcgtccggacacgaatattttacacgcgctccctctcggcgcggatccactcccgcgtcgcggggtgcctcgccgcagcggcctcgcatcgcgccgcgtcccaggggcagccgtgggcgcgcgcccacttcaggacctccagctggccgccgaccgccgcgaaggtgcacgtatcggtccaggggcagcccgcgccgcgcgcccacttcaggacctccagctggccgtaagccgccatatcgcacgtccggtcgtcccaggggcagccgtgggcgcgcgcccactgcaggacctccaggtggccggcgagcgccgccaccgcgcacgtccgggcgtcccaggggacgccctcgccgcgcaaccaccgcagcacctcaaggtggccgccggacgcggcgtctctgcacacattgccgtcccaggggcagccctcgccgcgcaaccaccgcaggacctccaggcggccgccggacgcggcgtctctgcaaatttcattctcgttccaggggcagccggcggcgcgcgcccactgcaggacctccaggtggccgccggacgcggcgtacttgcacacgtccgagttccacgcgcagtccgcgccgcgcgcccactgcagcacgcccaggttcccgccggacgccgccgtcacacacgtccgcgcgtcccacggacagccggcgtcgcaaagccactgtaggatgtccaggtggccgcctcgggcggcggccgcacacgtccggccgtcccaggggcacccgcccgcgcgcagccaccgcaggacgtccaggtagcccagggccgcagcggcctcgcacgtcttccggcccaggacgccgccgtcgcgcagcgcctccagcaggcgggcgcggcgggggtcggcgagggcggcgtcgcggaggccgcggcaggcggcgcccagcggcagggccgcccacgggggcatgtgccacatgacgtccggtgcccccaggcacacggcggcggaggtcgcggtcatctcaatcgtcgaaaaacaaagactcgcgcagtgcgttatgtgggagtccggacgcctatatttttacgcgcgctccatctcggcgcggatccactccgcaatcgcggggtgctccgcggcagactcgcgtcgcactgcgtcccggacgaccccccgggggatataaaaggggagtgtcgcacggtttgggctcacaacgcagttgtccagtccctccaatacctaccagcccctccaatgcctcgcagacctttcaaactgtgccggacaacgggttttgtgatgcccgagcccgagagcgagagaggccgggagaaccttcccgacgaccttgcgtgcttgatatcggacaaccttcaacccatggacctcttggcgatggcctttgtgtccgcgaagtggcgccatgcaaccggcaccacccgccggacccgtccccttgacatcccgttggcaccctgcgtgatcatgacctccgccgcgcgcgaggggcgcctcgagtacgcccggtgggcgcgcgagaaaggatgcccctgggacgagcgcacgtgtcaggccgccgccgaggcaggccacttacacgttctgcgcttcgcgcgagagaacggctgcccgtgggataagaccacgtctgaggccgccgccgaggccggccacctggacgtcctccggtgggcgcacgagaacggctgtcattggaacgtgacggcagccaacctcgctgcgaaccgcggccacctacacgtcttacgatgggcgcgcgagcagggcttgacttggcacgacggaacgtgctactacgccgcgcgcggcggccaccttgaggtcctccggtgggcgcacgagaacggctgtcactggaacgtgacggcagccaacctcgctgcgaaccgcggccacctacacgtcttacgatgggcgcgcaaggagggcttgacttggcacgacggaacgtgctactacgccgcgcgcggcggtcaccttg

SEQ ID NO: 176 - DNA, 21626 bp, unidentified
  misc_feature 1..21626: note = Fanzor polypeptide
  source 1..21626: mol_type = other DNA
cgcacacgcagattcagtcaaaggagattctttttattacttcatggtacctacataaaaataaaacaaattatgatttcctaccccccccacaattgttttagtgtattcggattcttgcatgcactgtcgcatgttcgctcctgtgtgggaggaattcgagatgagatataagtcaaagttcccattgtctaagatcttgaaaatcgaccgtgaccttttgagaaccgaaaatggtgcatttatgaccaaattgtcaaagtccttcaatggctacgtcccttttatttgcgtttttgacgcaaacggaaatgtaaacgagtactcgggatctaggacggtcgaagatatcgaagcgttcgcttctcagttcatgcttgacgccacgaccaaaatccaattgaaggcttcaactaaaaaaacatctggttatacttcttctggtaataatacatcaagacgggcatacttggaattgaagactgttaaggaattgaaagatatgctaagacatggcggatttactttaagtggaaaaaagaaagatcaaatcgatagattgtgtgaattgtctgtgaaagatttcagacaactttcaataaagtcaacggaatactacaatgaaaccgcttcgtgtacggcacaccttacggtgtaacctaatggtgtagcaacccacggggcagtggaacaccaattcgattttgaatcaacaaattgcaggatgttaacgagaatatcgtggttcttttttagatcacggctctccatcctgcagactccgtatcgttcttttgtcggtacttttgagagtgtccattgaaggaccagccgcacttaagcgatcgcctctttcccggtaccgtggcccaaaagaacacggggtctttgttgatgtgcaatgcgtcatgaaaggaggtttctttgctggacgggccattttgtaggaccatccactcgtacactataacgtctgtcgacgccttataccgtttattgggatgtttcattttactgttccgccgactgtagaggtacaacgaggaggaggttctgcaagtagtcaagctgactgtgtagtaggtacagttttttgtccaaaagaaaaatattgtaggagaccttcagcaagctgctaaaataaagggggagtcggagttgcctcgtttgcttttcgaaaatacactcggacaagggaattatgtttttgacatcgtccccagaccccgactaagttgggttcttcttacacacatcttctgataagacttcttcttgagtgtaaagctataatgtgtatcaaatatataaaagaggatgtctaactttatgcatcgtaaatgggggggggggggggggggcgtgttgcaatgtgtagtggggggagtgattgtctggtgaagtgagggaagtgggcacaagcagcatgggcaccagaagcctgggcatctactgggcaatccaccatccactagtgtgtgtggttgagggagtgatcgtctggtgaagttagggaagtgggcacaagcagcatgggtagggtgggcagcagggtgggcagtagaagcctgggcatccactgggcaatccacgatccactagtgtgtgtagtggagggagtgattgtctggtgaagtgagggaagtgggcaccagcagcatgggcagcaggttgggcagtagaaatgggcagcaacgtgtgcgatttcgagcctcgcacggccttcgtggtggagctcatatccgacgtgttggcgagtgccccggatcggcgtgtgctggtgttgtccgatcgaaagtctcagcttcagcatgtgcacgacctgctggttgcaaaggggattgcggttggtttctactggggtggcatgaagaattctgaattgaaggcgtccgcgtcttgcgggtgatttgcgccacgttcccctatgccgcagagggcatggacatccctgaactggacacgcttgtccttgcatccccaaagacggatgttgttcaaagttgcggtcgcatcactcgtttccgacctgatgctgctactactactaataatccgcttgtgatagacgtcgtggacacttttgcgggtatttttgtggctcagtcgcgtaagcggcaacgtttctacgcttctatgggtttcgcatttgattgattcatttggtggtcgagctggatacacttggctgtatgaatacagtcaacattattagtgtgcatattgtaatgatgattactacgattgggaggactggaatagttgataacattacggagtgcctaacctactcatttttgatatttttaaactatatcgacatttttttgatttgcatttgtatgtctcccaatcagctctggaagtttctgtaaaccaaataatgttcaagataaatctgtttgcttttatcatcgctttctcctttggaataggctactgttacatgatgtccccccctcccaaggttgtcgttaggtttccttcacccgctaatgccgggtctatcgtttaccaagacaacgccaaaaattgctttacgttcgatgctaaggagactgcgtgcagtaaggatgccattgctcagcctattaatgtagaggacttcaagggggaaatgtctggtaggaggaaatcgactcaatatcgtggcaacttacgataatattcttcgtcattgttcgcattcatgcagttaggaacatttgataccagcttacaataactgctgaaatacgatatgaatggcacaaaatgtaatcgcctatctactcgattattcaacattattcaacattagagacatccctgatgagagaagggttggctttaaacgcctccgataccaaaaatggttcgcagccaacagcaatgatgagaatggcttgattccctttacatccgccttacacaagcaggatcagattcgttctatagcacagtttagaatgggttcctattggctgaacacagaaagaatgagggtggtggatagagcacacatccctcgctcaatgagacactgtcaaatgtgtgggttccaaaaaactgaggatgaaatgcatatgtttgagtgccctttttataatgatattcgcctccgctaccagaatctgtttacagatatttataggcatgtccatgaggataccgacttaaccgtatggaatgtggaattctgcgattccacattcagaacctttatgaatggaaatggcactaagtctttttggagcaacctagccgactatctttctacttgtagaagagcaagacaggaagccctggactgcttagtggcaccgtaatttattatcccttttttttcttcttgagacttctcatttgttagcttcttacctccgccactgtaagtggttgagatctgggtcctgctctaaggggtttaatacctacgccaccaaaacggtggttgggagtttggtttgtttgtccttgacacacccctgatgtaatggggttttttgctttgtgggtgctttttctttttgtttaaagcacagagtctcatacaccctcgcggtgtcaagtagactttaacatgtaatgtaatgtaatgtaatgtaacggtcacatgtcccacaatttgtgtctccgactgtagtatcgtcatgctcgtcttcttcttgaacggctttgtgtattgccgctataaccgtgaggtcaaatatttgtcgctttgacgcagttcgacttcttgtgtttttgcggcttctcgtgggtactgtgttgcgtgcgaacttgactgcctcttcccagtctctgggtcgtcgaatcatttcattttgttgttgagtagaacagacagatggaacagctgtgtctgtgtgcgtgttatcgggcatgcaaatgatgcagtgttcttcgttggcgtggaagagttttttgaatgcggttgcgaagttgagattcccttcttgtgctcgtgtgtttggtggtaggttcttgaacgtcagcacaaatctgcaaaatatgttggagttattcgcggcaatgttctgtagcgtggtcacgaacttgtgtccgatgcgtgttgagtactgaagcaggaggctatcgacaaacctcactcggtatgcgcacgatttctttgttttgggagatgtcttggtataattctcggagtgcatcattttgtgcactggttgggtgctcgggacaagtagtattactcctttattgtctatgtttggcgactgcgcgtttacacaatctggatcccattccacgatgtctacttcgggttgggtgtttttccagtccatgacagcgtattcttgtactagtaggattcctgtgtcagacattgttccgtggccgttgcgcatgggtggcaagccttgaggactgcgttgatgaagtctgcgttagtgagtgtaaaggggacttccattttaacaaaaggattactataccttatgtaccgtatttgaagatttgcgtctgcacgatgatgcgtttttgcgatgcctgtgacaacatgatgttcatttgctcgtcgtcgcagtcttcatctggtcagaacgatgagcagcgtttgtactttgaatgtcgcaactgccagagcgtcgctcccgtcaaggacgcctgcatcttcgagagcaaccactcagacgaccggaattcttatgagcagttcatgtcgaagaacatcccgtacgacgtgacgctgcctcgggcacacaacatcccttgccccacgtgcagtcgcaacaacgatgatgacgatgggggatcttcctctgttctcttcatcaatctccttctattctgaacaacacacttatctcaaatgaccatgcttgtgagaaatggcatagaggtatacttaaacaaatgttgggtgtttgccaatctactacatctaatattatcatggaagagctgggtagaaccccgttgtgttttgcttggcttaaacaagctttgcgcttctggaacaagaccatacataaagaacctgaggatctcattagaatggctcttgaggaatcttttgactccaacactggctgggttcatgacttgcgttgtgctctccacaagctaggatccagtaaaaacatcaacattttggaggctgtcgatgtcgaaggtattatgtctgaagtttttgagtcatggaggtttaagtacccaagtgacaccaatgcagttagagatatccctgatgagagaagggttggctttaaacgcctccgataccaaaaatggttcgcagccaacagcaatgatgagaatggcttgattccctttacatccgccttacataagcaggatcagattcgttctatagcacagcttagaatgggttcccattggctgaacacagaaagaatgagggtggtggatagagcacacatccctcgctcaatgagacactgtcaaatgtgtgggttccaaaaaactgaggatgaaatgcatatgtttgagtgccctttttataatgatattcgcctccgctaccagaatctgtttacagatatttataggcatgtccatgaggataccgacttaaccgtatggaatgtggaattctgcgattccacattcagaacctttatgaatggaaatggcactaagtctttttggagcaacctagccgactatctttctacttgtagaagagcaagacaggaagccctggactgcttagtggcaccgtaatttattatccctttttcttcttcttgagacttctcatttgttagcttcttacctccgccactgtaagtggttgagatctgggtcctgctctaaggggtttaatacctacgccaccaaaacggtggttgggagtttggtttgtttgtccttgacacacccctgatgtaatggggttttttgctttgtgggtgctttttctttttgtttaaagcacagagtctcatacaccctcgcggtgtcaagtagactttaacatgtaatgtaatgtaatcaagtacgacggtgacctgaagttcttgtacttttgcgaacggtgcgacacgttctggaaagcaggtggaggtcgctcagctgccgcggattctcctaaggatgctgccgcagattctcctaaggatattgtcgcggattcttctaaggatgctgtcgaggattcttctaaggatgctgccgcggattcttctaaggatgctgctgcggattcacctaaggatgctgccacggattctcctaaggatgttgttgccgcggattctcctaaggatgctgccacggatgctgtctcggattctcctaaggatgttgttactggcattgatgatgtcgtgggagagatgaagtctgtcagtttcaggtcggtgtctcgcaatcggaaagctgtccccgcacggaaaaaagttgtaaagaaaacagttgtataaaggcaaaaaactatcgacacagagagaaattacctttactgcttatttgatgtcttctttcgtcactctgtcttcttccctgactacttacgagcgcgccaaggtaatcggtatgcgcgccaaacaaattgctaggggtgctcccgcattgatcgacgtcccccgcatgatgggttctcgtcgttttgacgcttgcaaggttgcaagcgcagagcttgacgctggattgctgcctcttgtggtcgctaggactttatcagacggcaagacggagctcgtgcgcatttttaagtcgtcctcgacttcatgattttttggcgggcaatcaatcaatttcgtcttgagaagatgacaaccaatgtagcgaggagtgcgatcatctctattgcagcatatacgtgcgcacgtttctcccacgagtgtcggaccatgtctcctgcaatcctcgcgacgggtgccggtagatcatcgtccacctcaagcgctgcatcgaggatggcgactgcttctctgtgccatcgtgatacgcacatgccgtacgtggcgctgaagacgatgattgccgcaactagggaagctatgacgagacgggttgctccttgtgccttggtcgcaaataggaatgcggctagcgcaaacccaatactggacaagaggaacatgttgcgtgctccgctgtgatatgcgctttgaatctgtgtacagcttttcaatgcagctcgcatagccttaccgaccattgctggataatttgcatttgtttgtggtggaacaacgccgcctgtattcgttaggggtgttgcttgcatcattgtacacacaatgtttgcatttggaggacaaaaaaatatgtaaacctggtttcagatcccccacccagagcgtcccaatgtggctgacattcgcaggttcaaaaaataaaatgaaaacaactgtattgtgtctacatcatcaagaccgcatgccgagtaatgctggatttccgattcgcatgattcaccctacgatcgtcttggtcatgtggttcctttactttttcgtcatggcgtatgccgtctggttccaattttgggcttggaacattgcggaaaagtgtgagaagatgggttgtccgatgggtcaggataaattccttctcatgtttcttcgcgtcgcgcctgctttgcttacgctgtacgtgatatcccagcttgcaggtgtggtagggttttggttggacatatcggtatttgtcttgttgatgagtttcctcgtttcggccaaggtgttcttacataagaatgcgaagaggggggatgcgtgcagggactgtgttagtaatgggtacacgaacgacgtcgcggacatgttgttctacatattttcatgttttctagttatcttcacgattggttgtatcgtctggatactcaaggggaaggggagtatttaagaattagaaagtgctaatgaggaaaaaatgatataatgcaaacgcaatgaagatgctgatgcgtgtccatttgatagtcggtgtaaaaaatttatatacaaactctctgataatgaagattatccatatcagggagacgacgaaccacgttaatgcgcgtgcgctcatggacatggatcccgacacgccgaatgagtcgacattaggtgacatgaaggtgctcgagctttgttccatgtccgggaacttatgaacttctgtcattgaatcaatcggtctgatgttgttgccgtgttaaactcgtcgaaggtaaaaaaaaacagttgttctcaaataattacttatttgcgacccttgcaatccttgagcaatgacacgatcctggggattgtgaggaggaggcgcttttggcgctggatctttttgtgctcgatgtacttgcggtacgtgctctggatcttgcgcgccgagcaaccactgggacgctatgttctgtacaaagtcccattcctgattggcgagtccatcacatgacatccaatcgatcatctcgtcatccacctcaatgaacaggctgcttacaatcttgcgtgtgagggtaacgtaatctacggaacaccaagaagtgtacgggaagacggcaaccaaaccaagaagcatgccttggaagcggggatcgcatatgtattcgtccggcgagactgtcatcagattgtcgataaacagcttggcgtggtttccgtcggtgaagtcgttggcagtcattcctccgtggcggacagacacctgttgtatttcgttgtcccacgattgaacggcgagctttgcaagtacctcccaaacgcgcgccatgggcggaatgagttctcttgcgcgatcgcacaatggatccaacggaacgccccaagtgacattggcaacatcgttgtataattcagtaaagtttgccattgtgtttgtgggtatttgtgggtatttgtgggtgtttgtggttatcggtttcttttatgacaattcaattttttttcactgtcagtattttacatgacagcctatattgatgcgcacgatgttagccatcagtttgacttttcagggtactttgaacatgtaaattcagtgtctttagatgccttgaattttttgtgtcaatcacctgaagacagtatctgtattgacaagatcggttacaaatctggaattggtcaacttttcagaatccccaaaatagaaggtgtcccaatatcaaatgtccctacagtcggtggaacagtaaaatgaaacatatatcagatggaaataaatgtacgacatcgccgttagaaaattggcgttaagaatggtcgatgacttgggtgtgttaaaaacttctgtgtttacgaacatcagtcgttttactctgtggatgtggaaacgcttttgtgtaaatcgaaaacgacgtgaatttgtaagcaaactttttgagacaaacaaagatttgttgaaattgtttttattgtcaactcaatgcacaaccgcaagaggtgttgttgcatttttcaaaagtactcacaatttacgattatcaactaaaacagtgtatcgtttcataaaactcattggttttacaagaaaaaggagcaaactccgtggacagtgtaaaggggacttagttccacttgacactggattttgtagtagatacaaggatacaatcaatgctgggaaaattttagtatcagttgacgaatgtgggtttagtgagcgtctcaagccacattatgggtattcccctgtaggaaaacctgttatcgttaaaactactggtgggtgggtacaccatagtttgttgatggcagttttttcagatagtaggaaggagttcgttgtgaagaaaggatctgtgaagaagacggacttcgctgcatttattgactcattgagtttgtgcaataattcagtagtaataatggacaacgctagtatccataagaacttggtcctcagaagccccgtaaatagttgttacactccttcttacagtccagaattcaatgctattgagctgtgcttcgctaaggtgaagaaggactttcgtcgattgaactatataccaaacgatacaaagatgcacgtgtctgatatgatttccttagcattcagcaacctcactgataaaatcattatgggttgttttgaccacgtatggaacacgtatgtaatgtttgtataaagagttctgtgatgtacaaattatgtaagataacaacgaaacctccgacagtcgcaaaattgaaggagctactaaaattggccgaagcagcatactcctcaaaggacaagaaggacgatattgtccgtttatgcgaagacaatggtctcatcgccagaccccctccagagtacaagacggtggaaaagatgtgcgtcgtgaaatgcgccctgaagaaggcaatgagccttgacgatgaagaattcggtaagttcagggggcatgtggatcagctcgtcaatgtggtgagccgcatgttacggcgttccagtctggcgctgactttccatgtcacgaggctcatggagggcgacctgccgattcctaatatgtacgatatgaaggatacctactggaaggattggctaaggattggagttgacggcgtctttccagatgaagagagtagaatatcatacgaagccgtgaaagacgtaatcggaaaggtgcttggtagcgatgaccctgactacatcaactcctaccctatctatttcgaccaggttttgaactatgcaggtcacacattgagcactgtcgtgttgaacaacgcatgggttcctttggtacctcgtctgacccgcctcactaaggctactttgaatgcactgggagctccgaagaccatctgtgtgtacgacgtgatgagggtcatccaacaggaaatacaggagatggaatcttggccagagtctgttaaggagtacgtccgtgaagttcgagtcaggctgaaagttccagatggaagtcgactttatgatgactatggcaaagacatggacttcccgaccatggtctggttcaattattggatgcagacacggttggaggctattggtgcacgtcgtatccggttgatgcccatctttaatgtccaacgggcgcatgtccgccttgacatgaagactctcgtgaacctgttcaggcacgtgttccccaaagacccaaacatcgtcgagctttcaaagtgggcaaatgtaaaggatcccgaccgcttcatgttgcctctgaagcctgcagttaagaagaaaaaatcatgtggtcctggtgaatgggaggcatacaagttggcccaacagaaatacgatgctgacgttaaggatattaatgctactgacgagtacagacatgcaaagggtaggtatgacacgctcgtgaacgcccgaaaaatagtcgcaggttccttcttcaagaaaccacctgtcaagacggggtgggtgttcgattgtagcatttgtactgacggagtttcattgagcatgcagtacagcaagacagtacaggttcgtgtatccgatctgaagaagacaagtaagaggtctcgtgacgaggaaggcatgatcgtctcagaacagtatgaccataaactcaaaacgacattgcctgatatgggtatcgttgttctgggtgtggatcctggtaggagcaacatcgctacagtcacgtatctggcagacgacaaaagcaagacatggaagcttacacgcggagctttttaccacaagtctggtatcaagaaacagaaaaaacagcaagaaaacgtttctcagacataattcctagatgggagtctctgcgtgaaaatggagcagcgttgagtacatccaggaaggatgatatctcggcttacttgaaaaattacgctacgttttccgacgagtggtggaggatggcactccctcgcagagaatcccgagacaactttcagaggtacattggcaagcgcaaggctatggactcattttgggcagggatcaagcgcaacatgaagttggatcatcctgacctgagggttcgcgtagcatatggttctgcaatcacgaagctgaaggctaccggaccaggagaggtagctgtgcctacgggatctatgttcgcttcctgcaagcgcctcttcaaagaggaggttcatgtgacagatgagttcaagacgactctcatgtcttgggaaaccggtgccaagaaggaatgtgtttacaagattccaagtgtccaaataaccgcggaaggtcagattcgtctaggttacgagttgttgggtcacaccccattgaaggagactccaaaggtctcttatcgcgaccagttggcggtgagggtgtactgcacacataaaaaaaaatccaagaaaaccacaggaggggtggcttagccccctctcttgtcgacaacaaatcgatcaagcggtaccctgaggtacgaggactgcgattctctccagaaaccagcacttactcggaccgggaccgctcctctactctcacaatcgcaaggctgcactgcatggaactgttgggtcaagggagaccgcttccattttgcagggatgcgtgttgttgatgggctacaaaaaaacatgatggtgttccactgcaatgtgggttgctacaccataaggttacaccataaggtgtaccgtacactccagaaagcggtttcattttagtattccgtcgtgtgtagctgtatgcagacatatgtttcttcaacttgctgcacccccctacgtttcccaaaagcaacgatctgcagtctggatgattataaggtgtcccactttatttgagaactactttatatagtgtcagtcaggtattattcatgtatgaatcccctaagaatttcatcgtatccaatacggtgaaaagtgatattgttttggtaagcggaacaactatttccatcgccgatgtggagtgcaatcctaagtcgacagggggattccgagtttgctttcttaacgtgagtcgctgggagatccccacgtctcctaccccccttgacaacgaaggggctatgattttacgttgcctccctgacagagttataaatctgttgtcgaagctggagcccgacgttgccttgttccaagacttcggtccccttccggagtccatcgtcgagctgacgcgtgcgtacatcggtgcgtctcgtggcaatgttagcacgactcgcagggcaggaagggttggtcgtgtgcgcgttgggtattcggagatagacgacatgttgagtaagttggcattgttgccaactgatgataaggaggcgtgtgtagatggtttgagtgtgtattcggcacgcgacattaagttgttgtcagctagttcctcaaaatcctccgagcgttttcgaaaggttctggtacagaccggtaggcccaatgatggaggcggcctcgtgatttacaatgttgggcttggtgaccgctacgagtccggacgtgcacaccccaaacagaaaggtgctatcatacagagtttgtgcgacgacatcatagatgagcggagcaaaaagggtgcgagaatgatcatggtcatcggtgatttcgggaagaatagtaccgctttgtctgacaatctccgcacatgtggaatgattatgctgaacgatgacacccccacgaccctagacggaggtgtttctgacctttgttgggtaagcatagagttgtaccgtgcaagttacatccggcctgtgcacaatcgggggcaaatagttattccccttattgacgtgtgtccccaccacttccctgtgtgcttggacattgtctggcactctgagaatgatgatgacgcattagccatgctttctgtatcgcgttcgttgctagagagttgtctgttacacacgccgggtgtagatcgcatcggcggaatccatgtccgtgagaacttttcttttgatggaagaagttcgcggaaaggcaattcctacaagaagaagaattttggaaagtcatcatcattcgtaatgttcacgaactttgtacatacccaacgtgtgagaaccctttcgataggcgacactgctggtgcggggttgttcccggccttggtggaaggcgtgctgtcatcatacggtgtgtttgtggaggctgtaaatggatggtgggtcctcaacgttacggggcgcaaacacgtttgggggtacatgatcaacgtccctgaaaaggtgtgtgacaacatggcgccgctttatgtccactattgtaaagagtacattccgatcgattacatcgagtactcacgttggcttgcattgggtcctgcgcattctaaaaatagtacaagtagtgtaatattattgcctaaggttccttcgtaccgtcattttgtgaataacacgagcgacgccttgtgtgacttaatccgcgttccttcgcgtgggggtggggggttagtgcttcggtttgatgtgaacgcctcgaacgatcgttacgtcggaactatggagggtatttactcatctgcgaccgcctctaagaccctagactgtttgaagaagacgccgcgagtgtggacgcgcttcactgagttgaacatcgcgcttgctgtcggtcgctttagtagggagactgtggcgttttcggactttcctttgttgtgggagccaatttttacatactacaatgaagtcctcacagttgcgcgaaaaaacataaagcgtctgaaaaacgatgctgaggatgatgacgtgttgcctccactcatcatgttccgttcccaaaacccctcttaagggtttttgacgaccaaatcattcggggatcttgtggagggtgatgtcgttgagacaaatacatttacattcaccacttactcatcgcatactcagtcgatcgtcctgtccaagtcgtacgacatggaggtggtttacgtcgtccccacatcccttatccctgagcttttcatattgtccagggcatcgcagagcatggggaagattaacaaccttccgtgtctatttctccgtgaggagatcatgttcccgccttttgccttgcacagggtactccgtgtgtgtaacgggtatgtcgagactccgaaggggacttcgacgaacatggtccacagcgggaccggaggcgccgtgtttgaaaagatccggatgtactggtcggacaaaaccaccgccgaggagtcttctcgtttcctgcgttgcttcgtcgtcgtggagatgctagggttttcaaagaatcgtatttcggagttcgaccgtgtctacgggacggacttcattactctttacaaatcccgcacgctcatttgaaatgttgcaacaggttaaaaaaagattgcgagagaagcaaagcaatcaaacatggagggcgctcaacaactcgatatatccgacgacgcttggagtgcgtctttggtccctcatacttcctacacgcgcttggcatgcccccttctctccagcccatcgctcgctcttttgccaatggtgacacccgaggacggtctctcgtcccggcgcacggtcgccgcagggagacgtaacaacgaatatgatgaggatatgtgcgagtttctgagaattcgcttcactcctgaggacgttcccgacgaggcgggattcctgatgcgccacgacgtgaacaggatttccttcgatttgcgtcatgcatctctttcggtatccgagacggctctggacacgtcggacggtgtagtgtgctctgtaactaggacggtgcgcgtgttgcagacgcttccttgtgttgcaatgcagactctagatgtgacccgcgccgtatcagacaaagcgttgttcatagaccatttcgtctgtgcaccgatgtcatatggtaatagtgctgcagcgtggaccttcgacggctccctttacaacacctttgcggcgcagaacttcgtactaagcgccgcttcctcggactgcgttagtggtggtggaatgctcgctgcttcttacatggggttgggtgaggtgacttgcgaggggttcaatgtcattccaggcgagggtgcaggaagcgaggcgcgtgttcgttttcgtgtacctcctgaaacggagtctttcacgttgcacattctgtgttgttgttcaggaggaaagaaagcgcgtgagtccatgcttgcgttgcttcgcgcaggtacgtccgcaagcagtctcgtttcgcgtcacgacatggcatgggaagctctgtggcagtcaagggttgacatagtgtccaaggctgcagggatgttgcaggaggaaacttccgcattcatgcgtgaccttttcactctgcgcatggcaatgtaccagcttcacgcctcttgtggaggcttgatggacctttcgggaacctctgcgttgggggcgtcgtgtgtgcatgtggcgattgcttcgagtctgcttttgcctacttatcgtggtcaggatgttcctttatctcgtctgcatgaagatggtgttcctgagctgggactgacgggtttgtacctggacatggtcccatggtcagatattgggcgttggtccgacctgcgacgggcgctccgaggtttttgttgccaatgcgcgatggtttgcgcccctttgctggttgtatgcacgctgtgtccctttgggatacctaccatcatcgggggacactggttggcttgcgcgtgtggcattccccgtgttgtccaacgtggctgatatggtttgcattatggctcaggtgggggaggctcaatcgacgtatccgtactttataagataccaccttccatcggggttgttgcaagggttcgggggggagttatctggtgaggaccatgtgttgagcgttgcttcagctgtgactgctttgcgggctgcttcacaagcttgtcttattgtagcaccttcggacattcgtcgctatcgatggaccgatgtttgcgacggtctcttcttgccttttttagacggcgcgcctcctcaggttctcgcagttgacaattcttcttctgatattatcgatttgcgtaccttgggggatgtgttgcttcctctgtgccatccttcgttgcgtgtcgctgtcagttctgtaggatctcaggtggacgctgttctttctgatacattcgggtattggtttcctcgtttgtcatgggataacgtcggggaattgtctcgtttgcctccttcagaggcgcgctctaggcgaaggcggcgtgcttgcaacttgttgtggtgtttgcatgcgcgtgcgcgtattgcgcaacaaagaccttctaatattgacggttttgtttctgctcttcgggagtttttctccgagttccgtgacgcttgggggtgcatatctatcgacgaggggttcggggctgacctagacttgtcttcttcgcttctccttgtcattgtggcgggtcttctgggggcgtccatcaacggcgaggttgcggacaacctatattattcggaaggaggagagggaggcgtagggggggggggggggtgtctgtgtctacgagcgcggtcatgccatctacttggcagtttgtgtctctgttgggtgccggtggacggttaaataaggactcgcatgtccctaaccgtgtgttgttgccaagttcggcgttggtatcctctggggtcgcgtacgaatcatggacggtagagtcatcgacgacgatgcttacgcgtccttgatacatttttacaggcaccagttgacacaataaggtgtaccgtaccgtacactccagaaagcggttttattttagtattccgtcgagtgtaccaccacaacaccaagcgcagtttttagaaaatttggactgtccaactgacacagtaattatacttgacaacgtggcgtttcaccactccaagaaggtcaaaacacttgcagcttcaaggggggtgggagctcctatacactcctccttactcaccttggttcaacccaatagaaggggtgttctccatcgtcaaacgcgatttctataaaagccaagatgtgtataaggctttgagttctgttaaagagaaacacgtagaggctttttttcgaaagtcattgaatacaatttctggaccttgatacaaggaaatagcgacattggctactaaaaggagacgatagtcaataaagagcccccggacaagcgtacgcgaccggaccgggcggccaaatttaaggacaggaaaaacggcgaggagagcgtggtaaagtgtacactgagtcggatcatagcggataaggacaacaaggacgttattatgaaggtgattaaggagcgggtcgacagcgtatccaagaggacttatcttgccggtgttgcggtgaaccggatattaaaagaagtcttcgaaggggtaccagatgcgcaactgcacactgtaagtgtccctagcgtcgaccagaacttcattcggcagcttatggtggggtcgagacaggcgcacatggagacgagggacgccacagtcgaaaggttcttccacaacaactattggtttagggagaagattgaggggcgcgaggtaattgtgaaaaagaagaaacaatacgtgggtgccatcgctcgctacgatggcgatcgaaacctgtacagccacgcgtcgaagaagtacctgaccaacttcaataaccactacagagtccatctctccacatggatcaagaagctcgtttactcgaaggaaaacaggatcttggccaaggagatcaaagatgagcacggcattgacgagaccgtattccaccgatacctcctctacgatatccactcttggggagtaaaggaagacctcatagagatacattcgctcctaccggagcgaacaaagatgttgcttaagattcagcactcgatccgggacgagatcaaccgacagtggctcaagagcgtttccaacagcgccaagatgatccggtacaacgtctttatcaatcgatacctcgaggccacagaggacgagggctacgccaagctggtcaacatcgctcccatcccaacagtcaagcacgccttcatcacgatagacaccgacggcctactgggcgtcctcaaggacgtgggtctcatcgagcgtctcgaaaagacgctgacgaacaaggagcactgggagtcggtcttcgatgtggaaaacatccgttctactgggaaaggtgtgtttacatgcaccatagacactgacggcgtaatggcttgtacccactttcttagggccgagaagaaaaagatttcaatcaaggacgacggaacagcgattaagaagcagaccaagacgctccgcgagttctccgagtccgaacccaatgtggtggtcgttgcaaacgaccctggccgctgcaacattgcctttttgacttggaagaaaaataaggtcgaagaaaaagataaggggggtaggaagaggaagaggcactgcgagttcgggagcaagagactcacgcgggagcggtactacgttgagagcggggtcttcaaatcgagagggccgaccaagaagtggttgtccaacatccaggactgccttgacgacctgaaggacaacagtcccaagcgcacatctctagtgtcgtttgacgcttacgtgactgtaatggtcaaccattggggttctcgatggggggagatgtccaagtcgcagtggggcgcgcagcgcctgcggctctacggtggcaagaaacgtgtattagcacgcttcttcaacgaggtccaggaggatgtcggtgagaggaaaacaattgtcgtcgcatacggttctgctaagtttgcccctggtggcaagggtgaactttctgtccctacaacgagcgcgttcaatgcgtttagcgaccgtttcaaaaggcgagttgccgtcattgacgaattccgtaccacaaagatctggcacaaggacagcaccaccgtcctccagagtgtgcagtccgaaaaagaagggcgcacggttcgaggcttgctatggtgcagttccaccatggagaacagcaagttgtttgtaaaccgtgacctaaatgcagccattaacatccacaattgctttacaatgtacccaatccgccccggaattcttgcgaggccgaggaaatattgcaaactggaagttgtggtaggacgcaaaattgattacaagctgacaggttctttacagaacgcagtgtcgagcgaagtgtagaagataaacacatacaagaggactttggaaggacttgggatattatgtaacataattcccttgtccgagtgtatccacagtcatcgaatggatcgacaatacgtatggtatcgatactcctctcatcgcgtcgggcgccaagtgcttaacccgcggtgtcagcatgcgatcagagaaacgcgtgctgactcacatgattgtcactccgaccgagggcaccaacgtctgcgacgtccaccagacggtcatgcgctgcggagggcatactatcgacgtgcgcaaggagaacggtttcgaatacgaggtcaagacgctgttacaggagagcgaccaccacatcatcgtccacctgttcgatctggaggtccagtggctcgagagcaagatcgtgcctggcgcgcaggaggagtggctcaagaaccgggcaaccaacgtgatgctgatgaaaatgatcgaaagccgtcctctcgcatcttggggatccgggaagcagctcgcgcacgacatcgagcaacagagctcccaggcgaggcgtggctccgtgccgaacaagacgtacacagcgaagcgtgctcgccaggatgcaaacaataaagcaagggataacaagctcgacgagcgcatcgaacaggagcgcgctgaccgtgcctcgtacgaggagaacaaggacaaggccctcagcaccatcgatcccggcgagctgatgagcctgccgatggcggttcgccacacggaattgttcaagcaccagggttacgtgcagacccccggcgtcatgatgaccgatgtccccaagaacgacgcatcctctgccgcagccgcaaccaaacatgtcatctccatggtcgaggacgagctcaagaaaaacaatcccgacttcaagttcaagctcgccggcaagaatcaggagtcgaaattcttgatgtcttacaagggcaacacgcgcctcgcgggcaagactctgaacgactggaacaacttctacaccgcgtacatcctgcgaccagtacagagcaaccccaacgctgcaaccggcagtgtcacgcccacagccgagtgggagttcgtgatcaaagacggccgcgtcatggccaagtacaaagagacgcacgtggaaccgcctgtcatcgcatccccccgtgagacgccagagggtggtggtacaccaccaactacattcgatgtatggatggacatgatacgcaaatacgatggccacaaggagctgcagcgatatttcacacctgggagcaatggcaacttgtacgtgtcgcttctggctctgtcagtgtaccacgccgacactgactggtcgctgggcatgatgaggaaatatggctatgattccatatcaggccaccagcattgtttgaaatgcaatgcggaagggccaaaccgcttgctcaaacctgtgcagtgcgttggacgtgtgcattcgggaacgtaccatgccgttgatattcggaagctgcagcagtcatgtatcgagtactgcatcaagatcattcgtcgcaaccagatcatgtgatgatgtcatgacttggtccagtttttgggaaagcccatgagggcttctgtccacgtcgggttcacggtgtgtgtcccacgcaacgatatgatatcgtccccatacttctccagtgtgagccgatcgtgg

SEQ ID NO: 177 - DNA, 19696 bp, unidentified
  source 1..19696: mol_type = other DNA
  misc_feature 1..19696: note = Fanzor polypeptide
aattattacagtcgacggaatactaaaatgaaaccgcctcgtgtacggcacaccttacggtgtaacctaatggtgtagcaacccacggggcagtggaacaccaatacgattttgaatcaacaaattgcaggatgttaacgagaatatcgtggttcttttttagatcacggctctccatcctgcagactccgtatcgttcttttgtcggtactttcgagagtgtccattgaaggaccagccgcacttaagcgatcgcctcttccccagtaccgtggcccaaaagaacacggggtctttgttgatgtgcaatgcgtcatgtaaggaggtttctttgctggacgggtcattttataggaccatccactcatacaatatatgattgtcaccaccttataccgttttttggatgtttcattttactgttccgccgattgtagcacatggctgtgcgacaaagtatgtgtagccagttgttctgtgtgtgcatgcttgattggctgaatgtgtttgtgtttgcaagtggttgtcttgtgcatggtttgccagatgtgtgtgtatgtgcgtgcaccgtgctgtgtggcaatgcatggatagacagatgtgtgtgtaagtacttacgcagtgctgagtgggtgtgcatgtatagccacatgtgtgtgcatgtgcatgcacagtgctgtgttgcggtgcatggatagccagatgtgtgtgtttgtgcacacaccctgacacacactgcattccccatgaaaccccattgcacagggatgtccgtgaagtccatcctgaagtcctctcgaagaggagagttgttgatgtgcataatgaccatctcgattctcatgggagcagccttcattgaggttaacaccaaaggaatcctgcacgctacattcaacccaaaagcagatttcttcacgcaacccctagtgagtttgttttttgtgaagtactttccttgtcaaattcataggttgtgccttgtcaaattcataggttgttcttgattgtaatgttactgtaatgtcaagcacttgtgtatggtcatactgaatcaattaatggatgatgccttggcataaacttatgtgtgaattgacgaattcattggcaattgtcagccctacttgtaggatgactggtgcagtgagatgtgtcttcaaacagggttgtgccttgtcaaattcataggttgttcttgattgtaatgttactgtaatgtcaagcacttgtgtatggtcatactgaatcaattaatggatgatgccttggcataaaattatgtttaaattgacgaattcattggcaattttcagccctacttataggatgactggtgcagtgagatatgtgtcttcaaacagggttgtgccttgtcaaactcataggttgttcttgattgtaatgttattgtaatgtcaagcacttgtgtatggtcatactgaatcaattaatggatgatgccttggcataaacttatgtttgaattgacgaattcattggcaattgtcagccctacttgtaggatgactggtgcagtgagatgtgtcttcaaaaagggttgtgccttgtcaaattcataggttgtgccttgtcaaattcataggttgttcttgattgtaatgttactgtaatgtcaagcacttgtgtatggtcatactgaatcaattaatggatgatgccttggcataaacttatgtttgaattgacgaattcattggcaattgtcagccctacttgtaggatgactggtgcagtgagatatgtgtcttcaaacagggttgtgccttgtcaaattcataggttgttcttgattgtaatgttactgtaatgtcaagcacttgtgtatggtcatactgaatcaattaatggatgatgccttggcataaacttatgtttgaattgacgaattcattggcaattgtcagccctacttgtaggatgactggtgcagtgagatgtgtcttcaaacagggttgtgccttgtcaaattcataggttgttcttgattgtaatgttactgttatgtcaagcacttgcattgtcaaacttaatatactctcattcgtcttatcttatttaatgtatcctttttttttgtagactgacatccgagacgctcgcgtgaaggcgtccaatcccgattcaagtgcgggctgtatgtattacagaattaaaaccgaaattctgacgtacgccaatgagaaccatcttgtgtgcccattatgttgggatatgagagtgttgggtcctcacatgactatatttttggataaggacatctctgctgtagctagaaaggtgttggagttagtttctgatgcgtcaattacgattgatatgcacagatacactcccactattgtctccacatcgtgggagatattacccacagaatccgagctgttcagaatcattcaggactccttcgattctgaagagaagtttaacatgctttccgagaaaataagaaataatatccctcatgtcactaaattgaatgtcaaaaatactgagtatttcatcacacgtgtgtacttccaaaccacattatatttattgcacaacaatgatctagatagtattgcgaaggctctatttatggacgctgctgcagtaaatatccgccctgaccagaacatacttatgaaaacgatgttgtttctgtcaactcaaggaggagatggaactggtttacattgggatattacccggggacttaatgtagctttctcattgacccctggtgtgactggtccattagcattttggatttttgtcctcccttagggatttgaagaatttattgcttttgtgcagtctagcaattgtgtggaggtcgtcagagaaaagtttgaggaagctattagactaaaaactgacttccccttgttgtcagcggatgaaatgtttcaattacatcgccaagtccccaacttggtccgaattgtttcccaaagccatggacaggtagttggctccaggatgggttcacagtgttaacgttttaccaaattggaagctagcttttgatttcgagagattggaagagttccctttatatgcatattacagaaaaatatttggatctggtttttttgaagacaggtgtccagaagattacgtcacactggatgcagttatcaaagacaatgttgatatgatgacgaagggtcatgtacccgactcgttgacacaagtaacctaaaatatttgatcagagtgggttgggtatttgctcttgtagttacatttttgtcccactttatttgagaaaaactgtgcccaatatttacacaccgacacatgtagctcttgaacgcaatttcgtaaaaaatcttaaattgactacaagcttccaagcaccagtatcacacttctatcgttcagtcgacagagtggcccagatttccctggcctcatcctcaagatttgccagttcctgctctgacaactctggcacacaatccgatggcaccgtcttgactgtgacaacatcacagaactgagaatcgaacccgtccatctgcactttctcctccatcaaaccacgttgtttcaccgattcctggctcagcggtcccggtatgacctctccatgggattgcatctccgtaagaatgatcgtcagcatcactgcagctgctgcaatcgcttcatccaatggctccccaccaccaatgacggatgacaatccgggcacccacacctcgtggaattcgaaaccgtcccttgagcacttgttgtggacaccaaagaattcgtacgaatcatcttactcaaaaattctggtaatcatggcgatcgtcgtcctgcaaggagtaacctatgtttacgctgtagaataagtgggagctttatggcgccggtgaaataccactacttttaacgacaccttgtattttggggattctgaaacccagcttcagacaaggccctttggtaaaagagaaccagaacaagttcagtaaattggcgtgtttttgtgtttccgtgttttgcatgagccgccgcatcttacgcaaccgctttcactgtggtaatggggtcatccaaagaaaccgaacaatcccaagcagactctattgggtttcttaaggggggctgtaaatgcggttgcgtgacatgacaaaagcggctttaatcaaaggcgacacttagtgttccgtgtacgcctcgaaaaacgagtatctgaccaagcgatgatgttccaaatgtccaccaagtctttgggagagagcgacctctcgcgtttcgccgagacgctccgagaagaagctcctcgaaaaccccaccgacacctgatactgatttggggacacagacggttgaacggtttaccaaagaggcgactcggaatatattttcaagaacctcttcaacttgctgcacccccctacgttgcccaaaagcaacgatctgcagtctggattattataaggtgtgtcccactttatttgagaacaactgtaccatccgatctagcagatgtaagtgcattcactacctccatcatgctcacgtctggacatgagctaggcatcacacccacgcatctcttcaatacggatcctgtcgagtcacgtcacacagcgaccactctcatcaatgcggatcctgtagagtctcgtcacacagcgaccactcccactgtggtagggtcctccaaagaagcaaaagttcctgcacagggcacccagatcccgtgtaaacacggagaggggatcactcgggaagaacaaaaacggtcccatcattgtcacgggaaaaaaacagaggcatatcaaaaatatacaaaatgagacaaaaaaagaggttttactaactgagtaactaaagcggctggaagacgagggacatggagcgaagctcaattgcaagctcgttgagcgtagcttgcttggtggcgaggtacgcctcacgctgtgagggagtctgtttcatgcacgcgaggtgcgcgcacgtgcccagggtgaaggggggggcaccaggggtgcaaacggtaacctgacggcggctgcaagggttgcctttagtggtgacagcagtgcagcccagggtgggggaataccccactatggtaaatgcacctatattggcaccaacctgcagctcgttcttcagcggggccccgcgttcaacccgaccggaggccaaggaggaggagggggagcccgtggagaacgcgccagcagacgtggcggtaccactagagagggcaggagcaggaacagtagtagaatcagtagaagcagtagaagcagtagcagccggagcggggttagtagcaaccgtggcgcgggggcgcttaccgctaccgccggaccccatgccaacgtcctcggtggtttcgtcgtcctctgggagggcgatagcaatggcatcgattaagtataagcagcagggtgaagtagaagcagcagcatcttgggcagccgcagtagcgactgcaactggtagcaacatggcctggagaggccccttctcccctttcggggaatcttggataaactttctgtgcgcaatcttcattgtgccgacagagtcggcgaggcacttaggcacgctggtcaaggaaatgataacgttgcaaatgcccttcaaatgatggacggtgacggtttgggatatcttctttcggtccttcttctggacgaagtagaagatatttgttgtatcgacgaacgcagtgatctgggcagacatggtagacatgacaaaaaatttggggaaacgagggggagagaggagatatttgggtttataagttgttgttgttgttgttgttgttgtgttttcaaaatgcgtcaatttttttttatcatggaacaactgttgcaaccctttaataattgaaagggtcacggcgacttctcgtccactcgtcatcgaatgaagtgtaaacaaccattcattcttcagtgacagaaacgaatcaatttaattttccatgagttcctttgacgaaatcaatggagatgtattggagatcattctatccaatgcgatttcgaacgaatgccacctcaaacaagtggttctcgtttgcaaacagtggagatgcgtcgcactccggtgtgtcacaaggatccacataagacattataaaagtttggactacgtctcacgcatttgcaggctccaagagttgaaaatctgtatcaatcgggggaaagacgtaccctacgaaaaaaggtcggagatcgaagacgtgctcgacatatcacctctgtccggactcactacgttggttcacctggacatatcgttcacctacgtgaccgacctatcacctctgtccggcctcgcttcgttggttcacctgaacatgtcgtcgtccacacgtgtggacgacatatcaccactgtccggactcactgcgttgcttcacctcgacatttcgtacacctacgtgaccgacatatcaccgctgtccagcctcacttcattggttcacctgaacatgtcgtccacacgtgtggacgacatatcaccactgtcctgcctcacttcattgattcacctgaacatggagtacacccacatggtggacgacatatcacagctgtccggcctcacttcgttggttcacctgaacatgtcgtccacacgtgtggacgacatatcactactgtcctgcctcacttcgttggttcatttggatatatcgtacaacgacgtgggcgacgtatcaccgctgtccggcctcacttcattgattcacctgaacatggagtacacccacatggtggacgacatatcaccgctgtccggactcacttcgttggttcatctggatatattgtacaacgacgtgggcggcatatcaccgctgtccggcctcactccattgattcacctgaacatggagtacacccacatggtggacggcatatcacagctgtccggactcacttcgttggttcacctggacatatcgtacacctacgtgaccgacctatcacctctgtccggcctcgcttcgttggttcacctgaacatgtcgtcgtccacacgtgtggacgacatatcaccactgtccggactcactgcgttgcttcacctcgacatttcgaacacacttgtggacgacatatcaccgctgtcaggcctcacttcgttatgcgtctgcacgcaaggaggatgcggtggcacgcaaggaggatgcggtttcgtgaacctccttacatgacgcattgcacatcaacaaagaccccgtgttcttttgggccacggtactggggaagaggcgatcgcttaagtgcggctggtccttcaatggacaatctcgaaagtaacgacaaaagaacgatacggagtctgcatgattgagagccgtgatctaaaaaagaaccacgatattctcgttaacatcttgcaatttgttgattcaaaatcgtattggtgttccattgccccgtggatttctacaccattaggttacaccgtaaggtgtgccgtacacgaggcggtttcattttagtattccgttgactgtatacagttgttatcaaataattttgggacactcagtataatttgggaatgtacagaaggacgcaagcggattcacaagattctccgctgcaaaagcagtcaaagcggagcgccacgccaacagagcggtggtaggctccactgtgggaagacttgggaccgcgatgtgaacgcttccaggaacatcctgatgcttacactccaccaagtctttgggagagagcgacctctcgcgtttcgccgagacgcgccgaggagttcctcgaaaaccccaccaccccctgatactgatatggggacacagacggttgaacggtttaccaaagaggctactcggaatatcttcgaaaacctcttaaacctgctgcaccccccaacgttgcccaaaagcaacgatctgcagtctggatgattataaggtgtgtcccactttatttgagaactactgtatacacctgcttattgtgatgggccaacgctacattgtagtgcttcagttcaaagacatactcgcgcccgcaagaaaccatggcattctccacaagattgaatgtgcggccactagtatgtggttgagatcctgaagaaggcgaatatgcaattactgtcaagtaggccttggttgaattagactctaggtgcgcggtcatcccatggccaagggcagacctgtgcacctttcctgcgttagttgcttcatcatatgacacttcatctccgcccctgactcctgcacctccaacagatacattgaagtttgcatctattctccgccttgccagcacgcgttgattgttcaggggtgacaactggatttccagcaactggcctgtctgattcgtcacatgaattgcccctgaaataataaccctccatgggcaccgcactgtagcgaatccctcgatgcctcgcaagttatcatacatctccttgcacatgtacatgtaaccagatacaggtccgtggttcactacaaatattttttgaggagtctgaggaaggtttgtaatatatacaacgtgtccaagagctcactacatagatgggtcaatgctgatcaggtgggtaaatataagcgtttaaaacgaaaaaggaaagaattgtccattcttttacgttccacgatatccaataatattgcagagaactcactcatcgtaagaagcaagacggtactggttgggaatgtacagatggacgcaagcggattcacaagattctccactgcaaaagcagtcaaagcggagcgccacgccaacagagcggtggtaggctccactgtgggaagacttgggaccgcgatgtgaacgcttccaggaacatcctgatgcttacactccaccaagtctttgggagagagcgacctctcgcgtttcgccgagacgcgccgagaagttcctcgaaaaccccaccaccccctgatactgatatggggacacagacggttgaacggtttaccaaagaggctactcggaatatcttcgagaaccttttcaaccttctgcaccccccaacgttgcccaaacgcaacgatctgcagtctggatgattataaggtgtgtcccactttatttgagaactacagtcggcggaacagtaaaatgaaacatatatcagatggaaataaatgtacgacatcgccgttagaaaattggcgttaagaatggtcgctgacttgggtgtgttaaaaacttctgtgtttacgaacattagtcattctactctgtggaggtggaaacgctttggtgtaaatcgaaaacgacgtgaatttgtaagcaaactttttgagacgaacaaagatttgttgaaattgtttttattgtcaactcaatgcacaaccgcaagaggtgttgttgcatttttcaaaagtactcacaatttacgattatcaactaaaacagtgtatcatttcataaaactcattggttttacaagaaaaaggagcaaactccgtggacagtgtaaaggggacttagttccacttgtcactgaattttgtagtagatacaaggatacaatcaatgctgggaaaattttagtatcagttgacgaatgtgggtttagtgagcgtctcaagccacattatgggtattcccctgtaggaaaacctgttatcgttaaaactactggtgggtgggtacaccatagtttgttgatggcagttttttcagatggtaggaaggagttcgttgtgaagaaaggatctgtgaagaagacggacttcgctgcatttattgactcgttgagtttgtgcaataattcagtagtaataatggacaacgccagtatccataagaagttggtcctcagaagccccgtaaatatttgttacactcctccttgcagtccagaattcaatgctattgagctgtgcttctctaaggtgaagaaggactttcgtcgattgaactatataccaaacgatacaaagacgcacgtgtctgatatgatttccttagcattcagcaacctcactgataaaatcattatgggttgttttgaccacgtatggaacacgtatgtgatgtttgtataaagagttctgtgatgtacaaattatgtaagatggcaacgaaacctccgacagtcgcaaaattgaaggagctactaaaattggccgaagtagcatactcctcaaaggacaagaaggacgatattgtccgtttatgcgaagacaatggtttcatcgccagaccccctccagagtacaagacggtggaaaagatgtgcgtcgtgaaatgcgccctgaagaaggcaatgagtcttgacgatgaagaattcggtaagttcagggggcatgtggatcagctcgtcaatgtggtgagccgcatgttacggcgttccagtctggtgctgactttccatgtcacgaggctcatggaaggcgacctgccgattcttaatatgtacgatatgaaggatacctactggaaggattggctaaggatcggagttgacggcgtctttccagatgaagagagtagaatatcatacgaagccgtgaaagacgtaatcagaaaggtgcttggtagctatgaacctgactacatcaactcctaccctatctatttcgaccaggttttgaactatgccggtcacacattgagcactgtcgtgtcgaacaacgcatgggttcctttggtacctcgtctgacccgcctcactaaggatactttgaaggcactgggagctccgaagaccatccgtgtgtacgtcgtgatgagggtcatccaacaagaaatacaggagatggaatcttggccagagtctgttcaggagtacgtccgtgaagttcgagtcaggctgaaagttccagatggaagtcgactttatgatgactatggccaagacatggacttcccgaccatggtccagttcaattattggatgcagacacggttggaggctattggtgcacgtcgtatccggttgatgcccatctttaatgtccaacgggcgcatgtccaccttgacatgaagaccctcgtgaacctgttcaggcacgtgttccccaaagacccaaacatcgtcgagctttcaaagtgggaaaatgtaaaggatcccgaccgcttcatgttgcctctgaagccttcagttaagaagaaaaaatcatgtggtcctggtgaatgggaggcatacaagttggcccaacagaagtacgatgctgacgttaaggatatcaaggctactgacgagtacagacatgcaaagggtaggtatgacacgctcgtgaacgcccaaaaaacagtcgcaggttccttcttcaagaaaccacctgtcaagacggggtgggtgttcgattgtagcatctgtactgacggagtctcattgagcatgcagtacagcaagacagtacaggttcgtgtatccgatctgaagaagacaagtaagaggtctcgtgacgaggaaggtatgagcgtctcagaacagtatgaccataaactcaaaacgacattgcccgatatgggtatcgtcgttctgtgtgtggatcctggtaggagcaacatcgctacagtcatgtatctggcagacaacaaaagcaagacatggaagcttacatgcggagctttttaccacaagtctggtatcaagaaacagaaaaaacagcaagaaaaacgtttctcagacatgattcctagatgggagtctctgcgtgaaaatggagcagcgttgagtacatccaggaaggatgatatctcggctcacttgaaaaattacgctacgttttccgacgagtggtggaggatggcactccgtcgcagagaatcccgagactactttcagaggtacattggcaagcgcaaggctatggactcattttgggcagggatcaagcgcaacatgaagttggatcatcctgacctgagggttcgcgtagcatatggttctgcaatcacgaagctgaaggctaccggaccaggagaggtagctgtgcctacgggatctatgttcgcttcctgcaagggcctcttcaaagaggaggttcatgtgacagatgagttcaagacgactctcatgtcttgggaaaccggtgccaagaaggaatgtgtttacaagattccaagtgtccaaataaccacggaaggtcagattcgtctaggttacgagttgttgggtcacaccccattgaaggagactccaaaggtctcttatcgcgaccagttggcggtgagggtgtactgcacacgtaaaaaaatccaagaaaaacacaggaggggtggcttagccccctctcttgtcgacaacaactcgatcaagcggtaccctgaggtacgaggattgcgattctctccagaaaccagcacttactcggaccgggaccgctcctctgctctcacaatcgcaaggctgcactgcatggaactgttgggtcaagggagaccgcttccattttgcagggatgcgtgttgttgggctacaaaaaaacatgatggtgttccactgcaatgtgggttgctacaccataaggttacaccataaggtgtaccgtacactccagaaagcggtttcattttagtattccgtcgagtgtactgtaagtagtgttgtacagggatccgcacagtaaaattgctactgaacatcttcaatgaatctgcatccgtgtgacaaggcaaatagcaaacacgcagcctgacgctgttgcgtgacagcatcaagacgctgcgcgaagcaacggatgtactgaagatacacaaattgaacaatgtaatacaacaacaactcccgcccgcctccctgaatgatagatgaaaaaatcactcacacactttcctgtatgtaaggaggtttctttactggacgaacaagctcatcatacattatattataacgagtgtcaaagcctcatgcggaacattctcacacgcacaagcgagaggtcgcggggcccgcagagcggggcagagagattcagttgcagaaacctgtcaagtcatcatacacgtacacacgcaaacggaggaacacggtcagaaacttcggccattcttaacgccaattttctaacggcgatgtcgtacatttactgttcagccgactgtagcgggcggcgacttctcgtccactcgtcatcgaatgatgtgtaaacaaccattaattcttcagtaacacaaacgaatgagttcttttgacgaaatcaatgaagatgtattggagatcattctagccaatgcgatttcgagcgaatgccacctcaaacaagtggctctcgttagcaaacggtggagatgcgtcgcaccccggtgtgtcacaaggatccacctgagacattataaaagtttggactatgtctcacgcatttgcaggctcgaagagttgaaaatcggtatcaatcgggggaaagacgtaccctacaaaaaaatgtcggagatcgaagacaatatcgaagacatatcaccgttgtccggcctcactgcgttggttcacctcgacatttcgcacacagacgtgttcgacatatcacctctgtccggactcactgcgttggttcatctggatatgtcgtacacctcagcaggcgaagacctaccacctctgtccggactcacttcgttgcttcacctggacatggcgtacaacgaagtggaagacatatcacctctgtccggactcacttcgttgacgcacctgaacatggcgcacacctacgtgtttgacatatcaccactgtccggcctcacttcgttgattcgcctgaacatcccgtacacacgtgtggaatacatatcaccgctttccggcctcgcctcgttggttcatttggatatgtcgtacacctccgcgggcgaatacctatcacctctgtccggactcacttcgttgcttcacctggatatgtcgtacaacgaagtggacgacatatcaccactatccgccctcacttcgttgacgcacctgaacatggcgcacatctacgttgccgacctatcaccgctgtccggcatcacttcgttgattcacctggatatggataacacgcttctggacaccatatcacctctgtccggcctcactttgttgacgcacctgaacatgtcgtacacacgtgtggacaacatatcaccgctgtcaggactcacttcgttgcttcacctctacattccgaacatcgaagacaggatcgaagacctattaccgctgtctggcctcactgcgttggttcacctcgacatttcgcacctccacatggccgacctatcaccgctttccggcctcacttcgttaattcacttggacatttcgaacaccgacgtggacgacatatcaccgctttccggcctcacttcgttgattcacctgaacatgaaggacaccgacgtggacgacatctcaccgctttccgccctcacttcgttgattcatctgaaaatgacgggaaaacggtaaagtagtcacatatctatatatcgacagattgtatcaagcagactcctgcacgacaatattgggattaataggaaggggtctcgaaggtcccgcggagcgggaagagggattcagttgcagaaacctacagtaaacggcagaaaactgtcgcatccatctgtccgtccattcattacacacgatgcggtggcggaatattgtattgatgtgtaaacacaactgttgcaatattgtattgatgtgtaaacacaactgttaatgggcgttcctgcttccgaacggatttccaatcttacaatcactttttgggggtcttttgatgcttttcaaatgcaatcttacgataaaaaacgtaagattgtagtcaattttgacaaaatatgcttgaaatgagcttgaaagacggagaaacgtacagattgcgaatgttacaacgttgaaatgccatattttgtaacaaaaggtgttaacatcaattcgtgtcttacaattataattgtaagaaataaagggaaagcggacggttataaggcggcaggcagaattcagcttttacatcttacaataaaaattgtaagtataattaatttaatttttctaacttagtaaaaaacggctatgtgtcaaacatcttactcctcctcctcccccccctcctcgtcctcctcttcctcctccttctcctcctccatgtccccatccccatcttcctcctcctccatctcctcctcctcagcaatgtctgcattgtctccatccgattgcacagcctctgccctggtgtccttctcaatggattgacaagctaggagcatgcttgtgtggtactttctctggatcttcatacccttggtgggttcgcagctaaattgaaatgcgtcaatgggaatatcgcccgtccatgttgcttttctcctaacccccactgtaataggcacaagcttgtggtccatccaatcttctggccaagttgggtattgtgtttcagtgtacaccaacttctgagccccagagtacaagggatttaaatacacacattccacttctccattcactggtagtgatttgacctccaccacgtcccatcctctcaatccgctagagtcatccatttgtaccttgaccacagcgacatgaccaacaaccaaatcagtagtgggctcgtaggctattcttctatccggcttcgtcccttgtgaagaatataagtacaacacatcctcctcctctggcctttccatattagtctccaaagtgtgtgcaaccttcatagtcttggcaatctcgttacttgcaggtaaaaggtctgacacatccatggacaagtcatccaatgctgctatcaagcgcttggccattgatttctcagactgtgtcagaacacgactggttgctgacaactccgatgggaagtcgacaaaatgttggtctttcgggtactccccagttacagcatcatctggttgagtgctccaataactcttctcaactttgaagaaatcagtccaccacttattgctggcttcccaagtttcacgaagcatctcggcaatatgtttgaaggactgggcatgggatgggccatcggctgctggttcatccatcggctgctggtcatcggctgctggttctagaaccagaaggtcctccgctgcgtgtcgtacacggacatcagttacgggtcctgcacggtcgtcaccggcggtttgtacaggaccatcggccatgtgcctgcaaggacgtcacctccgggcttctcgttatgaatagtcttccagacagccgcccagtttgcctcgatattctcgagctcttcaatcttgatcttgggggcttccttaaatactgttatggtgtccaccagtggcagccttggaggacgtaaataggttcagcgtcattgtcccactgtcctctccaagatcctgactcgtcatactccttgtaatagacccctgcaattgttggtgtgcaaacatgtattgtatattagtgaatcatttaggacacccatattcctcccgactatactcgggagcatcccttggataatacatcctaggtcctaggtacaacttcctttgtatcatttagtttctattgaagactgtacatgtaaatcaatgaggacatggcacacccatattcctccccgagcataatcgggagcattgtgcagacagtacatacacgcacggtagcatttaatttgtaaatatcagtatatcaagtattcttaccgactctcccgttgggacctttcgttatcttgaatgcgtgtaaacggcgattaactcctttgacggtgctagtgccatgtccgaacaacttgtaaacgttgtctaggaggacagcggagaagtcccctatagaggtcacgacgtcttgccttgtgtaagggcccattctcttgaataagttaccaacaatgcccatcagatggtccagggtgtacacttccatgttctttaacccttgcgagatcacagagtacttttggtcaagattgctatgtgtgtgtccgggagggaggaaatggacgtacacctcctcaaaccagttcatctcaaccagcaaggacaagtatgcgaacatgaaagcgttcttgttgtcctttgccgcgttgtccatttgcaagaagcaatacggtggaagctgcccctcttcttcaaggacccggttgaagaaatgttggaagcatgatatagtcagattgatggactgcgagtagaatggcaaagcccaataaccaatgaagcctcttccctgggagaataatcctgagttaacatagaaggaaacatgaagtcagaatattagcattattttgttaagtaatcatttcaagttttaaatactgtgtatgctcccgattatgatcgggaggacatgtcctacgtgcgctgtatttgtactcacacatgatgcgtgtctttagaagatcacctcctgcagtcttctttgtatgtgagaagtggcgtgactgaggaagattagtcttcttgttgtccattgcatcagcggatacgtgcaagaagagcttcggatactgttcagacagttttttcacagatgtcatacctacgccttgactggtttttaggattgctttccccctacttttcttctccacgggaatatttgtctggcttactccttatgacttgtgttgtggaatcccaggaattctgggtaccagaataccagggattggggggaatgttatgatacagacctatagctgtatcagtaacggtggcggggcataggtccgacacccactctagcagctggtgaccaggcatctgcctggcagctaggcagtgtagtaggtgacttcaagcgaatagggtcgttgggtttgacaatgctcccgattaggatcagagactgtgggtagtctgagttctggtttttctcaatcattcgttcgttgggttgacatgctcccggttatgatagggaggactatgggtatgccgagtacaaaaaaaaaaaaaaaaaaaaatgctgagtacatgtttctgaatcatttgctgctccttgggttgtcagtgctctccgatttatgatcgggaggacggtgtgtattcccgaatttggttttctcaatcattcgccgttgggttgacaatgctccgattctggatcgggtttgacaatgctcccgattatgatcgggaggactctgtgtattccaaattggttttcttaatcattagctccttggggtttgtcactgctcccgattatgatcgggaggaatgtgtgtatttccgatttggttctcaatcattcgctcggttgggtttgcaatgctcccgattatgatcgggaggactgtgtgtattccaaatttggttttctcatcattcgctcgtgtgggtttgtcaatgtctcccgattatgatcgggaggactatgggtattctgagtttggtttttctctatatctgaatctgatgtttgaatctgaatctgaatctcaatcatttgctttaccaacctatgtgtctttcgcagggtctacaatgacagtaccgtgggaagtaaaactcaatcggacgggaaggatttgggatgcagcgtcatggacgaatgaccaaggagcgccagtgccaatgaacatcgaagtcgttggtggtggaccagactttcatgttacggctacgcacgctcactggttgaggtttcgcggcgaatgcaggcatatgtgcggagcagattgcattctggtcgacactcaccccttgcggaagtcaagacagcccagttgcttgaagtcactagcattcgggaggcccatgttaggagccctatcatggataccagttcacattcaggctcttgggttggtagttgacaatgcgcagcaagcctgtcagggtcggcgagggcgaatttatcgccgacaaagagcttgaggaaactagagcgtgggttgagacatgcgaaggaaagctcatgagcgatttcgaggagtttggtcctagcgacaggaggacgtcacctcgatgtacaccaaaagggccttgacctgacgccggtaagagagcaatcgaacggactgtactgctgcactgtggctcaggttaaattttcaaatctgacaggtacatttcgaatgttacgtacgcggtgggatgtacaccgttcgaaacaaccattgtgtgctgacggcaacttgccgctttcaatttcgataggatattgcgtaacttctgcactctttacatttcctacagcctccgcgaagaagtcaggaaaggcgcgacgaggtcagcttcctacaatcaacgaagaggacagatcgccgacaactttgtaaggtcatcgtattcaaattggtatctccttatagcccagctcctgacatgggcctccgaatgctagtgacttcaagcaactgggctgtcttgacttccgcaagggtgagtgtcgaccagaatgctccgcacaatatgccgcattcgccgtgaaacctcaaccagtgagcggtgcgtagccgtaacatagaagtctggtccaccaacaacgacttcgatgttcattggcacttggcgctccttggtccattcgtccatgacgccgcatcccaaatccttcccgtccgattggagtttaacttccactgtactgtcattgtcgaccctgcggaagacaaatcggttggtaaagcaaatgattgagatccgattcaattcgattccaaatcatttccgatatagagaaaaaccactcgagtactccatagtcctcgccctgatcataagcgggagcattgtcaaccccacgagcaaaccttgatgaa

SEQ ID NO: 178 - DNA, 22403 bp, unidentified
  source 1..22403: mol_type = other DNA
  misc_feature 1..22403: note = Fanzor polypeptide
ggctgttacagtacccgctcgcttgaagtgccatcaatgccatctttgtcaccgtcttcgtcatcggtgtcgtccgaaacatgtatgtatgagggcaacaccgcttccaagagcggccgcatgccagcccacactccgcccgcattggagatggcgcatgtctctgtgtcatagccgcacaaagccttgtacaccagccggcttctccaagagtcatacaataatgtatttagaggagagtccctagctccgatgtcatgaaggagcaaatagcacatcagggcctcattgggcgatgtgctgctgctccctgagtgggcatgaagcgcttcgcacaccaaacgcatggaattgctcgatgggggacaagttttaaggggaaactggttcaaccatccgccaccttcgtcgccgttgtttgcgttgttacctcccccctgatcttcaagtgtcgcaagctcgtacattggacaccttaagtgtctcaactcttcaaccttggcattcagcgccttgatttccatgcgttgagttggatacagtgaaaaatgaagcccgtgcacatgtttcttccccttcctattgtttgacatagattggaaacaattcgggtaaaggggatggtctggtagctcaggcataaagaccaacatcgtgtcctgatgaaagtccactccatccggaagaaacttgtttcggtccacattgtagcactcagaatccggggccctgcgttgatagtacgcatgtgctgccgtgcccaacaaatcaattggggcaaagaagctcacgccaaccatgctctccccctcgatagtaggcagtggcggctgaaccacgaaatctatgtcatcatctgccaacatgtagtcatgagatttgaggggggcacagaagcggtgatagggcaagcgttcgcttccggcctgcagtttggtgcactccaacgacgtaaaggatctaccacaacctttctcgcatacatgaatgatttggacttcataaccaataattttaagaactttccatttccagcaaaaccatgtcacagttaagtcattggtgatggcatctaataggctcaggcttcggacgggtttcgtgtttttttccatcaacacacgtaattctcgttcatattcttcttgtaacatttcgacctttcaatatcaaggaagattcctttatattccaactcatgtctcatgtctccaccaagaccatcacgaatgagtcgcagttcgatagagagagattataattcgaacactgtaaactgtacagattttcaattgtttacactcgtttttcgaggcgcatgtggaacacgtgtcgtctcaagctggcttctgcttgacaactctatcgggattgtgaagggggaaaccgcggtccccacggagtggggcaacggaattgagctgctgactcactcccacgcatactaaggggggtctgaagaccacgtgtcgtctcaagcaggctccagcttgacaacacggtgggaatccgcaaagggggatcgcgggtccgcggagcgggacagtggaattcagctgatgactgtctgatcacatgcatggggcgaaatacgatgaggaggccgcagagaagctatgggagacggtgggaagacccgactatgacgggccgaagatgacaatgaagtcggtggtcaagtgggcttgcgaggacgacccgcgcgggtacgctgtgtacagagcatcttcgattccaaaaataatacgggacagttgggacaagggagaccgcggcctggggcagattgtgcactttctgctacaagagactgtgaagaagactggtcacagggactactacatattcgatgaggacacgtgcaggtgggccaaggtggaggatgggtgggtgaataacgtggcgagcaaggtattggaaggggtactcagggacgtcgacttatggatatcgacacaggccgcacagctgtgtatcggagtggtggaaggagaagaagactccaggagtaaagcagatctggatgcgaagaagaagaaagtggccacgctgatcaattacgcgatgtcttaccgcggagttacgaacgcaatggccttcgcgggcccactgctcattgacgagacgttcgagcaacgcctggatagcaataggcacttgatcgggatcaagggggggagcgtcgtggacctcaggacagggaagaagagacagagggtggcagaagacatggtgcacaacgaactggacgtcgagtatgaagaccaggcgacgaagaccacgaatgctgctgagtggatgcacatggtcgtagagaagatcatgggaggggacgaggccatggcatcttttcttcaaagatgccatggcctcgtcaccaaacgcatggaattgctcgatggggggcaagtttgaaggggaatctggttcaaccctcggccaccttcgtcgccgttgtttgcgttgctacctcccccctgatcttcaggtgtcgcaagctcgtacattgcgtatctaataccaatctgatgtagatctaacacaaatctaattcgaatctatccgaaactgtctgtacgagggcgaagtctagtttgttcggcgcattgaatgagtcagttcgacagatagagattcgcatttgtatggctgtaatctgtacggattttgagttgtttacactcgtttttcgaggcgcacaaggaacacttgtcgtcgattgattaaagccgcattgtgtcttacgcaaacgcattcacggtcgtccggtcctgtgcggcttctgccctgttggttttatgaagggggacgcgcgggaattcctgtcccgaatgacttctgcgacgaagacctcgctggcttgcttcgacttacacgaaacttggaaaatgtgaatgttgtgcacatcacccatctcccggcctttttcattaaggacgacttttgcaaagtcccgagttctgaacccggtgctttggcattcaaaaatgtagtaaaaattctttaatggcccgttgcaaggttttgaagacatgattctgggtatagtattcacagagaaaatattcgtttgcgtcaggttctttcggcgcattgaatgagtcgcagttcgacagagagagattcgcgtttgtatggctgtaatctgtacggattttgagttgtttacactcgtttttcgaggcgcactcgtaacacttgtcgtcgattaattaatataaattatttttattaattaatcgatttttttttgtcgtcgattaattaatataaattatttttattaatttttcgattttcggagcccctttcacctccccacagcggagaggatccagtggcacacgtcggacatccatcctcgaccgcatgccgcagtggacttcgcacacgcattttaaccctaaacccgtgtgtgggtttagaatacccaaacggagtataaattctgggacaaatccatttccttacatattttctcaatcatcatcacgaaatatccacttgataagcaggtcacgtcggaggacgatgaggaggagattgtgatgcacactcggaccggtatggacgcgcttcagatggacctcgtggttttgatcatgcgccgagcaggcagttggcaaaaggacgggtgctggatgcacgcgggattcatcagtcgagccatgcatactgctttcgcggatgacgctgcatgtgaagcacaggcgctagtggacagatgtgatcatctcaatcagaaccccatgaggatagcgtgtaaggccgggcgagccgacgtcgtccgcatattgctaaaagatcacaacgacatccgggcattggagtacgccgctgatggaggccatgtggatctgtgcaagcttcttatggatctggagtttgcaggcgaggagcactgcgccaaggcagatgccaataatggccaggcactgagtgtcgctgctaagggaggtcatgtggatgtctgcaaggttctgatgaatcctgagttcgctggcgagaagcaccgtgccaaagcttatacatactacagctacgcactgagtgccgccgctattggaggccatctcgatgtctgcaaggttctgatgaatcctgagttcacaggcgaggagtaccgtgccaaggcagatgccagtgaaagccagtcactgaggttagccgctcggggaggctatctggatgtctgcaagattctgatgaatcctgagttcgcgggcgaggagcaccgggtcaaggcaaatgccattgacagtctagcactgatgatcgccgctagtggaggccatctcgatgtctgcaagattctgatgaatccggaattcgcgggcgaggagcaccgagccaaggcagatgaaaacaacagtgatgcactaagtgccgcctctgcgagaggccatctcgatgtctgcaaggttctgatggatcctgagttcgcaggcgaggagcaccgagccaaagctgattcattatacagcaaggcactaagtgccgccgctcgtggaggccatctggatgtctgcaaggttctgatgaatcctgagttcgcgggcgaggagcaccgggccaaggcagatgaaaaacaacagtgatgcactaagtgccgcctctgcgagaggccatctcgatgtctgcaaggttctgatggatcctgagttcgcaggcgaggagcaccgagccaaagctgattcattatacagcaaggcactaagtgccgccgctcgtggaggccatctcgatgtctgcaagattctgatgaatcccgagttcgcgggcgaggagcaccgggccaaggcagatgactacaacagtgatgcactaagtgccgccgctctgcgaggctatatcgatatctgcaaggttctgatggatcctttgttagcgggcgagaagcaccgagccaaggcagatgacgacaacagtcaggcactgagtgccggcgctcagggaggtcatgtggatgtctgcaagattctgatggatcctttgttcgcgggcgaggagcatcgagccaaggcagatgacgacaacagagaggcactgtgtgtctccgctaagggaggctatctggatgtctgcaaggttctgatggattctttgttacactcgacgggcggaggaccaccgtgccaaagcagatgacattaatagccatgtttgtttgtgaaagattctctacatttcgatagttattttacgtgtcctcatgtgcagacacatgtttcagagtctgttgtttgttaaagattctctacatttcgacagttattttacgtgtccggagggggagcccacacttaacatcaagcattagacacacacactaatgcgtaacaactgtcaagtcttcttacacaatgatgatgtgtacgttgtttgtaaaagattcactgtaacacttgggcttattatcactgtaacgcttgagctaaaccgacctcaagcattacatgacggcggaaactgtcgactagagttgagttgagtcgtgtcgtgtcgagttacatggcgacctctcattacatgacggcggaaactgtcgactagagttgagttgagtcgtgtcgtgtcgagtcacatggcgacctctcattacctgacggcggaaactgtgtcgagtcgagtcgagtcacatggcgacctctcattacatgacggcggaaactgtgtcgagtcgagtcacatcacatggcgacctctcattacatgacggcggaaactgtcacactcgcatcaggcggaacctgtgtcgacacacactcacactcatcaaggacgcacacacggctacggggggatgggggcggagcgggacggcagaaacatgtcctcgtctccaaaagacaccacggcggcacctgtcgtgctctcgcatcaggcggcggcacatgtcgagtcgagtcacagagtcacattgcggcgacctttcgcatcaggcggcggcacatgtcgagtcgagtcactgagacacattgcggcaacctttcgcatcaggcggcggcacatgtcgagtcgagtcgagtcacatcacagagcgacctctcgcattatggcggcacctgtcgtgtcgagtcacagagcgagcgacctctcgcatcacggcggcaccagaagtgtaaacaaccattcttcagtataaacaaccatcagcacagcacacttcacaaacgatcgcaggtcttttaaagaatagctctgctatattccaaagaatgcttggaagcagtgctctgcgggagttggcaatggtcggcaatggatggactgctgaattgctggagcaagcggatatacaatctctgtcggatgtgtgggccctagatctggatgatgacagtttgattcataggctgatctcttcagcacgaacccttgcatctgatacaaccaggattgtacattgggacaatgtactgatgcgggcatacaaccgtatagttctcatccacgcagtagatcgtgttgaattttatgtcccgttcaagttccgatgttccatatcgcaccagtggccagatcagccatccgtctcaccagcaggtcatctgtatgaccgttgttggatagaaagatgggtgcgtgcaagtgccaccgatccattcactcgcgatccattagatgtgagtcagctctgtccagtatcaccggagttcgcgttagaaattgcagaagaaagacgcaatcatgccatcggcattgttcccaccagggtttgtggaatcgatgaggagcggattgattgattgattgatccgctcctcctacagtcggaagacggaacgaactcttaaatgaggaatgccacgatgagatgacgcacacggcggcccctcgtccagactcatcacgcacacggtggcggcttctcgcatcatggcggcacctgtcgagtcacatcacatggcgaccgacctctcgcattacatgacggcggaacctgtgtagagtcgaggcaaagataacaaacaacacttggatgagaaccgtctcacattaacatataacaagcggtgaagcccctttcacctccccagtggcacacgtcggacatccatcgcatgccgcagtggacttcgcacacgcattttaaccctaaacccttgtgtgggtttagaatacccaaacggagtataaattctgggacaaatccatttccttacatattttctcaatcatcatcacgaaatatacacttgataagcaggtcacgtcggatgacgagggggaggagattgtgatgcacactcggaccggtatggaagcgcttcagatggacctcgtggttttgatcatgcgccgagcaggcagttggaagaaggacgggtgctggatgcacgcaggattcatcagtcgagccatgcatactgctttcgcggatgacgctgcatgtgaagcacaggcgctagtggacagatgtgatcatctcaatcagaaccccatgaggatagcgtgtaaggccgggcgagccgacgtcgtccgcatattgctaaaagatcacaacgacatccgggcattggagtacgccgctaatggaggtcatgtggatctgtgcaagcttcttatggatccggagtttgcaggcgaggagcactgcgccaaggcagatgccaaaaatggccaggcactgagtgtcgctgctaagggaggtcatgtggatgtctgcaaggttctgatgaatcctgagttcgctggcgagaagcaccgtgccaaagcttatacatactacagctacgcactgagtgccgccgctattggaggccatctcgatgtctgcaaggttctgatgaatcctgagttcacaggcgaggagtaccgtgccaaggcagatgccagtgaaagccagtcactgaggttagccgctcggggaggccatctcgatgtctgcaagattctgatgaatcctgagttcgcgggcgaggagcaccgggtcaaggcaaatgccattgacagtatagcactgatgatcgccgctcgtggaggccatctcgatgtctgcaagattctgatgaatcctgagttcgcgggcgaggagcaccgggccaaggcagatggaaacaacagtgatgcactaagtgccgcctctgcgagaggccatctcgatgtctgcaaggttctgatggatcctgagttcgcaggcgaggagcaccgagccaaagctgattcattatacagcaaggcactaagtgccgccgctcgtggaggccatctcgatgtctgcaagattctgatgaatcctgagttcgcgggcgaggagcaccgggccaaggcagatgactacaacagtgatgcactaagtgccgccgctctgcgaggctatatagatatctgcaaggttctgatggatcctttgttcgcgggcgaggagcaccgagccaaggcagatgacgacaacagtcaggcactgagttccggcgctaagggaggtcatgtggatatctgcaaggttctgatggatcctttgttcgcgggcgaggagcaccgagccaaggcagatgacgacaacagtcaggcactgagtgtcggcgctaagggaggtcatgtggatgtctgcaagattctgatggatcctttgttcgcgggagaggagcaccgggccaaggcagatggaaacaacagtgatgcactaagtgccgcctctgcgagaggccatctcgatgtctgcatggttctgatggattctttgttacactcgacaggcggaggaccaccgtgccaaagcagatgacattaatagccatgtttgtttgtgaaagattctctacatttcgatagttattttacgtgtcctcatgtgcagacacatgtttcagagtctgttgtttgttaaagattctctacatttcgacagttattttacgtgtccggagggggagcccacacttaacattagacacacacactacagtcggcggaacagtaaaatgaaacatatatcagatggaaataaatgtacgacatcgccgttagaaaattggcgttaagaatggtcgctgacttgggtgtgttaaaaacttctgtgtttacgaacatcagtcgttctactctgtggagttggaaacgctttggtgtaaatcgaaaacgacgtgaatttgtaagcaaacttttttgagacgaacaaagagttgttgaaattgtttttattgtcaactcaatgcacaaccgcaagaggtgttgttgcatttttcaaaagtactcacaatttacgattatcaactaaaacagtgtatcgtttcataaaactcattggttttacaagaaaaaggagcaaactccgtggacagtgtaaaggggacttagttccacttgtcactgaattttgtagtagataccaggatacaatcaatgctgggaaaattttagtatcagttgacgaatgtgggcttagtgaacgtctcaagccacattatgggtattcccctgtaggaaaacctgttatcgttaaaattactggtgggtgggtacaccatagtttgttgatggcagttttttcagatggtaggaaggagttcgttgtgaagaaaggatctgtgaagaagacggacttcgctgcatttattgactcattgagtttgtgcaataattcagtagtaataatggacaacgccagtatccataagaacttggtcctcagaagccccgtaaatatttgttacactcctccttacagtccagaattcaatgctattgagctgtgcttcgctaagaatgggcgttcctaccacccggccgattttgactggttgcgaaacatggtaaggagcagaattgtgattccatggtgcttatgtctcaagctagctagtctttccggaggctctaaatcctgattagaaatttaaaaaaatcggccgggagacaggaacgcccatttaaggtgaagaaggactttcgtcgattgaactatataccaaacgatacaaagacgcacgtgtctgttatgatttccttagcattcagcaacctcactgataaaatcattatgggttgttttgaccacgtatggaacacgtatgtgatgttggtataaagagttctgtgatgtataaattatgtaagatggcaacgaaacctccgacagtcgcgaaattgaaggagctactaaaattggccgaagtagcatactcatcaaaggacaagaaggacgatattgtccgtttatgcgaagacaatggtctcatcgccaaaccccctccagaatacaagacggtggaaaagatgtgtgtcgtgaaatgcgccctgaagaaggcaatgagtcttgacgatgaagaattcggtaagtttagggaacatgtggatcaactcgtcaatgtagtgagccgcatgttgcggcgttccagtctggtgctgactttccatgtcacgaggctcatggagggcgacctgccgattcctaatatgtacgatatgaaggatacctactggaaggattggctaaggatcggagttgacggtgtcttcccagatgaagagagtagaatatcatacgaagccgtgaaagacgtaatcggaaaggtgcttggtagcgatgaccctgactacatcaactcctaccctatctatttcgaccaggttttgaactatgccggtcacacattgagcactgtcgtgtcgaacaacgcatgggttcctttggtacctcgtctgacacgcctcactaaggctactttgaatgcactgaaagctccgaagaccatccgtgtgtacgacgtgatgagggttatccaacaagaaatacaggagatggaatcttggccagagtctgttcaggagtatgtccgtgaagttcgagtcaggctgaaagttccagatggaagtcgactttatgatgactatggcaaagacatggacttcccgaccatggtccggttcaattattggatgcagacacggttggaggctattggtgcacgtcgtatccggttgatgcccatctttaatgtccaacgggcgcatgtccgccttgacatgaagaccctcgtgaacctattcaggcacgtgttccccaaagacccaaacatcgtcgagctttcaaagtggaaagatgtaaaggatcccgaccgcttcatgttgcctctgaagcctgcatttaagaagaaaaaatcatgtggtcctggtgaatgggaggcatgcaagttggcccaacagaagtacgatgctgacgttaatgatatcaaggatactgacgagtacagacatgcaaagggtaggtatgacacgctcgtgaacgcccgaaaaacagtcgcaggttccttcttcaagaaaccacctgtcaagacggggtgggtgttcgattgtagcatctgtactgacggagtctcattgagcatgcagtacagcaagacagtacaggttcgtgtatccgatctgaagaagacaagtaagaggtctcgtgacgatgaaggtatgagcgtctcagaacagtatgaccataaactcaaaacgacattgcccgatatgggtatcgtcgttctgggtgtggatcctggtaggagcaacatcgctacagtcacgtatctggcagacgacaaaagcaagacatggaagcttacacgcggagctttttaccacaagtctggtatcaagaaacagaaaaaacagcaagaaaaacgtttctcagacatgattcctagatgggagtctcttcgtgaaaatggagcagcgttgagtacatccaggacagatgatatctcggcttacttgaaaaattacgatacgttttccgacgagtggtggaggatggcactccttcgcagagaatcccgagacaactttcagaggtacattggaaagcgcaaggctatggactcattttgggcagggatcaagcgcaacatgaagttggatcatcctgacctgagggttcgcgtagcatatggttctgcaatcacgactttgaaggctaccggaccaggagaggtagctgtgcctacgggatctatgttcgcttcctgcaagcgcctcttcaaagaggaggttcatgtgacagatgagttcaagacgactctcatgtcttgggaaaccggtgccaagaaggaatgtgtttacaaaattccaagtgtccaaataaccacggaagggcagattcgtctaggttacgagttgttgggtcacaccccattgaaggagactccaaaggtctcttatcgcgaccagttggcggtgagggtgtactgcacacgtaaacaaatccaagaaaaacacaggaggggtggcttatccccctctcttgtcgacaacaactcgatcaagcggtaccctgaggtacgaggactgcgattctctccagaaaccagcacttactcggaccgggaccgctcctctgctctcacaatcgcaaggctgcactgcatggaactgttgggtcaagggagaccgcttccattttgcagggatgcgtgatggttgatgggctacaaaaaaacatgatggtgttccactgccccgtgggtcgctacaccataaggttacaccataaggtgtaccgtacactccaggaggcggtttcattttagtattccgtcgagtgtactgcgtaacaactgtcaagtcttcttacacaatgatgatgtgtacgttgtttgtaaaagattcactgtaacacttgggcttattatcactgtaacgcttgagctaaaccgacctcaagcattacatgacggcggaaactgtgtcgagtcgagtcgagtcacatggcgacctctcattacatgacggcggaaactgtcacactcgcatcaggcggaacctgtgtcgacacacactcacactcaccaaggaggctttctcaagcagaccccagtccgttgactaactgtcttcaggagattgatacaatctaaaaagtacacgtccatcctccattcatcctcacacatactgtaccaaggcggcgtatcaacaaccgcatgtactcaaacgaaagccgtgtatatcaagcaggcttggaaatggaaaaacgttgagatcacctacgtgcgaggagatttagcttcgtaatagcatggatcgatacagaatacacaactgcacgaaaaacataacagcaagcagctccagaatgcccttttcctgagcggaagatacccgaatagtcttacgtaatcgtccatgtattcccatgtgtttgccgtgtacgtattttctatctctacaatcttcttcaatcgagcagcattctgggcgtactcaattttggcaccagataataggtggattgtcgttccgtcaaacgtgaacatagtcttattcatcacgttcgatgcttgcatgtagtagaatgtctctttgtacaggtcgagtatttctaaacatttcttggcgtcattctcattatcgaataccaccgttccatgtaaaataaaatgtttgccattccacctactgcctgaaactgtgaaacacgcatacatgctggtatccaatttcttgaagttatccattgtttctgttttacacagaagatatagggtgcgcaaagcaatatactatacatagtcttgatttcttatacttcatgggcgttcctgactcccggtcgattttgactagttgcgaaacatggtatggagcggatttgtgattccttcgatcatgtaacttcaaaaaaaacgaccgggagacaagaacgcccattatggttaaaacttgagatcgagatgaaatcggaagcaataaagtgttacactcaatacatgtatgttaaagtatattgtgacagtctcggggacctggctctggctcgacttgtacttcaaggaggggcgaccacgtgtgacgacacctcctcgacttttacaggcgctttcaaggtgactttcgaagctcagcacttatcctcgatcgcttcaacacgacgatagttttcagcgaccaatatgattgcataatgttttatactcaataatgcaaattgcaagcagtagtagtagcaggcgaatcccaaaaactaaataaatatattgccgatttttttaaatttctaatcaggatttagagactcctgaacgactctctttgtaaccgatcttgtcaatacagatattgtcttcaggagtttgattaacacaaaacattcaaatcttcaaagtagcctgaaaagtccaagtgcacatcaataattcgcctctggatccatcagcagcaagcagacatagggcgtgaccttcctttgcagcctcccacaaggcctagctgtcgttagagttcgccagggccctgaactcaagtccatccactgctggatccatcagcagcttgcagacatctgcgtgaccgtccttcgcagcctcccacaaggccctgctgttgacagagttcgccagggccctgaactcaagtccagccacctctggatccatcagcagcttgcagacatctgcgtgaccttccttggcagctgcccacaaggccctgctgttgacagagttcgccagggccctgaactcaagtccagccaccgctggatccatgagcagcttgcagacatctgcgtgacctgcattggcacccacaaacaaggtccagctgtcgctagagttcgcccgggccctgtacttgagtccagctacatctggatccatcagcagcttgcagacatctgcgtggccttctttggcagccgcccacaatgctctgctgtcgctagagttcgccagggccctgaactcaagtccagccaccactggatccattagcaacttgcagacatcggcgtgaccttcattggcagccgcccacaaggccctgctgtctctagagttcgccagggccctgaactcaattccagccacctctggatccatcagcagcttgcagacatctgcgtgacctgcattggcagccgcacacaatgcccagctgtcgtcggagtttgcccgggccctgaactcaactccagccacctctggatccatcagcagcttgcagacatctgcgtgacctgcattggcagcactccacaatgccctgctgtcgattgagtttgcccgggccctgaactcaagtccagccacctctggatccatcaacatcttgcagacatctgcgtgaccttccttggcagacgcccacaatgcccagctgtcgattgagttagcctgggccctgaactcaagtccagccacctctggatccatcagcagcttgcagacatctgcgtgacctgcattggcagccgcccataaggcccagctgtctctagagttcgccagggccatgtactcaagtccagccacctctggatccatcagcatcttgcagacatctgcgtggccttctttggcagccgcccacaatgctctgctgtcgctagagttcgccagggccctgaactcaagtccagccaccactggatccattagcaacttgcagacatcggcgtgaccttcattggcagccgcccacaaggccctgctgtctctagagttcgccagggccctgaactcaattccagccacctctggatccatcagcaatttgcagacatctacttgaccttcattggcacacacaaacaaggccctgctgtctctagagttcgccagggccctgaactcaagtccagccacctctggatccatgagcagcttgcagacatctgcgtgacctgcattggcacccaccaacaatgcccagctgtcgctagagttcgcctgggccctgaactcgagtccagccgccactggatccatcagcagcttgcagacatcggcgtgaccttccttggcggcctcccacaaggccctgctgtcgctagagttcgccttggccctgaactcaagtccagccaccgctggatccatcagcagcttacagacatctgcgtgaccggccttggcacccacatagagaagattgttttcattttggttcgccctaaattgtagggtcccctgaacctgtacaagaggattggacaccaagcatactgctagaaggtcggcgcgcccccctttcgccatcatctctccaacgagctgtggtggtttgatcagtccggcaaggggcaatcctgaaaatcttttgtgcagagttttgcacactaatacaatctgggggttggaagagaatagggcaatacgatcaagaatgtcacagggaaccgacgttaggaatggaaacgatgatcgagtgtgagattgcatttcgatgaacatgtgtatattcatgcaagcgcacaggatggtataaataaataatgagttgggataaaccctataaaccctataaacccttggttgcacttgcttgcggtagctgttgcggtagctgtagcggtacactcgacggaatactaaaatgaaaccgcctcctggagtgtacggtacaccttatggtgtaaccttatggtgtagcgacccacggggcagtggaacaccatcatgtttttttgtagcccatcaaccatcacgcatccctgcaaaatggaagcggtctcccttgacccaacagttccatgcagtgcagccttgcgattgtgagagcagaggagcggtcccggtccgagtaagtgctggtttctggagagaatcgcagtcctcgtacctcagggtaccgcttgatcgagttgttgtcgacaagagagggggctaagccacccctcctgtgtttttcttggatttgtttacgtgtgcagtacaccctcaccgccaactggtcgcgataagagacatttggagtctccttcaatggggtgtgacccaacaactcgtaacctagacgaatctgcccttccgtggttatttggacacttggaattttgtaaacacattccttcttggcaccggtttcccaagacatgagagtcgtcttgaactcatctgtcacatgaacctcctctttgaagaggcgcttgcaggaagcgaacatagatcccgtaggcacagctacctctcctggtccggtagccttcaaagtcgtgattgcagaaccatatgctacgcgaaccctcaggtcaggatgatccaacttcatgttgcgcttgatccctgcccaaaatgagtccatagccttgcgcttgccaatgtacctctgaaagttgtctcgggattctctgcgaaggagtgccatcctccaccaatcgtcggaaaacgtatcgtaatttttcaagtaagccgagatatcatctgtcctggatgtactcaacgctgctccattttcacgaagagactcccatctaggaatcatgtctgagaaacgtttttcttgctgttttttctgtttcttgataccagacttgtggtaaaaagctccgcgtgtaagcttccatgtcttgcttttgtcgtctgccagatacgtgactgtagcgatgttgctcctaccaggatccacacccagaacgacgatacccatatcgggcaatgtcgttttgagtttatggtcatactgttctgagacgctcataccttcatcgtcacgagacctcttacttgtcttcttcagatcggatacacgaacctgtactgtcttgctgtactgcatgctcaatgagactccgtcagtacagatgctacaatcgaacacccaccccgtcttgacaggtggtttcttgaagaaggaacctgcgactgtttttcgggcgttcacgagcgtgtcatacctaccctttgcatgtctgtactcgtcagtatccttgatatcattaacgtcagcatcgtacttctgttgggccaacttgtatgcctcccattcaccaggaccacatgattttttcttcttaaatgcaggcttcagaggcaacatgaagcggtcgggatcctttacatctttccactttgaaagctcgacgatgtttgggtctttggggaacacgtgcctgaataggttcacgagggtcttcatgtcaaggcggacatgcgcccgttggacattaaagatgggcatcaaccggattcgacgtgcatccatatcctccaaccgtgtctgcatccaataattgaaccggaccatggtcgggaagtccatgtctttgccatagtcatcataaagtcgacttccatctggaactttaagcctgactcgaacttcacggacatactcctgaacagactctggccaagattccatctcctgtatttcttgttggataaccctcatcacgtcgtacacacggatggtcttcggagctttcagtgcattcaaagtagccttagtgaggcgtgtcagacgaggtaccaaaggaacccatgcgttgttcgacacgacagtgctcaatgtgtgaccggcatagttcaaaacctggtcgaaatagatagggtaggagttgatgtagtcagggtcatcgctaccaagcacctttccgattacgtctttcacggcttcgtatgatattctactctcttcatctgggaagacaccgtcaactccgatccttagccaatccttccagtaggtatccttcatatcgtacatattaggaatcggcaggtcgccctccatgagcctcgtgacatggaaagtcagcaccagactggaacgccgcaacatgcggctcaccacattgacgagctgatccacatgctccctaaacttaccgaattcttcatcgtcaagactcattgccttcttcagggcgcatttcacgacacacatcttttccaccgtcttgtattctggagggggtctggcgatgagaccattgtcttcgcataaacggacaatatcgtccttcttgtcctttgatgagtatgctacttcggccaattttagtagctccttcaatttcgcgactgtcggaggtttcgttgccatcttacataatttatacatcacagaactctttatacaaacatcacatacgtgttccatacgtggtcaaaacaacccataatgattttatcagtgaggttgctgaatgctaaggaaatcatatcagacacgtgcgtctttgtatcgtttggtatatagttcaatcgacgaaagtccttcttcaccttagcgaagcacagctcaatagcattgaattctggactgtaaggaggagtgtaacaaatatttacggggcttctgaggaccaagttcttatggatactggcgttgtccattattactactgaattattgcacaaactcaatgagtcaataaatgcagcgaagtccgtcttcttcacagatcctttcttcacaacgaactccttcctaccatctgaaaaaactgccatcaacaaactatggtgtacccacccaccagtagttttaacgataacaggttttcctacaggggaatacccataatgtggcttgagacgctcactaaacccacattcgtcaactgatactaaaattttcccagcattgattgtttccttgtacctactacaaaattcattgacaagtggaactaagtcccctttgcactgtccacggagtttgctcctttttcttgtaaaaccaatgagttttatgaaacgatacactgttttagttgataatcgtacattgtgagtacttttgaaaaaagcaacaacgcctcttgcggttgtgcattgagttgacaataaaaacgattttaacaaatccttattcgtctcaaaaaggttgcttacaaattcacgtcgttttcgatttacaccaaagcgtttccacctccacagagtagaacgactgatgttcgtaaacacagaagtttaacacacccaagtcagcgaccattcttaacgccaattttctaacggcgatgtcgtacatttatttatctgatatatgtttcattttactgttccgccgactgtagcactacacacgatgcacaagtcgacgccagaaactgaggacgttttgtaaccgatcttgtcaatacagatattgtcttcataaaacattcaaggactgtaaaagttacatcttcaaagtagccttaaaagcaaagtgctggctcacatcgtgcgcatcaataatcatttcaattggtgcccgcgaagcgcacggcctgtacacagtgccctcctgccgaccattctcggaccagctcccgtgcgagagagtcgtactcgtgtcgaaacaccacccacttgctcgaggcgcccacgtggctgaacctcctcacggactggagttccccgtcgttccacacgtacacgttgagttccaggtcgtccggcaacgctccgagggcggcgttcagtgcgtgcgtcttgccggtgcccccggcgcccaccacgaccaggcacgacttggcttcgctaaggaggaagtcgaggatgatccgtgtcttctccacggacgtctcgcatgtctcgcgcatctctgtgtctgacattggtgattcggacatcgcgattaaagtagattgtcacacacgacgtcactttatactacaaaatggcccgtccagcaaagaaacctccttacatgacgcaatgcacatcaacaaagaccccgtgttcttttggaccacggtaccggggaagaggcgatcgcttaagtgcggctggtccttcaatggacactctcgaaagtacacccaagtcagcgaccattcttaacgccaattttctaacggcgatgtcgtacatttatttccatctgatatatgtttcattttactgttccgccgactgtagtgggtgtgtcccactttatttgagaacaactgtacattacaaattatggtgtaaatggaataatagatcattcaatgagaacaacagttgttacagttattgtaacaacatgcgagaacacgttcgcccattttcatttgagcgtgtagcattcagcgatacaggaaagataccatcctatatacgcatcagtaaatccaaaatacccggagcagggaggggcctctttgctatccgttcgctacccactggaacaccactcacagagtacccaggacctgtcatcaacgaatcgaatgtgtcctcgcgtacacgatcgggaaagcgaaaaagtaaacgtgtacatgcgtacgcatttgagatcgcgtgcaccccaaacgttctcacgctccaaccagacccattcgatctgagcaagggagtggcacatatcgcaaacgatgccatccatccagaagtgacgggattctcaaacaactgcgaattcatacagaagaagaagggggagacggaagaagtgtacctatgcacatcgaggaaagtgaagcggggagaagaattgttcgtggactacttgatgccatactggattaacggaaagcatccgcactctgcaatgtccaaatggctgaaaaaggcccgcagaattcaacacacaatgaaagccatgggtgtgcgtctcgagcaatacatgggaggcgatgaatacgaaatagtagaccctgacctacgcgtattctgtggagaatgcgaacctacaaataaaagagtgatcaaatgctgtccttcagaatccatgtacacatgctcagaatgcaagaattgcatcatttacatgtaaaaatgagctttggcggctgcttccaggcatgtagcccgcttccaagcatctgcgttggccatgatcatgcgtggaataatgacagaagccaacgtgtttaagatccattcgcggatccgcgatctgggctggtactgacagggatgggcgccatgagatattcctactctgccccattgaccagtatgtttttacttaaaacggaatgcaactttaatacagttgttctcaaataattttgggacactcagtataatttgaatgatatcccctgaaaccaggtacaggtccgtggttcactacaaatattttttgaggagtctcaggaaggtttgtaatatatacaacgtgtccaagagctcactacatagatgggtcaatgctgatcaggtgggtaaaagtaagcgtttaaaacgaaaaaggaaagaattgtccatgcttttacgttccacgatatccaataatattgcagagaaccccttcataacatgcaaggatttggtcggtataatttgcaagagttgtaatgtgagattatcgatcagtactgcatcgagacacataaaacaatgtggattttctaggaagaaggcgtttcccacagttctctacggacattcaaaagaaaatgtagaaatgttttgtgacaagtacatagaaagctctaacgttgtttgtatcgacgaagcaggattttacgctggagaacacaacaaatatggatacagcaagatcggttctcgattaactacgaagacaatgagtaacctccgtcgtgtgaagttcactttattactcgctatttcatctcagggaataatagattatcagttattggagcacaattgtaaaaaagaagatttcattaaattctttaaaactttggtcatcccaaagaaaaccacgatcgtcatggataatattcggtttcaccattcttcagaaatcaaggatatatccgaatgcaaagggtggaagcttttgtacacccctcctta

SEQ ID NO: 179 - DNA, 22403 bp, unidentified
  misc_feature 1..22403: note = Fanzor polypeptide
  source 1..22403: mol_type = other DNA
  variation 18184..18367: note = n is a, c, g, or t
gaacatcgctctgatcacaacggctttcccctgcagaaagtttggcaattggcggggcctgtgctggttgcacacgcatcaatcgaagaggaactggtgggcaagtcaccggaggcaaaggacgccgtccggtcgaggacatggtggaaagttctggagacaaccaggcaccttctagctcacccttctatcacagacacggatgaccttctgaagattgtgttggtgaacctgcgtgctttgttgtatgctgcccgagtggacatcaccacccaccgaaagtggaagttcctcgactatgagacaaccgtgagcttcaaagagcccggaggcaccggagagaagaagaatatctgggttgacaagatcatcacggtcctcctgtcatccctcaacaactgcactgttagcgagttgcgcaacgactttgacaacacgactggtgaacatcaggcacttttgaagagatgccgactgatatttggccatgtggcttttcggctgaaggctagggatgatgatgcatggaaggttgctgcaagcgagttcaaagtattgtaggacgtacagtcagagacagaatttgtgggacacccttaccggtgacccttgaacccaattgatgcgcgcgatggacacgtggcttctcaagcagacttcagcgatctgacctgcttacacgcgtgatttgggagagaggaacacgcgtagaatctgaacggattacgcatgcatatcgaagcatggagtggggcaggggaagtcagctcatgactcactgtatctttatcgataagacacttctccaccctcagtctcctctatttcttgagacggaccgttgaatttaagctacccgtatatcctcgaacctatgaatttcttactaaacatccgggggcccgggggacatgtagtaagaaagacaacgaattctccataggggtatcataggggtcaactccccaggggatgctgtcctttacgaacagggattttctgttcgaacagccttcaggaagatgccagctgcccccacaatgtctctgtcgcaggtgaattgacagttcttgcaggtgtatgtctctccacacttgttcaagaaaccgcacatagggcatgtctgacttgtgtaatgctcaagcacatgcaagaacactgtcccgtactcttcacacttctccttcagccgattgaacagcacagagtggctcaaagtcagcatctgacgggcaaccttggttgtcagctcccgttcagcactgattgtcatcttcgccgtctccaattgaggtaccaacaacacatcgtagcgagcggccaagaaatttgttgtctggtccctaaattctttcttgaggtaaaaaattgtcttccgaatgcgaatcatcagcttctttatcttcatcctctcttttgatcgtaaggttttctcagtatccaaccttgactgcagcttgtcatgaaccagcaggagtttgacaaggtcggatgcctgtccctgaccaagcatgaaggattcctcattctcaggtgagtacgtgaccattgtctttcggacgcctgggtcgatggaggcagttgcaaccttgtctggattgacaggcttccgctctgcccttctgtccctagcagcgacagacaatacgaggaaatattcgccgaagcgggatttttggaccttcggatcgtgggtcgggttttcctcaggcatcaacttatggagttgtttgctaccgaagtagcgcatgttgcccaatatttctttgaagatgaagagtttgtcgccatccttggaaacgttcttctgatccatctcaatgacccaacccctctcaagctctgtcttcttccgtctgaacggagctgaaaactgcttgatgttacctgctttcagattcgaaaagcaagccttgatgtttgccaatgcagacttgattgcgctttggcgtacgcttttggggcattgaagcaaccattggcgattcttgaagtacgggtttggcatcttcccctcccccctcactttgttcgtcacatacctgtctcgaattcggaagacagacttgtgagtgctcccgacgcccaaccgtgctgccaccgccttgttgtacatgaaccggctgcaccccgcaaactctgccagcatcgatttctgagccttggttgggttcagcttcagctttaaggtcctcaacttgggtttggcatttgactttgtagcgtcttcgaccgttccatcggtaactatatacttgaacgatggacatgaggtcttttccaagctcgtcttcaggggctctgtcttggtgatcgagaacgatgatcgagtaggagtgctgtgagcaaatccattaaatgagctcgaaaccaaaccttgcgtgcctgtctttggaagccacaacaattgacgatacatgtcctgccgtgacgagtcccaatactcgtaaaagtccagggcgcttgaagttgagccctgatccgacgtccttgacttgctcgcatccggaatgtttgtcagaaatatgggtttgcaagaacaattgctgtctgagcaggtcgtgttattgtttgtgtgaggacacacgtgcgtagagaatgacttgacgactgctggtttttttttcctgctcgatgaggtagccttggatgctgcttgggtcaaagagacgttggttgcctggagtccggatcgttctgatcgtgccattatctgcccatcgacggaggacggtcctggagacaccaagggcatcggaggccttgccaattttacagaagctttggttgccatacatggcattctgatatttagtacatgcaaattccttatacactgttagatttacttattttcggaaagcaaacgagtcaactgttgcaaccttctcctcatatatacgggcattctcctcctgctcgatgcgaaacttctccacggaagcgacgtaggtagcatgggtcgcgttgagaatcttgaactcggtatcgaatatcacgctcgcgccgggccactcacagatattatcccacatcacagaaacggtatccacacgcgcagacagtccactccccgcatcttcgaggttggctctcagggatgccagggactctgtgtcgcgagtgcgctggaagatctggacgaacacattctcgatattattgaggacatggacaggaattcgaggctggcgagcacgccacgctttcctgatatcggaaacgatacacgctgccttcagataaaagacataaaatcgcaggcttttaggtatgtcaggatcgtcaagatcgtgtgtatcagcccactgcgtcatggcttcccacttggcattcgattcgaatcgaatcgacgagcattgatgtgatgtcgtcatacgaagcgaatcgaatcgaaacgaatcgaatagaatcgatctgatgtcgatgacgctgtcgatgtcatcacgcttcaattctctacgatcgacgtaaagatcatagagaattgaagcgtactcagtgtgattgtgaaagaatttcatctcaagcatcgatacggagatgtcatcgggatctccttcgtttttgtcaacaaaacccttgcacaaacgagagtcactgcgaagttcacatccgcgagactcgagagccctctccaaaatgtgaaggcgagtatttgtagcaatgatgtctgcagcgactttcacaatacacccccctcttccaaaattaacgtacaaatctcgggccctgcatgcggagtccgaaaatgagaatatccttgaatccaacggcatgtcaccaagcttattggaaagcaacgccgcacgagaggtacgtcgctcattcttctcgagcgcaacacgagccacgtcgcggataagataagataaacgatgcacagaattttgtttgagttcgcaactcagcgtcgtgagatcactctcggtcaagcgatactcagacttggcattcgacacaccgatgcgtgcgtcgcgcatagccctcatttcggaacggaatttggcagacaggatgcacgctcgaggggtgcgagcgacaacttccgcctccatcagcctcctccacaatacggatttggaaccgtaaaccatcaggccacgatcgcgacacgccttcttgagaacatccgctttgcttgcctctgaaagaccctcgggaatacgcatcctctcgaactctgcatcgttcacaaggtgtccatcaggctccagcttctcttgcacagcaagaccaagctcggagaaaaaaaacgtttcccaccaacatgaggttcgcggcgtcctctgagacgtcgcataatcgatggtatttatcatcactggttgataaatgaaacgcgatgatgtggagtgggactgcagaaagaagttccatgatttgttacaatatgctacacttaaacattatgctactgatacacttaaacattatgcttcagagacacttctttgttcgctgttccgttgactgtacataatgcaggttcgccccatgcttaccaccaacaccctgctagaccaaaccatgcaccacttccctggtgcggtccgcccagagacgtggccgtttactgcaaggatggggtgcaatatgtagagagatcagccaagaagggcgcgagcttcctctgcatacaggatgcggacgcagatcaggctgtgcatgcgagcttccgaggccagtgcttccttacggtgcccgggcttgagctcaagagcggctttatgagaatggcaatgcaccgctcatccaggaagcggatgacattcttgtggcgagttaagttggggaaccgaagggcacgacggggaagcaggccgtagaaaatgtgctggatgggttggatgcccagatccttgagcgatgataccgctttatttctgttgcattggcctcgataaaggcgtgcaccgaatcgtagcgctcgatgttagcctggacgacgttgtcaaaaatcacagtcaccacatgtgagacatacgcctcgcgatccatacgctcctggtccgtctcctcgtattcaacgggcgtctcatcctctgcgctatcctcctcacgagcaatatcccgcgaggcgttgtggtcgcgtgaaatgccactgcctacgcccaaggcgtacctccagatgacccctgtcataccactgaaaacggattcttcaggacacacagagaagttactcggagcctacgtctttcctgggatagattcgggaatcggaaccaatgcgcatgtaactgagcccccgtcttctgtatgtcttctcctcttcttcttttatgctaaaaaaaaattgacgcctttttccttcctttgaaacaacaacaataacaacaacaacaacaacaacaacaataacaacaacaactacttgatatcatgtctaccaacaacatgtctaccgatttcacatcattcgtgaatgattccggtatatttacagttgtccaagtgaaggaccaaacgaagatcaacaatcaactcaaagtctctcaattgaaggacatgtgcaacaagataatttcatttcccctcgttcctgcgtgcctcgcagaccctgtctgcgcaatgaaaaatgcgtacgctaagttgctcgaagagaaacccaaagcgaagaaagatcctttacaggcaatgcttctccctattgccttagctgccaccgctgctaagtctgctgctgctcctgctcctgctccttccgccttgcttgccctcgccagtgcccttgccctcccagaggacgaatgcatgtcggagagttccagcaatggcggtaaaaggcgccgcgccaatggttcaccatctgtggctcctactcctgctgcttctacttctgctgctgctgctccgggtgttgcttttacgtttactgctactgctcctgctcctgctgctgctgctcctgctgctgctgctcctgctgctactgctcctgctcctgctcctgctggctcgttctcaacgtgctccctgtcctcctccttggcctccggtcgtgttggtcgcgggtccgttctaaagaacgagcttcctgttggatccaatatagatgcatttaccatcgtggggtattcccccaccctggtctgcactgctgtcaccattcacggcaacccgtgtggtagaaaacaggcgatcttaagcaaccccaatggtgggaccttcacaactggcaagtgctcgcacctatcgtgcatgaaacagactcccgccaagcgtgaggcgtacctcgccaccaagcgacctacgcttgacgagctctcacttgagattagctccctgaccctttagtcagtcagtaagttagttagtcagtcagtaagttagttatttagatactcttttttttgatacatttttttagttatttagatactaaatatcacaatgagaagaagaagtagtgtcagacaaaggagaaggggctaaaacgtttgagaagcagaagatggtggtaaataacgtcaaggtccactaagtactgcactgtaacaacagtgtcaaaagcgcatccaatgtggctatagtgcaacctggaacctagacgtgaactctgctgaaccttcttctgcttctgataacgtggagcgaccggatgtgttccctcgcccccccccctaaaaccccagcttccggagaggcaaatgtgggcgctcaaccaaccgacccacatgggtcagttagcagcttacaattgttatcctctgggccagcttaaatgctgaaatacgggatgaagggacacgaaggattgggaccttgatacaaaacctttagctgacctacccaatcaattgggttcaagggtcaccggtaagggtgtcccacaaattctgtctctgactgtaattgtattcacattgtctgtgaaggtgcgcgttcccttgatccattcattcattcattatcgtgcccagggtcggctgagtcagcttcctctgcaaccacctccagctgacgcgtcccgtcgcccggcttgcgttcgaagacgtgcagcgtcgtcccgtgatccgtggattcgttctggcaggcacagatcaccgccatgaccgcctggtagtcgacgcagtgggggtcgactcccacgaatgacagggtatccaagccgtcggtgaagatgcggctcgtgttgccgcaggacttgccacaggacttgccggggaacgcgtcgtcgatgccctcgtaccgcatgaccctgtcccagagcagcgggtggtggaggacctcgggcgagaagccggacatcaggttcgggtggatacggatgcggtagcgacggcccgggacgaggaccacagacgtctccatgagaaaatccgaatatacatactggtacgacagggtctctttacacgaaatgggtagaggacacgaaaagcatggacaattcatttttacatgtaaatgatgcaattcttgcattctgagcatgtgtacatggattctgaaggacagcatttgatcactcttatctttgtaggttcgcattctccacagaatacgcgtaggtcagggtctactatttcgtattcatcgcctcccatgtattgctcgagacgcacacccatggctttcaatgtgtattgaattctgcgggcctttttcagccatttggacattgcagagtgcggatgctttccgttaatccagtatggcatcaagtagtccacgaacaattcttctccccgcttcactttccttgaggtgcataggtatacttcttccgtctcccccttcttcttctgtatgaattcgcagttgtttgagaatcccgtcacttctggatggatggcatcgtttgcgatatgtgccactcccttgctcagatcgaatgggtctggttggagcgtgagaacgtttggggtgcacgcgatctcaaatgcgtacgcatgtacacgtttactttttcgctttcccgatcgtgtacgcgaggacacattcgattcgttgatgacaggtcctgggtactctgtgagtggtgttccagtgggtagcgaacggatagcaaagaggcccctccctgctccgggtattttggatttactgatgcgtatataggatggtatctttcctgtatcgctgaatgctacgcgctcaaatgaaaatgggcgaacgtgttctcgcatgttgttacagttgttctcactgaaagatctattattccatttacaccataaaattgtaatgttgttacagttgttctcaaataaagtgggacacacccactaccgcatcaaggcggcacctgtcgagtcgagtcacagagagaccgacctctcgcgtttcgccgataagttcatcgaaaaccccaccaccccctgatactgatatgagtgaacacggccgaatagttcgtataagaagatctttcttacaaacaggtatggaggattttaaacggagagtacgtgtgtggcacgaaaacattcggatattcgaggatcatgtccctcctcgtgcttctttgaaagtttcgtacgatccttccttcgagtttgatcgcacgaaatatacgatgcggaccgatatccgtgtcatagacatggacacattagatgcgaccctagaccttataaagcaaggtatgcacccgctcgtcttgaacatggcggacatacataatcctggggggtgcgtgtcttgtggaggtgggatgcaggaagagtcgttgttccggaggacgaactaccatcgtcatctctcgaggtcgttttacccgatcggagaaagggaagccgttgtatcgttcgacgtcgacatcatcagggagtgcgagagagacggattcgagttcctgaagttttctaaatcggcatccttcttggcatgtccgtgcatttccatgccacagctggtggacaacaggttctcagagaaagacagtcaattgtttcgcgaaaaggtgagactcgtattgagtgtagctcacaagtacggacatgacagcatcgtattaggagcttggggatgcggggcgttcgggtgtccacctaaacacgttgccgagatcatgtttgccgagatcgaacaggtagaagggtgcttcaagaagatcgttttcgcgattctacagtcggcggaacagtaaaatgaaacatatatcagatggaaataaatgtacgacatcgccgttagaaaattggcgttaagaatggtcgctgacttgggtgtgttaaaaacttctgtgtttacgaacatcagtcgttctactctgtggaggtggaaacgctttggtgtaaatcgaaaacgacgtgaatttgtaagcaaactttttgagacgaacaaagagttgttgaaattgtttttattgtcaactcaatgcacaaccgcaagaggtgttgttgcatttttcaaaagtactcacaatgtacgattatcaactaaaacagtgtatcgtttcataaaactcattggttttacaagaaaaaggagcaaactccgtggacagtgcaaaggggacttagttccacttgtcaatgaattttgtagtaggtacaaggaaacaatcaatgctgggaaaattttagtatcagttgacgaatgtgggtttagtgagcgtctcaagccacattatgggtattcccctgtaggaaaacctgttatcgttaaaactactggtgggtgggtacaccatagtttgttgatggcagttttttcagatggtaggaaggagttcgttgtgaagaaaggatctgtgaagaagacggacttcgctgcatttattgactcattgagtttgtgcaataattcagtagtaataatggacaacgccagtatccataagaaattggtcctcagaagccccgtaaatatttgttacactcctccttacagtccagaattcaattctattgagctgtgcttcgctaaggtgaagaaggactttcgtcgattgaactatataccaaacgatacaaagacgcacgtgtctgatatgatttccttagcattcagcaacctcactgataaaatcattatgggttgttttgaccacgtatggaacacgtatgtgatgttggtataaagagttctgtgatgtataaattatgtaagatggcaacgaaacctccgacagtcgcgaaattgaaggagctactaaaattggccgaagtagcatactcatcaaaggacaagaaggacgatattgtccgtttatgcgaagacaatggtctcatcgccagaccccctccagaatacaagacggtggaaaagatgtgtgtcgtgaaatgcgccctgaagaaggcaatgagtcttgacgatgaagaattcggtaagtttagggagcatgtggatcagctcgtcaatgtggtgagccgcatgttgcggcgttccagtctggtgctgactttccatgtcacgaggctcatggagggcgacctgccgattcctaatatgtacgatatgaaggatacctactggaaggattggctaaggatcggagttgacggtgtcttcccagatgaagagagtagaatatcatatgaagccgtgaaagacgtaatcggaaaggtgcttggtagcgatgaccctgactacatcaactcctaccctatctatttcgaccaggttttgaactatgccggtcacacattgagcactgtcgtgtcgaacaacgcatgggttcctttggtacctcgtctgacacgcctcactaaggctactttgaatgcactgaaagctccgaagaccatccgtgtgtacgacgtgatgagggttatccaacaagaaatacaggagatggaatcttggccagagtctgttcaggagtatgtccgtgaagttcgagtcaggctgaaagttccagatggaagtcgactttatgatgactatggcaaagacatggacttcccgaccatggtccggttcaattattggatgcagacacggttggagtctattggtgcacgtcgtatccggttgatgcccatctttaatgtccaacgggcgcatgtccgccttgacatgaagaccctcgtgaacctattcaggcacgtgttccccaaagacccaaacatcgtcgagctttcaaagtggaaagatgtaaaggatcccgaccgcttcatgttgcctctgaagcctgcagttaagaagaaaaaatcatgtggtcctggtgaatgggaggcatacaagttggcccaacagaagtacgatgctgacgttaatgatatcaaggatactgacgagtacagacatgcaaagggtaggtatgacacgctcgtgaacgcccgaaaaacagtcgcaggttccttcttcaagaaaccacctgtcaagacggggtgggtgttcgattgtagcatctgtactgacggagtctcattgagcatgcagtacagcaagacagtacaggttcgtgtatccgatctgaagaagacaagtaagaggtctcgtgacgatgaaggtatgagcgtctcagaacagtatgaccataaactcaaaacgacattgcccgatatgggtatcgtcgttctgggtgtggatcctggtaggagcaacatcgctacagtcacgtatctggcagacgacaaaagcaagacatggaagcttacacgcggagctttttaccacaagtctggtatcaagaaacagaaaaaacagcaagaaaaacgtttctcagacatgattcctagatgggagtctcttcgtgaaaatggagcagcgttgagtacatccaggacagatgatatctcggcttacttgaaaaattacgatacgttttccgacgagtggtggaggatggcactccttcgcagagaatcccgagacaactttcagaggtacattggaaagcgcaaggctatggactcattttgggcagggatcaagcgcaacatgaagttggatcatcctgacctgagggttcgcgtagcatatggttctgcaatcacgactttgaaggctaccggaccaggagaggtagctgtgcctacgggatctatgttcgcttcctgcaagcgcctcttcaaagaggaggttcatgtgacagatgagttcaagacgactctcatgtcttgggaaaccggtgccaagaaggaatgtgtttacaaaattccaagtgtccaaataaccacggaagggcagattcgtctaggttacgagttgttgggtcacaccccattgaaggagactccaaatgtctcttatcgcgaccagttggcggtgagggtgtactgcacacgtaaacaaatccaagaaaaacacaggaggggtggcttagccccctctcttgtcgacaacaaatcgatcaagcggtaccctgaggtacgaggactgcgattctctccagaaaccagcacttactcggaccgggaccgctcctctgctctcacaatcgcaaggctgcactgcatggaactgttgggtcaagggagaccgcttccattttgcagggatgcgtgattgttgatgggctacaaaaaaacatgatggtgttccactgccccgtgggtcgctacaccataaggttacaccataaggtgtaccgtacactccaggaggcggtttcattttagtattccgtcgagtgtaggtaaaaacatctatttctttcatctcgcagaaaatgaaaaaaaaagtaggaaactttcggagggtacatcaccaaagtagcacagatgtcgtgatagcatacacgtcaacagtttatccacatttttcccccatttttgctttatccattcaatgatattaatcttttgctgtttatgctaaggaaatcatatcagacacgtgcgtctttgtttcattcggtatgtagttcaaaacgacgaaagtctctcttcaccttagcgaagcatagctcaatagcattgaattctggactgtaaggatgtgtgtaacaaatattgacggggtgactgaggaccaatttcttatggatactggcattgtccattattgctactgaattattgaacaaactcaatgattcaataaatgcaacgaagtccttcttcttcacagatcctttcttcacaacgaattgtacaggagcagctctacagagatcatggcgcacaagttggtcgtgtacgcgttggttgagaacaagttcattcagaaaaatgagatcgtcgtcaaggttggctggacgtcgaagccctttggtaagcgactttctcagtacccgaagaactcaaagatgatcttcgaaatccacgtacttaatccgcttgcttgtgtggagtctgagactgtcctgatccggtaccttcgaggagaccctagagtcaagccccgtcgcgacgttgggtacgagtactaccaacttgacgcaggtgattcaggtgccgtctttcaggagatggccgatgtcgtattacagtacgtggggacaggtggcgtcgacatgtctatcaagtctgtctcagaatacgacagccttgattgcggcaccgaggacgtgcctccagaccccccccagctttgccgttgttgagcgagagaaggaacgcgagaatgagcgagagaaggaatatctattatgtgccctgagctgcttcttccccattcgacactacgaccatcatcccaaatctgatgacggtgttcgacgaaaagctcaagggaacacagatgttctgcggctacaacatgatgtgaacaacaccgctaggctgttcagccatgcatcgtgcggcgttcgcgacgggtgggacctgcgaaaggtgtccaaggctgtgaagatgatcctgaacgccgtgggtctggatatggtgagcgtgaacaagcgggtgcaggtcaagggaaagagaacttaggaggagaggaactacctcctgtgccctgagagtgtctgccgtatgctcgagctcgtgaaacttcgtcttctgagcactgacctcacgccgcagctgccctttcgtgacaagagatgtccatgtacagctctccggatgctggagctcttgaaaacttcgtcttctgcgcacggacctcacaccgccgcagcgctgccctttcgggtcacgatatgtccatgtacagacagtccatcggcaaacaacggattgtattattcaacaagcggcggagcccctttcacctcttcccccagcggacccccctcaaaggagtgtaaaaacaacgcagaagaccatttaactaaccttattatcctcttcacaaccagaaagacacaaactatacttaaacaatagaagagaactgttggaactgagtttattataacttttccaatttcttagctttattaaaagtcatggtcacacaaatgatcctcgcgtgcaacgggagtcataacgagatcgcgcgcatcgcgaaacgaatacttggaaaccgcatcgctgccgccaagagcacgaacggaaagctattatggtacgtattcgacgggcgatggaagacggacgtcgacgcgatccacgtcaagcacgagctgtccaccgttgttctagagcacttcattatcgctatgaacagggagagagcgtcccaaagcgattacgacatgcagagaaacgatgagagcacaaaggacgactccgccgacctagcgcacatcaccgcgcgcctccaggacgcgaccttcaagaacaacgtcctgaaagagatgctagagtacttttacgaaccggaagttattaagaaactcgacgccgaccggctagcgcacataaccgcgcgactccaggacgcgaccttcaagaataacgtactgcaagagatgctcgagtacttttacgacccggacttcatgaagaaactcgacgccgacccaaacctcttagggttcaacaacggcgtgtgggacctcaaaaacggcgtcttccgtcaagggcatccggaggacatggtctccatgtccgtgggattcgattacaatggcgcagtgtgcgcggaatcagcagaccgcgtgaggaaatactgggacacgatgcacccagatatataccaacgagaatacctcatccacacatttgctagacagctgtacggagacagcggacaagagctctttcacatacacgccggcgccaacgcgtccgcctctaacgggaataccaagttcttcgaagtcatggagatcgcattgggcgactacatccgaaaaattcggcgtggaaatgctgacaagcaagcaacgcaacgatccaggtcgcccgatgccagaggttgcgacgtggaagggggtcccgcattatgtattgcacagagccaaaccacgacgaagtcttaaattccggagtcctcaaggatatgacgaccggtggggaagccatcaccaccggtgttcactccagcgacatcgtaagcttcatccgctcgcaacacaagaccggtggggaaggcatcacccaccgcctcttgcactccagcgacatcgtacgcttccgcccgcaacacaagatacacatcatgtgcaacgccccgccgatggtcgacggttctgacaagggagtccaacgacggatacgaaaactcgactacatcagtaggtttgtggacgcggatgaggcggacgccgcaaaattcctcttcccacgagacgcagggcttgtagaggcattcaaggcagacgacggagcgatgcgcatggagttcctacgcacccttctacacgcgtttgtatacgagtacaagttcgatatgcccgattcgttaaagaagaccagtgcgatgtacttgaacgcgaacgacgacgccttggctatgttcgtcgaagagcacgtctctgcggccatcccggccatggttatggacctggaacgtcacctaagagaagagacggacacggacctggtccttctcctacagcaagagacggacctggaacgtcacctgattaaacgaaaaactttgagagggatggtgtaatcgataggggggatctctgccctcgcggagtgggtcaggagaatttagttgcagaaaacctgtcaagtcatcatacagctacagtcaacggaagaattacaaaaattgaaaagcttcgtggtcgcgaatgtgtaaactacgtcggcggaacagttagtaaaatgaaacatcccagtgggttggctacaccatttggttacccgttaaggtgtgccgtcactcaggaaaacggtttcatttagattccggtcaagggtagggacatttgattgtggggacaccttttagttgaaagttgattattggtataaggaaatgttgagggcaataaaaaacccacaggtcaggtagcagctacaatgttatccctgggcagcttaaatgctgaaatacgggatgaaggacacgaaggagtgggacctgttatacaaaacctgagtgacctacccaacaattagttcaaggccgcgtcagcttagctactggttgtaccgaggttgagacctagggtgacgacaatgtcggcactttgtcttattcacacaaggaaaagagacatttattttaacatcaggccagggtcttttaacacgcatacttttgttgagtagttagaaaatttggactgtccaactgacacagtaattatacttgacaacgttgcttttcacactccaagaaggtcacaacacttgccagcttcaagggggtgggtgggagctcctattacactcctccctactcaccttggttcccacccacccaatagaagggggttctcaatcgtcaaacgcgatttactgaaataaaagccaagatgtgttataaggctttgagtctgtaaagagaaaacgtagaggctttttttgagagtcatgatacaatttcttgaccttgatacaaggaaggaaatgataatgtatactaaatgggagacgatagtcaataaagcgcacggcaagcgtacgcgaccaggaccgggcggcccacaataaggacaggaaaaacggcggcgaggaggaacgtggttaaagtgtacacgagtcgaatcatagcggataaggacaaaaaggacgttcaccaaggtgattaaggagagggtccgacagcgtattccaagaggattatttgacggtggcggtgaaacggatcttaaaagaagtcttcgaaggggtaccagatgcgcaacttcacacttgtaagtgtccctagcgtcgaccagaacttcattcggcagctgatggatgggttcgagacaggcgctaatggagacgaggggacgccacagtcgaaaggttctgtcacaacaactattggtttagggagaagatgaggtggcgcgaaggtaattgtgaaaaaagaagaagcaacaattacgttgggtgcatcgctcgctacggatggacgatgaaacctgtttacagcacgcgtcgaagaagtacctgacaattcaataaccactacagagtacattatctcaacatggatcacgcaagtcgtttactcgaagggaaaacaggatcttggccagagttcaaagctgagcacggcattgagagacgtattccaccgattactcctacgatatccactcttggggagtaaaggaagacctcatagcgatacattctctccttacgacggcgtaaggcgaacaaagagatttgttgctgaagagggttcagcactcgatcctatcggacaggacgagattcaacgacagtgttaagagcgttccaacaagcgccaagatgatcggttaaacgtcttatcaatcgtacctcgggccacagaggcgagggctacgccacagctggttcaacatcgctcccatccaaacagtcaagcactccttaatcacgatagacaacgacggcctaggggagtcatcaaggaccgtgggtctcgtcgagagtctcgaaaagacgctgacgaacaaggagcactgggagtcggtcttcgatgtggaaaacatccgttctactgggaaaggtgtgtttacatgcaccatagacactgacggcgtaatggcttgtacccactttcttagggccgagaagaaaaagatttcaatcaaggacgacggaacggcgattaagaagcagaccaagggactatatgagagttttccgagtcgaacccaatgtggtggtcgttgcaaacgaccctggccgctgcaacattgcctttttgacttggaagaaaaataaggtcaaagaaaaagataaggggggtaggaagaggaagaggcactgcgagttcgggagcaagagactcacgcgggagagcggtaagacgttggagaggcggtcttcaaagtagaggtcacgaccaaagaagnnnnnnnnnnnnnnnnnnnnnnnnnnnnnnnnnnnnnnnnnnnnnnnnnnnnnnnnnnnnnnnnnnnnnnnnnnnnnnnnnnnnnnnnnnnnnnnnnnnnnnnnnnnnnnnnnnnnnnnnnnnnnnnnnnnnnnnnnnnnnnnnnnnnnnnnnnnnnnnnnnnnnnnnnnnnnnnnnnnnnnnnacgtcttctcaagtccgaaccatcttctttgagcgtccaatagtccgggcatgtcgatacgctcatgagtcgccgtgtgtcgaacgcggtttgccctcattttctttattctcgcctcgtagttccagacggccagtagtgaaactattgacaatgcgaaaagaccaaagaggaccgttgacaagaataacttgtactcggtaaccttttcgatatactttttgcttttgaacaaggccacaacaacaaccgcgaataggaggcagcatgtggcgaaaatcaatgtgttcatgtacaagttctttggctttttgtcatcattctcgtaaaccatagttgacctcctgcctcttttttgtatacacttgttctaaaaaaaaattgggacaccctgtactgtaatgtgaatgatatcccttgaacgaatgccaaagcatctaaaaagcagaccagtgtacccaaatgtgcagccccttgggttagccctgtgggttaactgaaggtgagaggggttgtgggcttgcttgtcacgcttttcagggagttcatgcagcagcaagaagggctggggggggtgtcatgaatttgtatgagggttaaatgcataaggtgtcccaatatcaaatgtccctagctgtatgtttcattttactgttccgccgactgtagggatgaatactgacaagcagtctgcagttgatgcggctgtgaaggcagtccagcaacaggccgaggctgaaaagcaggctgcagtttatgcggctgtgaaggcagcccagcagcaggccgaggatggcaagcaggctgcagttgatgcggccgtgaaggcagtccagcaacaggccgaggctgaaaagcaggctgcagtttatgcggctgtgaaggcagcccagcagcaggccgaggatggcaagcaggctgcagttgatgcggccgtgaaggcagcccagcagcaggccgaggatggcaagcaggctgcagttgatgcggccgtgaaggcagcccagcagcaggccgaggatggcaagcaggctgcagttgatgcggccgtgaaggcagcccagcagcaggccgaggatggcaagcaggctgcagttgatgcggtcgtgaaggcagcccagcagcaggccgatgctgctaagaagttgtggggcatgatgcgcttgcgtgaggagaataaggatgctcagttccagcaggagcttactgagatgttcaacaaacttgaacgcaaagagtgcatcattcggaaacatgaagcaagcatcaatgccatcaggtgtgtgctgagaaaacgaatgcacgttgctgtttccagacgtgcggcaatgcgttttgcatgtggtgagcaatttcatcatcaaatttcattttgccccccgtagggagcgcgcacttggatgtgacgaagttgtgtgtgcgggaagaagggcttactcatgcgcagacaaacgggggcagattcgtcaagcaggcggacacgaagcggtttcattttagtattcagttgactgtaggcaactgttgcacctttttccacgaaacgcggaagcgttcaggggcgaagatgacgagccccgtaccggaccagtgacctgacgagctgatgttgtacttggtctgcttgatgtcgtcccaaaaacgctgcatgtgttcgttcaagtgaatgtcgtccactatgaggagtccgtcgaacttcgcctcctccaggaccttgaagatatcgcgttccgatttgcccaggtggtcaatgtcgagaatgacgaggtctgaggttcgcaggtggtcagggagatcgcgcatgtagttcgggccgatctcaagacgtacgttggggatgtggatcgcggtgggaactgacgggtctgaaggtagggaagatataaggtcgaagctgcgcaccgtcttctcggtcgctaaggatagcgcagcggctgacaaaccttgaaagtgcccgatatcgatgatagtgggacgtcggacggaacgcgcaacatgtgcgagtaatctgtagtgctcctctccggcagaaaggtcaaagaacctgaaattggatgaccaccgacatactgagttcacactagaaaggtcgatcgcgttcaaatccgtgggatcgaggacgatatcgatgatctctgatgccattatttatcgtgaccgctttaaaaccttacagtaaagtgggacacacctttttatactctaaaaaactgcagatcgttgcttttgggcaatgttggaggagtgctggacactgtcagatttcgtgcagcgtagcatcgactttgtcgagctcaccttgattcggacgtgcattccacttgcgactgttgacaagtggattgatgtgtaaagcgtctcgtgtgaaaaacggggctgttcactgttttttggagatcgataaatgattgtgtgattatatctcgctggtactgtgtgaaatacgtagcatcaattgaaattttgatattatgtaaggccgatacagtagttctcaaataaagtggaacacaccttataatcgtccagactgcagatcgttgctttggggcaacgttggggggtgcagcaggttgaagaggttctcgaagatattccgagtagcctctttggtaaaccgttcaaccgtctgtgtccccatatcagtatcagggggtggtggggttttcgaggaacttctcggcgcgtctcggcgaaacgcgagaggtcgctctctcccaaagacttggtggagtgtaagcatcaggatgttcctggaagcgttcacatcgcggtcccaagtcttcccgcagtggagcctaccaccgctctggtggcgtggcgctccgctttgactgcttttgcagtggagaatcttgtgaatccgcttgcgtccttctgtacatagtgacgattgcgatgtgactgtgtgtaaattaccattttccgaataaccgcaaatcagttatatttgccaacgatacatttgttttgattgtcagtctgatcctatcatacagcacattatttccgggagaattcacaacatattggaaataattttgtaccttggtatatgtacctagtagttcaagcgtcgtttgccctggtcgaataccatggataacgaatgtggtaggtgtcctgttgaatatggtattcgttgctgcgtttatgccaatagacttcaagtatattccgaaaggaagttgcagctgtaaccagtcatttagagtagagctggtcgggacgtctgttacctgccataaagaggagaacacattgtaatcaaaggcctgccatgaccgcctcgttgctacctgcctcgacgaggtcactgtgtatgtcccgttaccataagcgtatccggacagagtagtagtgtaccctgtgagtttgttcaccgggaactcctgtatactctgagacatagggactgttacctttacatctggagattcattcatcgtcaaatagctccagaatgtgactgtactagtcaatgtggaccaaaaagctgcatacacggtgtctgttcctgattggtatgcaagccaggcattcttatacgggaattccatatctgtctgctgcgttcctacctttggtatttccacgctgcaatacaatgtgtttgtctgacccccgtcgctcgtaaacatcttgaaagaatacgacgcatcgttattcatgatagttggtttcatggagacaactcctgccgttgtaacgtgcaggtagtgctttgtcgtcgtttcttgcaacgcgtagcacgcaacctgtccgctcccgtcaaaaatactatcccctttcacgatctcgaactgcatttcggtaccagtgttcagccgcaacttcgatgtcgcagagtcgtatttcacatacactccattcatctgtaacttgaactgccaggggggggctgctttacgcgctcccctaaaatccgaaaatgctatcccgttcgataatgaatcaggcaccttggagttccctgtaatgttttgtacaaccgggcctcctcgaaccaaagagccaatattggtttttcctgtga

SEQ ID NO: 180 - DNA, 22397 bp, unidentified
  misc_feature 1..22397: note = Fanzor polypeptide
  source 1..22397: mol_type = other DNA
aacacccctacgccggcaggtgctgcgactggaaagaaggtgccactgctgtgccccgttggctcttcccacagcccacgcatgagctttatgcatgtgtacttcccgctgctctgctcaagcagcacctcgttgtcactagctgcaccacggatcagcaccttgcctgttatgtggtccaccggaaaagtgcgcttgtaggttccagtgcctttgatgacaatcggcttttcagcagcagcctgcttcagcatgtcccagttgccctccatgttgctgcccatgttgttgatatatctgtagtgagtgggaacgcggacgaagcggtttcatttaagtattctgtaaacgtcctaattacgttttttatctcagaaatgtcggtgagaggcgttggtcagacagagaatccatgattctcaggatatgccagacacattgtaactcgatgtcttaagtcgctgactcacacgcatgatgatgcatgcatgggcggcttgtgtgctcttgcgcgtgcggggaaaacacatacacgcggacttttggggactcatcatgtaacggtcaacagattgaaacatccgggtattagcccagaaaacaacagaacgtcagtggacatcgtgagaggaagtgactctcgcgcggttggtcaacttttcaaaagcctcaaaagacaggggtatattctaaaccctggctacagttgttctcaaataaagtgggacactttataatcatccagactgcagacaagacatcggatttctttaagattagcgatgggtgcgtagaaagaacaggctttgcgttgttgcaatagattcaaatctttgataaatcacatggcaacttttgacaagaaaaatggttacaccgcaaggtgtgccgtacacgaagcggtttcatttaagtattccgttgactgtaggggtccagatacagagggaagggaagggaaggggcccacttgcgagtacctgatggaatgcaaccattccaattcgtatccacaacggaaccaatgacccatgatgttttttagccaagcctttgctccgtcatacagtttgtgtttgtctttgtcagaaggttcttgcatgttgtttaatgtcttgtgtaattcacgaaccatctgaaacgagggcccaattcctattgaagatgcaacggcgggagtcgtttcctcgtcagtgcaagtaagttgaagtatggtattttcaaacatgtaagcacctcggcgaatttgatccacccatattatagccaagattatcctgccatcaaatgtttgtactgattgtatatttgcacactccataataatggaatgctttattattttgtctctagccatgacgcaccgatataaatcccccaaagtctgcatgtatgatgtgttttttctgcttctccttttatcttagtctggttttcgaataaaaaaaattgctgcgcatacattcattcacattcacgacgaattcgaggaccagcgcgcaccaatctgaatggaggagcgcggtgcatactgattactgaataccacgagtagactcctgcttgacaactcagttggatttatgaacgggaggagcgcgggcaccgtgtagcggtgcatatggattcagctgatgactcgctaggattaaagcaattcacaatgaagatcttctacagtcggcggaacagtaaaatgaaacatatatcagatggaaataaatgtacgacatcgccgttagaaaattggcgttaagaatggtcgctgacttgggtgtgttaaaacttctgtgtttacgaacatcagtcgttctactctgtggaggtggaaacgctttggtgtaaatcgaaaacgacgtgaatttgtaagcaaactttttgagacgaacaaagagttgttgaatttttttttattgtcaactcaatgcacaaccgcaagatggaattgatgggtctaggacgacctcttccatttgcccacagcagctctgttgttgttgatgaataaaaactcgtattgttgtagacaccactcggtccccctccggtggtcgcgacaacattaggttacaccgcaaggtgtaccgtacagaaagcggtttcattttagtattccgtcgagtgtaagcgtacgccgaacaagataagtaaacgtgaacccttggttgagcttgagcccttcatgtcagcgccaaaagtatacctcgatttatatgaattttggggtgtatacaacacttgtttccgacctgaggatggatattcatgccacgaagtgttcgtgcctgatgttgactgtgcgattggtgcgggcggtacaatggaggaggcttttgcagctgccaaagaaaagctgactgacatggtcagtgatttcatgtatcgcggcgaggccatcccgccgccatcactcccctccgacatcatcaaccgcagacagcaggacaacgagcaatttgccggcttcgtggtcaccttcgtcggagtcgtcattgtttccaccctgccaagtttatgtgacaaggcaggccaaccacgtgaactgctgccgtgccatgacgtgtgaacaccatcaatgacatagttcgatccgccatcgatcccgacaaatatgccgtgatgccccaccgtctcatcccaaaccgcaatgtgatcccccggctcggccttttgtgccagcgtatcgcagtcgcatttgtcacaagtggcaaaataactagcagacaattcgttcaatgtccatctgcactgctatgccaccatttagatgtatacgccaatgtcaagctgatggcttattaaaaaccgcatgcgaccatacacaacaccgagacgcgacattggaaatgcagtgtaaacacaatcagatacacattttacacacttacacatttaccaacatgaatcctgcagcctccggcaccatgtccatgagctacttgaaacgccatgtgtacgagttgaggacgtccatggatccgaacatcgttgtcaagctccagagcctcgatcatgacatggcacgcatatgggttgagaatgcggagggcgtttgtgtggacacacacgaggtcagtgtgcatgaggcaactggtgaggagcttacaatcaccaatgaggctgttcgcgtggagaggtcttatatcatcaagattaataagtcatatgtggtgttgttcatgggaagcaggatcctcaagattcacaaacagcagcagcatgcactgttcacagcgaatggtgctgatctgaagcgcatttgagtgggtagaaaattttgcctaaaggggccacagcaacctggggcatcgccgcgtcgagtcacagagcgaccgacctctcgcatcatgacggaacctgtgtcgagtcgagacccctggcaaaaacataggggtgatatgtattcctaaatcgtttttttagaacccacaacgaaacacagtttagcgaggacaccgatgaatacatcgacagccaaggcgacccatgcatgtctttgccagcgggagagcgcaaggattgcaaacaataggtataacgtgccgtgaacagggcgaagtttcgaccaccagatcttcccgccatctggcgccacctctatccccgttttccgaaggcctccaaagtatatgacaaagaaccctattgctggcacaagggccaagacgcccatgtaccttagatacataggtgtcgcgagaaaggcaagaatcacgaaagctgtcctgattcctatgcacccgatccagaaagctatttgtcttgaaatgttgttggccatcgtgttataatttaagttttgttttttgaggaagatttcaggttgccttgttccacatgtacctcgaggaaagtggggacagtaaagtggtaattccaccggcagtagtagggcacatcaacaaatatcccgtagatcccgtgttcttttgtgccacgggatctttgccgcccgttcctcaaaaaacgatataaatgaaatatgctgtgttcggaaaagcgtactccactctggtaaaagacgtcaaccatgtggaccactgatcgacacttgtacacttatccattctgccccaaatggcacggtttatttcgatttaagcaggaggaagggtgcaatgacgatgactttccattcgaatacgtcctggcgcttacggagcgagttcctgaaatcgaaacattgagcatggttgcgtacagcgaacctcagatcgtgagagtccctcgggtcatggtcgacacgctatgcgaacgacaactgcacgacaatgtagagatgcattgtcttcacgaaatcgtcgatgcgttgactgtcgcactcgaacgtttcaacggcgactctgatacgcactccaagtttcaaacgatcaagcaagacttggagacagcgatatcgaacacacaggcgtcgtgttcgaaaatgcgcatccttcttcggaacaagatgatgaagaaagagctcgtcgaagtcgcgtgggctcctgaacgacatattccctggtgcctcgacgaagaagaaaaaaatgggttgtaacacgattcacgtaaataagatgtacagtatcatgaaaagtcaaagtgctcacgatgtgagcattaataatattttcaaagcgttcctgtaatcaaataaacaccccccctgattgtgcgccatacgtttgaatcatcatgaatttattgctgtgatattgcagagcaatggatcccccgactcgcgagcaagtcgctaagctgcaaaactgttattgggacgtcctggaggagaacgcagagttaaagacctccgtactggaaaaggatgagctcattgctcgcttgcgccggcaactgaacactgctaaccacaaggtggctaagctccaacaactggtcgacccggagaccttgcctctacagtcggcagaacagtaaaatgaaacatatatcagatggaaataaatgtacgacatcgccgttagcaaattggcgtgaagaatggtcgctgacttgggtgtgttaaaaacttctgagtttacgaacatcagtcgttctactgtgaaggtggaaacgctttgggtaaatcgaaaacgacgtgaatttgtaagcaacatttttgagacgaataaggatttgttaaaatcgttttattgtcaactcaatgcataacctcaagaggcgttgttgtttttttcaaaagtactcacaatttaagattatcaactaaaacagtgtatcgtttcataaaactcattggttttacaagaaaaaggagcaaactccgtggacagtgtctgtcgctgctagggacagaagggcagagcggaagcctgtcaatccagacaaggttgcaactgcctccatcgacccaggcgtccgaaagacaatggtcacgtactcacctgagaatgaggaatccttcatgcttggtcagggacaggcatccgaccttgtcaaactcctgctggttcatgacaagctgcagtcaaggttggatactgagaaaaccttacgatcaaaagagaggatgaagataaagaagctgatgattcgcattcggaagacaattttttacctcaagaaagaatttagggaccagacaacaaatttcttggccgctcgctacgatgtgttgttggtacctcaattggagacggcgaagatgacaatcagtgctgaacgggagctgacaaccaaggttgcccgtcagatgctgactttgagccactctgtgctgttcaatcggctgaaggagaagtgtgaagagtacgggacagtgttcttgcatgtgcttgagcattacacaagtcagacatgccctatgtgcggtttcttgaacaagtgtggagagacatacacctgcaagaactgtcaattcacctgcgacagagacattgtgggggcagctggcatcttcctgaaggctgttcgaacagaaaatccctgttcgtaaaggacagcatcccctggggagttgacccctatgatacccctatggagaattcgttgtctttcttactacatgtcccccgggcccccggatgtttagtaagaaattcataggttcgaggatatacgggtagcttaaattcaacggaagtgtagttcatctgatctggatgtagtccaaagatgtcaacatatatgagggctgtttcgatgtcacatggaaatgtgtgactcatgttacaaattgcctgcaagaaatgactttccttatttaccaacaatctccctggttctccagttgttcgcatgtgaggcagatcaatttctatgtctttgaagtcttcacagatctcattgctcagactcacaggtatattatagcattcttcacgtgaaacaactctatccacatcagcaacacgttgagtggatgcttgaattaccatgagacatttgtccatatttgatttttcatacaaaacgttctgacgttatccgtgggacaccctttatacaatttggcgagacgtcggagtcatctgattaagatcacccagatgtctgagtttttgtaacattcataccaatctggatggtgcccctcaagcgtaagccacccctccgtacgaacgaacacccgcaaacggaggaacactgacgacgacgatcgaaaaacatctgactccacatgcaaacggcggaaacatgtcatcgtctccaaaagacaccaccgcggattaatgtgtgtcgcgtctttcgcaacctcattcactatggtccggtcatccaaagaaaccgtattgtatcaagaaggctcctgcttaagaaactatgggaattcttaaggggggatagcgggtcccgcggaggggggacagtggaattgagctgctgactcactgacttatcccatgtggcaccatcaagcaaggaacccagctgcggcttggatgttccgtatacaaattcaaaaagacccatcttaagaacagaaaagaggtagtataattcaaatataaaaaaaaggtttgttgaaattttattgtcaactcaatgcacaaccgcaagaggtgttgttgcatttttcaaaagtactgggcgttcctgcctcccggccgattttgactgatacggttctcatccaagtgttggcaacatatatcacttgacaagcatgatgttgattgcttgaattttttcatgtcatagcacgcattgttctttctcatcagcacaccatacatcggaaatcccttgtgaatgtaagcctcgtacactattcccacgatacttgttgtcttatccaagtcgttgtacgttgttgggttgtctacggttacaatggaccctacagtgtacgtgggattctggtaaggtaagcaatccatgtctgaagatcgtgttttgaaatatacaatataaaccctaaacaattatcagcatggaaagcgcgctacgactcgatagatgacattgactgcagccgggtaccattggacgcatacatgaagaacagaaaccagtgatgcgagagcaagtgtggtgtaccatccaggttggcatgtatgttatgaaaggggaatctcgcccccctgtagtggggcagtggaattcacgaggagcatcttcactccaggttcacgatgatcttgttcatggttgtcatcttgatgggacaaggatgcaccgccatggaagaccttgcccctcaggtgaacttcaaacatttcaagggaccgtttaaagttggcttctggttggaatgcggtggggttcaacctttgaatgtgcttgatcgcatctgtcatcgtaatgcatctttcccacatcagataagcagcaacaactgttgcagaccgttgtcttcccaacctacaatgtacaagcacgacattgttttgacttaacactccatgcatcacctcaacaatatatggtagataggatatgagtttcgtgacctctttttgcctgcagttgtcttcaacagcaaccttaatgtatgttgtgtttgggttccttggttttatgtacggtgtgtggtttgtgcagttcacaacaagcttgaattgcaacgttttacaaagttggtggttgagagctgcttcttggtctgataggtaaagattgtcgcacactttgaacaagttatcgatatgcatcttattgagatcagccatattcttgttaatttcttatgttagccggtcctgttaatttcgttccgactactgacaaagtaacaatgccacaatcagcaacaacactcgaatgagtactgccagctacaccagcttatcacgctttcagccaattcccgagatggagagtcttttcagaggtcttcgggggtgcccatttttgtactgtctgtatgaagttattcaatatcagctcggtatgagcgcagattgactccggatggaaaagggttccccatatccgtcgtctcttatgtcggaacgctacaacacgttggtcatggacctcatcgaggcaaatcgggcgcatgcacggagctagatcagaaattgagtatgcagcatagaagtcagcctccaatttcattggaaccccctcaacgagcccagtacgtgccccaataattttgatgccccgtgtatggtgtacggcggcacctgtgtattcgagatgaccaccaaagtataagttgataaactgggcaccaaagcatattccaagaaccggagcaccatgtctgagggcaaaggtgttcatcgcatatctgtcacgacctatgtcatgcacgtgcaattgcgatcccgtgaggatgaacccagaaacttgctttgtccggcaaatctctacaacctctgaaagagtacgtgcgatcgcatgaccatgcctttggcgcctaagaaaagataggaggtactgcctgaaaataggcttgggaccgattgtattgtcaatgacaacgagcattttacaatagaatatataatacactccagaaagcggtttaattggtgaatagatacttgttcaaatgcattcgtgtggcggaacatgtgttgagtcacagatcgactttcgcatcaggagctgatcctgggcgtcgtcctggtcgtcctcgggggcgtcaccatcgccaagacgctcctcggctacaccactgttcaccctacagtcggcggaacagtaaaatgaaacatatatcagatggaaataaatgtacgacatcgccgttagaaaattggcgttaagaatggtcgctgacttgggtgtgttaaaaacttctgtgtttacgaacatcagtcgttctactctgtggaggtggaaacgctttggtgtaaatcgaaaacgacgtgaatttgtaagcaaactttttgagacgaacaaagagttgttgaaattgtttttattgtcaactcattgcacaaccgcaagaggtgttgttgcatttttcaaaagtactcacaatttacgattatcaactaaaacagtgtatcgtttcataaaactcattggttttacaaggaaaaggagcaaactccgtggacagtgtaaaggggacttagttccacttgtcactgaattttgtagtagatacaaggatacaatcaatgctgggaaaattttagtatcagttgacgaatgtgggtttagtgaacgtctcaagccacattatgggtattcccctgtaggaaaacctgttatcgttaaaactactggtgggtgggtacaccatagtttgttgatggcagttttttcagatggtaggaaggagttcgttgtgaagaaaggatctgtgaagaagacggacttcgctgcatttattgactcattgagtttgtgcaataattcagtagtaataatggacaacgccagtatccataagaaattggtcctcagaagccccgtaaatatttgttacactcctccttacagtccagaattcaatgctattgagctgtgcttcgctaaggtgaagaaggactttcgtcgattgaactatataccaaacgatacaaagacgcacgtgtctgatatgatttccttagcattcagcaacctcactgataaaatcattatgggttgttttgaccacgtatggaacacgtatgtgatgtttgtataaagaattctgtgatgtataaattatgtaagatggcaacgaaacctccgacagtcgcgaaattgaaggagctactaaaattggccgaagtagcatactcatcaaaggacaagaaggacgatattgtccgtttatgcgaagacaatggtctcatcgccagaccccctccagaatacaagacggtggaaaagatgtgtgtcgtgaaatgcgccctgaagaaggcaatgagtcttgacgatgaagaattcggtaagtttagggagcatgtggatcaactcgtcaatgtagtgagccgcatgttgcggcgttccagtctggtgctgactttccatgtcacgaggctcatggagggcgacctgccgattcctaatatgtacgatatgaaggatacctactggaaggattggctaaggatcggagttgacggtgtcttcccagatgaagagagtagaatatcatacgaagccgtgaaagacgtaatcggaaaggtgcttggtagcgatgaccctgactacatcaactcctaccctatctatttcgaccaggttttgaactatgccggtcacacattgagcactgtcgtgtcgaacaacgcatgggttcctttggtacctcgtctgacacgcctcactaaggctactttgaatgcactgaaagctccgaagaccatccgtgtgtacgacgtgatgagggttatccaacaagaaatacaggagatggaatcttggccagagtctgttcaggagtatgtccgtgaagttcgagtcaggctgaaagttccagatggaagtcgactttatgatgactatggcaaagaaatggacttcccgaccatggtccggttcaattattggatgcagacacggttggagtctattggtgcacgtcgtatccggttgatgcccatctttaatgtccaacgggcgcatgtccgccttgacatgaagaccctcgtgaacctattcaggcacgtgttccccaaagacccaaacatcgtcgagctttcaaagtggaaagatgtaaaggatcccttcatgttgcctctgaagcctgcgtttaagaagaaaaaatcatgtggtcctggtgaatgggaggcatacaagttggcccaacagaagtacgatgctgacgttaatgatatcaaggatactgacgagtacagacatgcaaagggtaggtatgacacgctcgtgaacgcccgaaaaacagtcgcaggttccttcttcaagaaaccacctgtcaagacggggtgggtgttcgattgtagcatctgtactgacggagtctcattgagcatgcagtacagcaagacagtacaggttcgtgtatccgatctgaagaagacaagtaagaggtctcgtgacaatgaaggtatgagcgtctcagaacagtatgaccataaactcaaaacgacattgcccgatatgggtatcgtcgttctgggtgtggatcctggtaggagcaacatcgctacagtcacgtatctggcagacgacaaaagcaagacatggaagcttacacgcggagctttttaccacaagtctggtatcaagaaacagaaaaaacagcaagaaaaacgtttctcagacatgattcctagatgggagtctcttcgtgaaaatggagcagcgttgagtacatccaggacagatgatatctcggcttacttgaaaaattacgatacgttttccgacgagtggtggaggatggcactccttcgcagagaatcccgagacaactttcagaggtacattggcaaacgcaaggctatggactcattttgggcagggatcaagcgcaacatgaagttggatcatcctgacctgagggttcgcgtagcatatggttctgcaatcacgactttgaaggctaccggaccaggagaggtagctgtgcctacgggatctatgttcgcttcctgcaagcgcctcttcaaagaggaggttcatgtgacagatgagttcaagacgactctcatgtcttgggaaaccggtgccaagaaggaatgtgtttacaaaattccaagtgtccaaataaccacggaagggcagattcgtctaggttacgagttgttgggtcacaccccattgaaggagactccaaatgtctcttatcgcgaccagttggcggtgagggtgtactgcacacgtaaacaaatccaagaaaaacacaggaggggtggcttagccccctctcttgtcgacaacaactcgatcaagcggtaccctgaggtacgaggactgcgattctctccagaaaccagcacttactcggaccgggaccgctcctctgctctcacaatcgcaaggctgcactgcatggaactgttgggtcaagggagaccgcttccattttgcagggatgcgtgatggttgatgggctacaaaaaaacatgatggtgttccactgccccgtgggtcgctacaccataaggttacaccataaggtgtaccgtacactccaggaggcggtttcattttagtattccgtcgagtgtaaacggaacagctaatgtacgaattcactacgcatccgtctcgtttctaaaaaaatgtatcaaaaaaaagagtatctaaataactaacttactgactgactaaagctggctgagggtcagggagctaatctcaattgagagctcgtcaagcgtagctcgcttggtggcgaggtacgcctcacgcttggcgggagtctgtttcatgcacgctatgtgcgcgcacttgccagtggtgaaggtcccaccattggggttgcttaagagcatctgttttctaccacacgggttgccgttaatggtgacagcagtgcagcccagggtgggggaataccccacgatggtaaatgcacctatattggatccaacaggaagctcgttctttagaacggaccccccgcaacgaccaacacgaccggaggccaaggaggaggacagggagcacgttgagaacgagccagcaggagcaggagcagcagcaggagcaggagcagcagcaggagcaggagcaggagcagcagcaggagcagcagcaggagcagcagcaggagcagtagcagtaaacgtaaaagcagcagtagaagcagcagcagcagcaggagtaggagccacagagggtgaaccattggcgcggcgccttttaccgccactgctggaactctccgacatgcattcgtcctctgggagggcaagggcactggcgagggcaagcaaggtggaaggagcaggagcagcagcagacttagcagcggtggcagctaaggcaatagggagaagcattgcctgtaaaggatctttctccgctttgggtttctcttcgagcaacttagcgtacgcatttttcattgcgcagacagggtctgcgaggcacgcaggaacgaggggaaatgaaattatcttgttgcacatgtccttcaattgagagactttgagttgattgttgatcttcgtttggtccctcacttggacaactgtaaatataccggaatcattcacgaatgatgtgaaatcggtagacatgttgttggtagacatgatatcaagttgttgttgttgttgttattgttgttgttgttgttgttgttgttgttgttattgttgttgtttcaaaggaaggaaaaaggcgtcaatttttttttagcatggaaaacaatataaaagaagaagaggagaagacataaagaagacaaaacaagatgaaaaatacgataaatacaaagacattgaccgtatctttacctattgggtttcacaggggactcgaagaatggatagattcgcaaacacgacacagggacgaggcaatatacgccctgctcgcacacggtctacacgcagtgcggacgataccaacaacatcgaatgattatgagggtcgtcgttcaggcagatcgtcggatactggtatggtatggtatgttatggtatgttacacattgctgcaaagtttgaggagagtggctatacttgcgaatgtaagccacatgacagtctcgaggtggatctcaaaccccactaaaaaacaaccggaataaacctacaaaatcggatgtggtcatacactcgacggaatactaaaatgaaaccgctttcttgagtgtacggtacaccttgcggtgtaacctaatgttgtcgcgaccaccggagggggaccgagtggtgtctacaacaatacgaatttttattcatcaacaacaacagagctgctgtgggaaaatggaagaggtcgtcctagacccatcaattccatgcagtgcagccttgcgattgtgagagcagaagagcgatcccggtccgagtaaatgcatgtttctggagagaatcgcagtcctcgtacctctgggtaccgctcgatcgatttttgagaatcgacaagggaagtggcgaagccacccctcctgtgcttctcttgtgcgcctttacgtttattgtacaaccttacccctaagtggtcgcaatcagcgacctttggcatcgttttcgatttcgtgtgaccaaaacgttcaccacccaacctaagattcacgtctgctgaacaaacacttgggatcttgtaaacacgttctttttctttacccgtctcccacgacataagagtcgttttgaactcatctgtcacagaaacgtcctctttgaaaattcttttacacgatgcgaacatggccccagtgggaactgcaacttctcccggtccagtaggcttcagtttcttacagatacaggggcatttaattcaagtgggacccctataaaaatgagtgtaaacaacgcaaatccatacatggcggctttcgcatcctcctcgatgtccacacatgccaaggcggcggctccatgtacacgcaaacggcggaaaactgtcgcatttcgaaaaaatataattatacgcaggaaaccctaaaccctaaaaggcggttcccctagggaagctcattgtttagcaagtaaatgatttcatacatctcgcatgggatcacgtggtgcacctcgttaagggctccattcaggttttgggacagtttgtccatccacctgtgatcgtcatctgtcatgcgcgcatcgcgcaaggagttggccttgtcgggatgcagactcagtatcatcattttttgttcgtgcctagtccaaacgccagtcatccaggtgtcaacggctttgtttgacaaccagtacgtccaccagctggtggacatggtcgcctgggtaggcccgcctgcgaggaacgtttctaatatcccggtcctcgccatcatgccggctaagtcttcaaacgcgtgggccggctgataggcaggctcgggctcgtcgtctgacattggctcgggttcgggctcgtcgtctgacattggctcgggttcgggctcgtcgtcgtcggacaagggctcgagctcgggctcgtcgtcggacaagggctcgggttcgggctcgtagtcagactctgacataagctcgggttgggtcgcgtcgtcggactcatcatcagataccaaggatacaatgcacggctcatgtgcgttcataatgcggtttaagattggtgtcaagaagtctcgaacaatgtcttcgtcgtccattgataggtcgatgatgcacggttgttctgacatgattgagttgagaaatgataaggcaaagtggaagtataatatgatattacagatcgagcgaaacatttcaatttttttcacaagcacgtcgaggagaaatacactaaggaacgcgctttcgatgataactacaatgacgggcgcattaatatcgcgcaccgccaagggaactcggtggcttgcgcatcctactcgtccatcctcacccacaacatcaaccttagcggagaggtcttgtattcaacaagcggcggagcccctttcacatcttccccagcggagcgaccgggggcgcccgaaggggagcccccacgggaagtccgcgaggaaccgagcgggtgggcgaccggaggggagcctacagttcccatgcctaaacgacagcgactgccataattttgggatatcccctgaaaccaacatgtcctgctgcgtatcgtaacactcagcacatatagtgttcagagtgccctcctgagctggcacttgcctcttgcattagcgttgtaaacacatccttgatcgcagcagggagcctagtcgccttgtaatctccatccagtacaaccatagtgacctggcattttgcgatcaccatgtccttttcctcaccgtcgccattcgtcacagactttagaatgacctcgtccatgacatgccgaatgttgccagtttaacttgggtcaactgagcatcggtcaacatcccttgcagttcatggtacgccgcggcccatgccatttccaactcacgctcgatctgggtggacgtggcatcccgcacggcttggatctccttgtccaggcgctggatctgggtggacgtggcatcccgtaaggcttggatctcctgacgctggtttgcctgttccgcttggatctcctgacgctggtttgcctgttccgcctcaagctgccgcaaacgattatcaaagtcactcataccttccctacatgctcaaaattattttggaaatgtgaacgtgaatacatccatgctcttgttggatgccatagaaaacaacaggtttctcttaagttcaatttacttaccatgcacaattacgcttattcatgctctagaaattgacttataatgggcgttcctgcctcccggccgattttgactagctgcgaaacatggtatggagcggaattgtgattccttggtgctgatgtctcaagctagctagtcgttcaggaggctctaaatcctgattagaaattttaaaaaatcgtccgggaggcaggaacgcccattttatgcggttgccacccgttgtttgtaccagttccctgctttcctgtacaacgccttacgaacgtcgttcacattgaatccgttttcttcgatcttgtctctttcctccttgaacacgtctcggcacacccatgacgaaaactcagagacgctttgtatccgcaactccacgccctgttcaaccaggcactcgataccttggctcaaccgagactcggtcgtgacggactcgacgaactcggtcacagtcttgatgtactctgcctgcgaaggcaccgcttgcttcgtgacggcagtgcaatgcgtcttgcccttcgtcttgaaccacagacgagacgatgggtgttccacgcacgtccacacgatgccctcgccaccacccttgacaccggccatttggtacgcgaacggacactctgcatccacggagttcgtgagatccgccatgtagtcttgcgcgggctgcgtgtcgctcatgtcgacttccacctcgtacgtcggaaagttcatgatgttgaagatccattcctcctgacagaacaccgtgctgtacttggtcatgtcaacccatttgtagtcgattctgatcgcaaatatcacaaacatcttgacgagcttacacagggccaccttgttctgcacacctttaccgcagtactcgccacatacgacgatgttcgatcttatatctgctccatggatctcttggatacgatcgaacagatcggagtacttcttcgcagtcagaaacatgtggcagccttggttgtcgttgtcgactgacaggattctgtttctagattgaatggtgtcgacgtagtcaggggttccattaatgaagtgcctcacaatgtccgagtgcgtcccgtgcagtttgaccgtgcctcggaacttgagcgtctgcgggatcgcgcttccgaagacgtacggcaactctttcaggacgttcctgaaatgctggatcgggggaaatggaatgaaggccggcattcgactaacatacaggtgtcggtgtagccttacagtagttctcaaataaagtgggacacaccttataatcatccagactgcagatcgttgcttttgggcaacgttgggggggtgcagcaggttgaagaggtaaaatgggcgttcctgcctcccggacgattttttaaaatttctaatcaggatttagagcatcctgaacgactcgctagcttgagacattaagcaccaaggaatcacaattccgctccattcaatgtttcgcaaacaggcaaaatcggccgggaggcaggaacgcccattgtaagtcattgtttcattttactgttacgccgactgtagggtttaaaaaattgaaaccatttccatctgagcaagaagacaaccaaaccaactctatccaaaatctaactaatatgtcaacagtcggtgagaaaatatggttgcaacttgctaatgctgcatacaaatcacatgatccgtatgatccgcatctggtatacaacatatacacttttccacctgtgatgttcacattcggagacgcttccttcccagcgttctctaagttcgtggaccataaaatcgatggaatgtacatgtctgaatgctatgactccaaattgtacatggacaaaaggaacagacacaagttgtttgcgctggaagccttgtgtatgaccgaagaaccatctaccatctaccgcatactggagaggctgttcatcatccgacctggatccaaggacatcaacctcgacttatttggcgccgatacactgtcgatctcttactttgatacagaaatccaggaggtcttcttcgagaagatttgcatgtcttggctgcgcgtcagtaaggcagttcgagtgatcgcagagcgataccgcgaacacctccagaggaaaaggaatcacatggtcagtcacgtgctcgtgcctttcatcgtgagaaaccacgtcaactagacgtggccacttaaaaaccacgtcaactagaccccgttctctgtattttttccatgaatacgggggctctgcttgtcatgaccaccatttggtatcgacagcgtttcgaagattagttattttcggaaagcaaacgaggcaactactgttgacttaaaagttacagagtacacaagaaacgcataatttctaacgagaatctaggtctacgacagttgtcccgttgaaaacgatgccatgagtggttcctgttaagatcatttgctctattgtgtactggtaacgccgacctttctcacccttgaagcgttttacattggggtagagccccaccccagcgtgctctaagagctcggcagccaagatcaaagggttcaggcagtaatgtctgctatggtcaagagtaggccataggttcgagtacatctgcaatgctacatccatgtcagcatctggaatggcgtggctggtaggataggtgtcacgccatgtctgcaaacttgagcgagtgaggcacatattgtttatctgccagagagcgatatgttctcaaataaagtgggacacaccttatacttggcttgctagtttcacaaagttcactcgcgattctgagaccgcggaaacgcattcaataggtgggtttgcatgggacctgaactgtcaagtcatccacgtccgtacacacgtcaagctggatgaatacaatgaagctttgtgggcggactctacaagtggtctgcgacaaacgtaacagcttccgacccgctactgcgcttttcttgtatgtcgagaattcttaacgacaattttctaacggcgatgtcgtacatttatttctgatatatgtttcattttactgttccgccgactgtaggtggtgcgcgtctgattgcaaaatattggcttatgtattaataacaaccaacatgggacacaaatttgtcatcgtatctgcctcttgtccgtcaattgaagcatacaaccatatattacatccactacaggtcatggggtttcgcatcatagcacttgatgagccccttacatattgcgtgactgaactactctcggtgtggcaggtgacttcattgccagccatcagagatgacaatggactcttctgcggccgtcaagcactgatgtgggcgcaggagaaggggttcgacatcatagaggatgatctcgatgcatgtagtgtcacaatcagcgaattgaaacaactgattagcgcaaatagaccaggggggcaaagagtgaatcctgtgcatacattataattctctacggacattcaaaagtacagagacagctctaacgttgtttgtatcgacgaagcaggattttaagcagtcgaaaaaagaaaatgtatcttttcagaggagcctccggaagaattcttcagtatttatttgttgttgaaataattgttgttcccgagatggagtgtgcgtttttgctgagttgtgagcaatgcacttgtcattcagcgcggatacgtgttcggcccctgacaattttatagaagtgcctacacctgttcttcattggagtcccgtcactccacacatgatattgtaagcatttgagacaagaatgcagctgcttgttgtgttgcaccttgaatttctcaaaaatgtcttcctctatatttttatacattgttaacgaaactatatcatgcaacacatttgagtcgtacagcaagatctttgtttgcgtatcaatcatgttgatgatcgtgtctaacacatcttgtggcaatgcacccataagctaagatgtttttagttacactcaaaccggtcaataatgttacagtatattgaatcaattacaattctctatgtacaacttggaaagacggtcgattgttgtacactttgctgaaaagtttgatcagagtggctaatacttgcgaatgtaagcaacatgacagtctagagatttgttgattcaaaatcgtattggtgttccactgccccgtgggttgctacaccattaggtgatacaccgtaaggtgtgccgtacacagcgttgaccgtacgatcctccatgtcaagttgtagcatccatagtggaaccgttgcacacaaacatagcttgctgctgctgtctgcaaatccttagaatttgaatgccgcagtaagcgatgacatatgaccgattaatctcgatgatgtaggtgttctccacgcgcgcagccttaatggtagttacatctgttgtatcatgcacacttagctcaggtgtgaacactgtgataccatctacattctctgtccaaacgcgtcccgtgtggtttgacaggctttgaagcttgatgactatgtctggcgccatgtcactccggagcacgtggacggtgcgattcatatagcttatcgacatgggaacaatgcctgtagaagtcatgacaacaggtgtattacacacacacacaaatagtcgctttatattaataatgaggcctccgacaaaaaataacagacgcttgatgaatggatcgagtgggccggcgcgctccgcatgaacgcatcgagaaagtatcggatgcgggtgaagtcgttgacaaaacttcaaagccccggcatcctcacgcaaacggcggaacactgtgtcgtccgtaccacattaaacaagtggcggagccccttttacctcccccaagaggagcccccacaaaggagtccgcgaggaacgaggaacatcaaccagcagacacactacatcgtaatctctggctggcgtggctttacttaagcgcaacctatgaacccaccacaggaaaattccgacgcgtcccaggctaaaacatcaggaaccgtaacatctggcactgaagggtatctcttcaataccgacgatatggacgaggctcaacgcccacggaaaaggcgttgaggatccactacggtccacagtcaatgatgcgatgtgtagccacacctcggttgggatcccatgatgttgattgttgtgcctgagggaaaacaagtgcgtggaattaaatgttgtagtcatcaaatgaagagccaatgaatagatgatattgatactgatcgtgtttaccttggaggtgaggaatcaaatggggataagtacactcgacggaatactaaaatgaaaccgctttcttgagtgtacggtacaccttgcggtgtaacctaatgttgtcgcgaccaccggagggggaccgagtggtgtctacaacaatacgaatttttattcatcaacaacaacagagctgctgtgggaaaatggaagaggtcgtcctagacccatcaattccatgcagtgcagccttgcgattgtgagagcagaagagcgatcccggtccgagtaaatgcatgtttctggagagaatcgcagtcctcgtacctctgggtaccgctcgatcgatttttgagaatcgacaagggaagtggcgaagccacccctcctgtgcttctcttgtgcgcctttacgtttattgtacaaccttacccctaagtggtcgcaatcagcgacctttggcatcgttttcgatttcgtgtgaccaaaacgttcac

SEQ ID NO: 181 - DNA, 22190 bp, unidentified
  misc_feature 1..22190: note = Fanzor polypeptide
  source 1..22190: mol_type = other DNA
gtccgcccacggcgcgccaacgtagtcttgcgccataatttcctcgtcctcttcgatgccagggcgcacaatcataccatcgtcctggacgaacaaagccatgtcgcccaccgcgacctccttcagacgcctccaaaaggaagcgtccttcaatatgttgctgtacttctcgatgctgaaaggtttctgtccgggaagaggcggggcgtaagataggctctccattaccaccgtgaccagctccacccctccggggagaagcgacggggggagagagcgttgcacgaactgctcattctcaggagcacaaaagacgaccacgcgcggccacctacgtacatctagattgtccagagtcacgagtacggacaacatgctccacacgttagggcggttgtccacaacgaccaaacttcctataatcggcttatgatgatcctcgggatgacgagcaaccggtttcagaagatttcggttgtggacataacgaattacgaagtcgtgtagaggaactgcgttcggtttcgctgggtccaggggggcgctcgcgtagagttcggtctcctccgccatacatcaaagtcattcctaggcgcctctcctgacggcgtgaccgaggatggcgtgatgctcgagatcaagtgtccatggcgtcgaaagatcgacggtaccgtaccgatgcagtactacctccagattcagggtcagttggcggtgtccggttcgctcgagtgcgattaatttgaggtcgagttcgacatccttcaatcagaggaagagatagaggctgagttcgcagaaatatcgcgtgacgagtccattatgaagtccgctttccgtggagtatttgtagagaagataaagcatggtagcaatgagcctccgtcctacgtgtatacaccctgtttcggcagagatcatattgtgggtggtgggaaatctgattcatcacaccaatcgttgctcgatcatcttcgcgaattcgtggatgctgagtcgtcctcacttgacgactcgtaccgtgtgaatatcatatggtggaaggttcgaaagcatagcaccgtcaaggtgcatgctgatactgatttctccgctcgcatgatcgataccctcgagggtgtttggaatgatgtcacgtgtctccgtttcgacaaggatatgtatgatcaacgtatgttggatctcgctcctgtgcgcagatcagcatcttcctctgctactgtgagcaagcgtgggaagcgtcctcctctgggaaataaggttgtgtgttctcctgagttggcaagggggtacgcattccttgaagacgctaacgatttttagatgccgttcgagaaaaataaccacagcaacaatgacattgcgcaacataccacgatcaattcatggaggtggtgacgttgtgtgatgtcatcctttcgcccactatcacgcttcatcgaagaggtttcttcatccttgtagtgatgaatgtcgtccttgatttttgaacgattatcgacgggatgggatcgctcctctgtccctttccgtattctcatcctctcgctaaacgttgaaccgctgcctgacaccacggaagatttcgcgttcatagctgccgacacaacgtgagatttcgcgttcatagctggcgacacaacgggagatttcgagttaatagctgccgacaccacggaagaggtcgcgttcatagctgccgacactagtgcaatgatgtttgatatactcttgttttgggtatccgacgatactcgacgtatgtcttcgtcttgaggcacaagatccgcttcatgcgcatcatcgtcttttccatcggtattggctctgtgttgcagatcatcatcaatcgtcatcgcatcctctgatgagaagggttcatcgcacttggggcacttgtccagcgtctgtctgatcgcgttcatgcatttatcgtgacattctgcttggcagcatgcgagttgtacgcttttttgtgtcgctttcatcggaaagtggcacaatgcacagaatgattcgcatgccattgtcggattgaatgggatgtataggtcgtttagatcatttacacttgctttgcatgcgcattggatgcatcatcttgtggaagaagttattgtttgatactttacactcgacggaacatagctcattgtgtacggccacacttaagcgatcgcctcttcccactggtccaaaagaacacgacgtctttgttgatgtgcaatgcgtcatgtaaggtttttgaggtgtttgtctgcagctgaccctggttggacaggcgtatgtttcatcttccatacgatgcttttgtcggggttgacgaagcctttaccttctaggaacttgatggcttgttcgattttcccctttccttcacccgccttgtatcccttttcaaccgcgtacatgacgagcttattgtctttagagtggtaccacacgtacagtaggtcaaacctctcagttagcgtgtatgcgtgagctcccaagtgcccgactatattttcagccggaatagttggtttgataggcacagtgacctcgcgaatgaagattgacatgtccatcatgtacatgagcctgatgagttcggatggtcgcaagaaacggcacaggagttcttcctcgagagtcttcatccctttgtgcgtctttaagttgaactctacattcgcctcttttttccacttgtctagtgcccatttcatgatactcttcagttgaggttgagaaagcttgacattatcgtatttgacattactcacctcatacttcttacgatcgtccaagttgttttccgtgcatttcttaaacacatcctgtcgatcggcggaaccgattagatgaccggttctagaagttgatcgtgttgtagatgctgatgacgaggcccttgctgttcctgaggagggccttgctgttccagaggagggcctggttgttccagaggagggcctagttgttccagaggagggcctagttgttccagaggagggcctggatgttccagatgtcttcgagttcgcggttgttccagatgtcttcgagttcgcggttgttgaggtgcgaggtcgtgtagttgattttttcattgtacttgttgaagttttcttatccatcggtaagtaagtgtgtgtatacagttctcaaaatattttttacaacgtgtccaagagctcactacatagatgggtcaatgcagatcaggtgggtaaaagtaagcgtttaaaacgaaaaaggaaagaattgtccatgcttttacgtttcacgatatccagagaaccccttcatgcaaggatttggtaggtataatttgaaagagttgtaatgtgagattatcgaaataattttgggacactcagtataatttgaatgatatcccctgaaaccagatacaggtccatggttccgtcgagtgtagctgcatggttgaatgatttattttttcgtattcgagtgtaaatctattggttggggataggcgaatatgctctgtttttttatatgtgttcagagttgccgcaattgacgcctgagcaggagcaagtactggaatggatgatggaccgtgaagatgttgcttgtgctactcgttctagttttcctggcgtcctctgtggaatccttgcagaggatgcaggtttcggaaagacgcgattgatgtgcgagttgatggctctccgaaaggacatgttcccatgcctcatcgcagtgccgaggatggtcttatcagagtggcctcctacggtccgtgcggttacgggtgtatttcccacactcattgtagacggcgggttcttcgtatcgaacccgactagctttcttgctgatcgcaaggtcgtgatcaccacacacggtgtgcttcggaaccactatcttaagtttggtgacgtgacatgggggcgattcgtggtggacgaggcgcacgtcatgcggaacaagggcacggcttttgtatcgcgcctgtgtgcacgtggcctctcagagttcgatccgttgggcagtcacggccactccggttcacaaccgggacaaagacgtgctttgtctcgctcgcttcgtgggcgtgcatgcacaagacgttgcgatactccgggacgcgcgcgtcatgcaccaccatgtcgttgtccctctggtggtggagcaacctgcaaaagaagatgcgtcggtggttgctctggcagatgtcaattctgacatagaggtacgacttgtgacgttggatgtcatttcgcgcgctcattacgataagctgaaggaggactattcagcgtcttcgtgtacatcgaaggaattggatatcgtcgcgacggcgtgctcatcgagtatggcgtttatgcgagtgttgcgtctacgccaggccgccacacaccctctcattgcgtcatcttcgcaaggtttggtattttcatcgagttccgcaaagttcgatgcggttgctggagagtgtaggcgcctcctcgaaacgtcaaggaatgtttcagcatcgatgcctaacgaggattcctgcagcggggtggtggttttttgcaactggatcatggagatggacttgcttgaggcgttcatagggtctcgatttaggaaggatgaggtttgcgtgagccgcctggacggagcgtgctccattgatgagcgggattcgacattgtaccggtgcaggacggatcgtgagactacccgcgtgcacatgctagtatgtcagatagaatgcgcgaattgtggcttgaacatgcagcatgccttcaacaacgtgatcatgatgcgtcctcagtggaaccctgtgaccgaataccaggtgattcgacgggttctccctcgtggacaagagcgtactgttcgcgtgttgcggttggtcgcgaaggactcagttgatgagcatgttctcgagcgtcaggcgaagaagactcgaataattcgacatgcaatgcaagacgatgtggtcgctacgacacttggctcgctctcaattggtccatcgtgacctcgttcacttcttcacttggcagggtcccattcaattccattttgttctaaaatatagttgggacactctgaatgattttcgttcaacgaatcaaaaactttgggaagacttgggatcgcgatgtgaacgcctccaagaacatccaccaagatactcaatttccttgcacgagtgtatttgtgtattcgacgaagagcgctgcgcctgctttgatgaccttgcgttcgtccgttctgtttcgtctgtggatggtggcgcacatgtgttctatgtacgcgaccatctcgatgacctccgcattcgtgctgatgctcccatcggattcttccgtgtcggatgacaacattcctatggttgatattgcagattctatccatacctttcctctctcttttggacttctgcaagcgatgagtttgcgagaaagactgcgcgcggtatcttgttgtggggatggttttcggggtttgtaaatgttgatgccgccggcaatggtcatcttgggacgtaccatggctctgctcttcagaccggcgtccactcctgatagagaggatgtggtgaatgtgatctgcacgcggtccatgtatctatcgacgagaactcggatgcttttttggacgtgcatgggcgcgcattcgatattaagaatgaccacgcgttttcgaacctgcaaacggtgattggtgcacgtgtcgccatccggttggtgttttctgggattgggaaaaagagacgctgtatcgaccatctcccgttccaagattttgacgagcagtcctttgctgttgttgttggttaatcttcctggatcttctgaagcgtcaaacacgagtattggggggtattgtgatgaggaatgagtgaagtagcttgtgaagagagtaatcgcattgtgatgttcgcgtttgtaaagacttgtatggtttgtcacgttggagtcgtttttgactaagacgttttcgattagctcctctaagactattccgttgatgccaacatgatcccttgttacgacaaggatgcaaggaatatcttgggtcatttcggatgccatgccgggaatcagattaccttattttactacaatctctttccgacaccacgacgtcacacaaacactatacagttttctcaactccataaatgcggatacatttaccttacaggggttgtctcaaaataaagtgggacacaccgtatctcatcaaccagtaataagtcttgctcttacgcatgagtgagtgcaacagtttgcaaaggcgggttcacagcagctgccatcgttgagatgttcgaactcatcgcgtcctctgtcgtacatttattcatctgatataggtttattttatgttccgccggactgtagaacctttgggttatcactcgatccaaataagtgtatgagggatggtcctaaaaattagatttcttgccgcaacaagtaaagacagggcttgaacatgttgcaacttttttttgtgtctaagtagctgttagttggtcgtatcatgaataaggctcattttatagcagccagtccagatcacgaacctgataatacggcaggattctccagggtgtgatattgtcccgcaaccaccatttaactgcccgagtcaatcctattttcttgtttcggcgccttctagctcaccctaccgcccccccccccccctagcccctcagtccggttggtcgtaaaacatttaaaacttcctaacacgtaacaacatgtctgatcgcattacatccagagaaaacgaatcgcttccaaatgttgacgcatttatggtcagagatgtcttaacaccaaacgaatgctctgaatggataaaactggcagaacaaaaagggttccaaagcccatacataggaggaggtatgtttgcaggcaaaaggaaacgtgttacattaacaagcgaagaactagcagcacgagtgtgggataaaattagcacagtcattcccgcaagggttcatgacgagaaagaatactcatcattctccttttctggacctgcaaataacatacgtagtggtggttattttccaacacatattaacccgtttttccgtttctcaaagtatgagccgggagatgaattttccatccacaccgacacgtgttatgcgcgtgatgaatgtgagactgggctttgcaccatcttgttgtacctgaacgataatatgcaagggggtgagacagtcatacttccgaattgggaatggaacgaaaagatcaccatcactccagaaccgggtctcacacttgtattttaccacatgctaccacatgccagactagaagttatttcggggtgcaaatatataatacgtagcgaggtcatgtaccgtcgcgtctgcaatattcccttgttgcaagcatcgaacgtttttgaataggaaaactgccccgtgggttgctaaaccattaggttacaccgtaaggtgtgccgtacacgaggcggtttcattttagtattccgtcgactgtacacgaagcggtttcactttgttgactgtatgttctggcatgtttttttctctatcgcgcagagctgcgtcgacacccatctgcgcaggatcaagcacaaccccgggcagttctcagggttccaatgccccagaggaaacgggaagggggtattacccaatgaagagccatgtgtaggacgcatcaagaacactcacaggtacctgcctcgcaaccagaagaagaagatgatgaagaagatgaaagtagatgcccccactttcccttatgcccagccaatccccatcagcgtttccaagaatgtcatagagacctactcgccaccaaaggtcaccgaagtctccatcatggacttcatctccatcaagccgcaaatgacgatgagcaagcgtggattctcaaagcaactctatgtgtgtcctgttgtagaacaacagaagcctgtgcacgaagagttcccgcccctgccaacgtatcatgctagcaggtccctgacgcccactgagccccccatggctctatgtgcaaccgaagatgaagagatgtgtgcaatagatgtgcacgaactgatgttgttgtgctgcccagatctgatgatgtgctcgtaaagtcccgagctaaaaacattgagaacatgtgttcatttgatcgtgtggtggggattttgccgggttgcggaacatggatagagcggaattgtgattcaaaggacgttccttcctcccggcgattttgttgaaatgtctctagctattatctgtatctagcgagtcgtttaggattttatttttccgtcaattgctttgtaaaaaaataacattactcggaatattttcgagaacctcttcaacctgctgcaccccccaacgttgcccaaaagcaacgatctgcagtctggatgattataaggtgtgtcccactttatttgagaactactgtacagccccaaaatgtatccatttttccgacgccacgaggcgcgaaagtgactctgtttcacgagcgaatgtgaaattatgccaaacacgtctctcgtatgtcttccaaatgaagtttcgtcgatcgatacaaaagtcctcccttcctcttttaaccgttccctttggcttataaatgacgtggttttctcatataagttatcaggcctggagaagaactttgcttttttctttgtgagcccaagcctttttatcacaacgcgaatcaactcttttgagacctcaaatccgaaagcatcctttaccttatgacgaagaccagcaagagatgcgaatggatctatttttaatgacgcccttaagaactctacagtcggcggaacagtaaaatgaaacatatatcagatggaaataaatgtacgacatcgccgttagaaaattggcgttaagaatggtcgctgacttgggtgtgtttaaaacttctgtgtttacgaacatcagtcgttctactctgtggaggtggaaacgctttggtgtaaatcgaaaacgacgtgaatttgtaagcaaaatttttgagacgaacaaagatttgttgaaattgtttttattgtcaactcaatgcacaaccgcaagaggtgttgttgcatttttcaaaagtactcacaatttacgattatcaactaaaatagtgtatcgtttcataaaactcattggttttacaagaaaaaggagcaaactccgtggacagtgtaaaggggacttagttccacttgtcactgaattttttagtagatacaaggatacaatcaatgctgggaaaattttagtatcagttgacgaatgtgggtttagtgagcgtctcaagccacattatgggtattcccctgtaggaaaacctgttatcgttaaaactactggtgggtgggtacaccatagtttgttgatggcagttttttcagatggtaggaaggagttcgttgtgaagaaaggatctgtgaagaagacggacttcgctgcatttattgactcattgagtttgtgcaataattcagtagtaataatggacaacgccagtatccataagaacttggtcctcagaagccccgtaaatatttgttatactcctccttacagtccagaattcaatgctattgagctgtgcttcgctaaggtgaagaaggactttcgtcgattgaactatatattaaacgatacaaagacgcacgtgtctgatatgatttccttagcattcagcaacctcactgataaaatcattatgggttgttttgaccacgtatggaacacgtatgtgatgtttgtattaagagttctgtgatgtacaaattatgtaagatggcaacgaaacctccgacagtcgcgaaattgaaggagctactaaaattggccgaagtagcatactcctcaaaggacaagaaggacgatattgtccgtttatgcgaagacaatggtctcatcgccagaccccctccagagtacaagacggtggaaaagatgtgcgtcgtgaaatgcgccctgaagatagcaatgagtcttgacgatgaagaattcggtaagttcagggggcatgtggatcagctcgtcaatgtggtgagccgcgtgttacggcgttccagtctggtgctgactttccatgtcacgaggctcatgatggcgacctgccgattcctaatatgtacgatatgaaggatacctaccggaaggattggctaaggatcggagttgacggcgtctttccagatgaagagagtagaatatcatacgaagccgtgaaagacgtaatcggaaaggtgcttggtagcgatgaccctgactacatcaactcctaccctatctatttcgaccaggttttgaactatgccggtcacacattgagcactgtcgtgtcgaacaacgcatgggttcctttggtacctcgtctgacccgcctcactaaggctactttgaaggcactgggagctccgaagaccatccgtgtgtacgacgtgatgagggtcatccaacaagaaatacaggagatggaatcttggccagagtctgttcaggagtacgtccgtgaagttcgagtcaggctgaaagttccagatggaagtcgactttatgatgactatggcaaagacatggacttcccgaccatggtccggttcaattattggatgcagacacggttggaggatattggtgcacgtcgtatccggttgatgcccatctttaatgtccaacgggcgcatgtccgccttgacatgaagaccctcgtgaacctgttcaggcacgtgttccccaaagacccaaacatcgtcgagctttcaaagtgggaaaatgtaaaggatcccgaccgcttcatgttgcctcttaagcctgcagttaagacgaaaaaatcatgtggtcttggtgaatgggaggcatacaagttggcccaacagaagtacgatgctgacgttaaggatatcaaggctactgacgagtacagacatgcaaagggtaggtatgacacgctcgtgaacgcccgaaaaacagtcgcaggttccttcttcaagaaaccacctgtcaagacggggtgggtgttcgattgtagcatctgtactgacggagtctcattgagcatgcagtacagcaagacagtacaggttcgtgtatccgatctgaagaagacaagtaagaggtctcgtgacgaggaaggtatgagcgtctcagaacagtatgaccataaactcaaaacgacattgtccgatatgggtatcgtcgttctgggtgtggatcctggtaggagcaacatcgctacagtcacgtatctggcagaagacaaaagcaagacatggaagcttacacgcggagctttttaccacaagtctggtatcaagaaacaaaaaaaacagcaagaaaaacgtttctcagacatgattcctagatgggagtctctgcgtgaaaatggagcagcgttgagtacatccaggaaggatgatatctcggcttacttgaaaaattacgctacgttttccgacgagtggtggaggatggcactccgtcgcagagaatcccgagacaactttcagaggtacattggcaagcgcaaggctatggactcattttgggcagggatcaagcgcaacatgaagttggatcatcctgacctgagggttcacgtagcatatggttctgcaatcacgaagctgaaggctaccggaccaggagaggtagctgtgcctacgggatctatgttcgcttcctgcaagcgcctcttcaaagaggaggttcatgtgacagatgagttcaagacgactctcatgtcttgggaaaccggtgccaagaaggaatgtgtttacaagattccaagtgtccaaataaccacggaaggtcggattcgtctaggttacgagttgttgggatacaccccattgaaggagactccaaaggtctcttatcgcgaccagttggcggtgagggtgtactgcacacgtaaaaaaatccaagaaaaacacaggacgggtggcttagccccctctcttgtcgacaacaactcgatcaagcggtaccctgaggtacgaggactgcgattctctccagaaaccagcacttactcggaccgggaccgctcctctgctctcacaatcgcaaggctgcactgcatggaactgttgggtcaagggagaccgcttccattttgcagggatgcgtgttgttgggctacaaaaaaacatgatggtgttccactgcaatgtgggttgctacaccataaggttacaccataaggtgtaccgtacactccagaaagcggtttcattttagtattccgtcgagtgtatgaccacatccgattttgtaggtttattccgtttgtacacttttttagtggggtttgagatccacctcgagactgtcatgtggcttacattcgcagcaatgtgtacatgtgtacaacaatcgaccgtctgtccaagttgtacattgagaattggaattgattcaatatactgtaacattattgatcggtctgagtgtaactttattggtcggtgaatctgtgactctgtgactcgacacaggtgccgccgtgatgcgagaagtcgctctgtgactcgacacaggtgccgccttccgttcctcgaagcacgagtgtaaacttcgtggcctaagcccccctaccaagcctgtgtattgctggcggtacactctggtgtccaactaaaactctcaactacgtttttgatctcagagatgtctgtgagaggcgtgtgtcacgatgatgatgcttctcgcgttcgttctgtattttggggggccttggagtgagacgtattcttcgacagtgtcccgccgttttcgctgaggtgtcccaaaattatttgagaacaactgtattacaaacaatgggcgttcctcagactcctcaaaaaatatttgtagtgaaccacggacatgtatctggtttcaggggatatcattcaaattatacagagtgtcccaaaattatttgagaacatactgtaacattattgaccggtctgagtgtaccccccccctccattggtcacgacgctgagagcacagctgcagcagcgtctgcctctgcttccactttgttgttaccagaccccgtaccgaggatgacaccgtagatgtcccggatggtcgtagtagtgacgcgcgttgttgcgttgctattctcagaaacggtctggaatgtcggaatgtaaccatacttctggcggtaaaaggtgttaaggtcgtgctttgcgctgcgtttgttgatgataacctctgcgaaatccacgtacttctcaatgaagcctacgagccacgcactcacgacgtcgaaccccatctccaaaaacatcgcgccaagaaatgcctcgaacacgtcctccaggaccttcttgtcagtagtcgtctctttgtcagcaatgtgttcagagggcggtttgaacctggccacgatcctacgaacgaattcaccgaatggagtgtgattcgccgcgagtcgcgaaagcatcgcgccgctaaccaacttggagcggacgctcatcaggaacccctcgtcctccgaggggtagcgaatgtacaagtaagacgtgataactgcactaagcaccgaatctccgagaaactctagacgctcatagcaagtgtggcggttcacccaacggggtgtgaatgcggcagcgaacacagacatatcttgtacgttcttgcgcacaacaccaggaggaacgtgcatgctcacgatagtctcgatctccgacgaagatatcacggattgttccggcttcttcattatctttccagatttgttagacaaatttgcgaaccaatgggtttccctcgtttctctttacactgtattctcaacaacatacacatgtgtgtttacactgtattctcaacaacatacacatgtgttagtgttgtcaacaagatgatttgagtgaagacacatgtatatttcattttgttctcatgttaatgtacgaacacggacacacaacacaacacaatgaatcgaagagctttactgtttggattgaactacgaaggaacgaccgcatccctgcaaggatgcgagaacaatgcgcacaacatggcggagttcctcatgcgtcaacacaagttcaagtgcgacgtccggatcggtgcagccgcgactaccgcatctgccatactggacgcgctagtcgaccttgcaataaactcctacgacgaggctcttgacaccttctggatccattactccggtcacggcacaaacatcgccgggttctcagacaacgagctcgacagattcgacgagtgtctcgtcccaagcgatttccgcctgattccagacgactacatcgcaaaagtcctatactacttcaatccacgtacgagtatcgttttcgtggcggactgctgtcaatcaggaaccatctccgacctcccgttcacgtggacagacttgatcaacgagaggagtgtgccgcttgtggagaacaagaatgaacatggaagagggcgaaggatcctcgccataagcggatgtcgagacgaccagacgtccgcagatgccctcttgcaggaccccatggatatatgtagcacgagcaaggagtactcaggagctatgacgacatacttgctacaagcgttgaaaaaggatccaacgctgtacaacaacgtgtttaaacttgtgcgcaccatgggcgatcatctagagagggacggattctcccagcaccctcgactcgcatcatttcacgacatacgcgcatcgcccacattgttctgattaagaagtcacctggtcgacgtgaccatatcgagatgggaacaacgccttccacacaatgtctgctattgtacgcattccaatgctcagcggcgtgttctgttgtggaacaccgtacggatgttgttgcgcgcccaagaaggaagaggttgccccagcgttatcgccagtggatagggcaaatccgcaatggagaacgctgtccatgacatgcttcacgacatggttgccagccgtctccacgatcgagaggatgctcgtcacgtgcatgcaaataggcgattgattgaagaaaatgatccgaatcaagtcgctccgacagtaccggtagtactgaagctgtaacaagcggtgcgcaaagtacatgaccataccgatgatgacagtcgatgcaatcgagtgagcggagtgaataagacgactaataagcgtgctaaaatattttttcatctaagatacaaacaaaaaaagaaacaacacacgacgatacaacacagggagaatgaacaaagcgatacaatccagattgcaaaatcaggctttacactctatcttctgcaatgatttttttgaatttagtatcgatatttacatgcgatgtcgttgaacaaacctaatggtgccacatgaaccagttttacatgtacgagtcttgcgttcaactgtcttttgtatgaaggcggagtgctgtatcgttgccgccaccaggacagaatgggcgtttctgcctcccggcggattttgactggttgcgaaacatggtctggagcggatttgtgattcctctgtgctgatatctcaggctagcgagtcgtcccggaggctcaaaattctgagtagaaatttcaaaaaatctgccggtaggcaggaacgcccattatatagatggttttacacaagcatgtacgacccatcatcccaatattgagactgtttacgttgttcttcttgtttttgtttttgtttttgttgtgtcttcttgctgaggtcatcgtgcatttcttgtcgtataatatcttcgaccggtttgtcatctttctttgacattttaaggatttcgtcaaccttattttcctcatttttgatgttttctactttctttgaaatggtatcgtttctcttggcctccaccttggctttgacgaattctgtcttgtggtcttcggatatcgtcgtgaccataccgaatatagacttgttcaaaaagtattcaagcaggacaaagcaaagcagtatagtgagcatccacatgatcaacgtccccaggataccgaatatgatcgagatgatcttcacaccgagggcttttctcacgaaggaaatattgtttatgaaatcgaacaatgggaggataatggagttgagcagtttctttactgcgtcgttggtagccacggcgatagagaatccggcggcagcgacgatgatcttgttgctgaaaatgaacttctggaggtcaaagtaaaccttaatgaaaacattcctctgcgcttcgctcatcgtgcactcatacacaagtgttttcaaataattttgacaaattatgattttcaagcattgcttgcctttattacacattgacccctcgagggccacgtgtcattgacggggcttgccgacgacattggccttgacagtattgggtatcttttccgtttcttaaaagtaagaccttgtcgggagcccgttgatgaacaggtacccaagtagttcgatgtgatcatctcggtcaggtgggccttgagctccgcagggaccggtgtctgaaacgcgcaaacgaggcaactgtttcaaccttcttgaactcgtctttgacgaccaagggaaacgtcgctgtgaacgtgaatggcattttgtggtatacagtctacgattttgataaaaatgtcacacaacatgtccaagtcttaagttgttgtataaagtgtcgttgaacacgttatacacatagaacacgttttgattccatgttaacaaaacatggaactgctccctgaaggccccctctacatcatcgcgtctcatatctcaaagagcgatgctaagtaccgtcgcttatgcgatgtctcaaaggacgccgcgagcctcatgttggtgggcaacatagcgttcgccgagcttagtcttgctttgcaagagaagttggagcccgatggactcctcgtgaacgatgcagcgttcgagaggatgcgtattaccgatgagggtcttacagagacaagcaaggtgaatgttctcaagaaggcgtgtcgcgatcgtggcctgagggtttccggtgtcaaagccgcattgtggaggaggttgaaagaggctgaagatgtctctcgaccccctcgcgggtgcattttgtctgccaaattccgttccgaaatgagggctatgcgctacgctcgcatctgtgtgtcgaaggccaagtctgagtatcgcgtaaccgagagggacctctcgacgctgcgttgcgaactcgtgtacaaatcagtgacacccaagcttctttacagtgtccgcgacgtggctcgtgttgcgctcgagaagcaggagacatccccactatcttcaaatgatcgaagagagaatcgcgaggtattgttgtcgagtacattggcggagttgtccattgtggactcgcgcgtgttttcagtaaatttttttgcggcgagcatggcccgcgacgcttacgtgaattccgggagaagtggggggatcgcgaaggctaccgcgaccatcattggggcgagcaaccgcatgctcactctcgagcgcgccttgaaagagcgtgggtgcaatcttcgtacggattcgcgtttgtgctccgccttcattgacctggacgttggaaacccggtggacatcgccaattcgatgcacgagatgcggtttttattcgaccacaccgagttcaagcttattctggacaacaagtggagagacgccctccgagagatagactcccgggatgaagatgatgatgaagacgataaagacgactacatcgatcctgataagatgagtgagtctgccaaatcggtcgccatcaagcggtgggccgagatacacgaccctgacgaggtccctgacatgcctgaaagcctgcgcgaaactgtattttgtctgaaggcggagtgtatcgttgccgccgcaaggaaagcgtggcgtgctcgacagcctcaaattactttccgtgccctcaattatctggagaaggagttcgaaaagatccaacaacgcactcgagacgcagattccctcgcagccctgcaatccaccctcaaatgcagagacggtactgtttgcgcatgtggaggattcgcgcatgcagagtcatgaggattggtggaggatccaattatctagggcccactttcttgccaagtattaggcagctactgtcggcggaacagtaaaatgaaacatatatcagatggaaataaatgtacgacaaattagaaaattggcgttaagaatggtcgctgacttgggtgtgtcccgctttatttgagaactatcgggggggctcccaaaatttgtgtctccggatgtaatatctgaacatctgtaccaaatcacatcacaatgtatcttttgtattcgctgatcggaattgttgtagggttagcgatgggtatcacaggcattggtgcaggtatcctaacgatcacccttctaactttcgctggcgtgaacataaaaaccgccgaaccaaaatgtaatgtaatctaatctatctgtacagagtgtaatgggcgttccagcctcccggaggaaaatcggagctgttcaggatccatcctccacgggagttccggattgattgttgtagtttatatttcaaacaccttgtaaggatcgaatctgtgtccttcgtccggattgctcaaatagcctcgttggttggagacaaggttgcattgacctattttctggtcgtttgagtagtgcgtgtgtccgtgcacccacagcttcaccggggtactcttgaggagatggtgcaggtccgttgcgaaggcgctgttcagcaagctccctctcgtcttggggtgactggttccttgaaagctcggcgcgtggtgagtgacgacgacaagatcgacgccatcggcttccgcgcgagagatttcgccctcgagccagcgaacgtcctcgaggtggacggcgttgttcttcggcactgtgaagccggaaatcatgcggtagtcggacaatcagcactgcacgcgtattgcgtccatatcggggacgtgagaccacagcgtggttcccaaaatccttactttggtattattggtattttggatttgcaaatcgtgcgctgaacgattaagaaagtggacgttggcgggaaggtcgcggtcgatcagcagtgtcacggcggcaataccgtcttcgagagtgcccatgccgtacgcctcgtggttacccatcacgacgaacacctcctcgaatagctgagagcagtgctcgaggaatgcgacgtactcgctgtcagacggactgcccacatctccggccagaatcaggagcggcgcctcgattttcgcagggtcgaggcgaaacccgggaaagtgctcgaggtgaagatcggacaagacgtgaaaagatggcatatctatttttatgtacacaatttataaatggttgttgtgccaccttttgttacagtagttctcaaataaagtgggacacaccttataatcatccagactgtacagttgttctcaaataattttaagacactcagtataatttgaatgatatcccctgaaaccagatacaggtccgtggttcactacaaatattttttgaggagtctgaggaaggtttgtaatatatacaacgtgtccaatacagtcgacagaatactaaaatgaaaccgcttcatgtacggcacaccttacggtgtaacctaatggtgtagaaatccacggggcagtggaacaccaatacgattttgaatcaacaaattgcaagatgttaacgagaatatcgtggttcttttttagatcacggctctccatcctgcagactccgtatcgtttttttgtcggtactttcgagagtgtccattgaaggaccagccgcactaaagcgatcgcctcttccccagtaccgtggcccaaaagaacacggggtctttgttgatgtgcaatgcgtcatgtaaggaggtttctttgctggacgggtcattttataggaccatccactcatacaatacatgattgtcaccgccttataccgttttttggatgtttcattttactgttccgccgactgtagctcactacccaagagcttatgcgattgaacaaatatttggaagcatgaagagagctttagggcattgtcagcatgaattgcggtgctctcacgcgtttaagacttggtgactacttatgtacttccttagaactatcggcccagacagtgtttctgtctgtactgtgtcagcttcccgtagactgtgtcatccttcatgacacggtgacagcttcctgttgactgcgtcatcggtctctcactgacacactctgtatagccggtgcctggcttaagtttcctgacttagggtctagtcaggttacaggcatccgcctctcccaccgctggtgttctttggcgtccgcctgtccttgtaacgctattcttgtctccgtgtatagattggcgcgtctgtctccgctgcatacatctctctccactcttcgaagtgctttctagctgataggttacgggcttattacttctaccactgctttacaatgcaacttccgcgtgggcctcctgccggcttcgagaaacttaccccacagaatggtatttcctggtcgcgcggtatggagagcgtcattatcagtaatggatgcgaccgaattcttcctctaaagattcgtgttcccactgattggctagatgattgcgcgccagcggcctctgctgctggagatgagtctccttccgccatcatggaagccacccccccctccaatacctccatttctccgtctccttctccttttgtccaacgtctccgacctgaggttgaggatattctgatgcgcctatgctgtgtttccacacagattatccagtatgcaaggtcgcctccacccgctgatgcccgctttacctacgacactgtagaccttgctctccatagccatgaagatggctatgcttacggcaagtctgacgactcagaggaagattactctgatgattgtatggaagatctacagagtgccagaagtggcgacttcggtggagtcactccctcttctgctactaggtttttccacacctccactgtctctccggtgtatgagcctcaattggcaccttctcctgcggtcttcaagcctccgtctgccgctctgcttgcgccgcttccaccggacctacctgaggtggtcaagccgtctttgctgcggtttagagtttagatgatcagcgcgcatatgatgctggcattgctgccgagtattttatgtcggttcgtgcctcgtatgctcctgtgcctgatcctcttgctgctggaccctcggcctctcatggtgagtctcgtgtagatcctgcactgttgggttttagtgccctgcccctggaacgtcaggagttcatgtgtctcactatgatgcttgcgaacatgacggatgcgatggtcaatgtgtatcaggattttgccactcctcgggatatcttcttgcatatccgaagacagcgttctgatgctcttgctgctcgtgtccctctcatgcttgttgagcttcggcgtgcaaccatggacaactctgaacctgtggatgtgttcttttgcagggtccggggcttgtgcactgacctccgcagtgcgggatacccacagcctcagcgccatgccatgcatactattattaatggcatcatgcacccccgcttcgactctctgcggctacagtttggtctcgcactgcatcagaaccagcctgttgattactggacctgtctggcagcatatagatcattagatttcttgaacgtgtctctccctaagtctgatccgaggcatcctggttggtcccgcgatcctccccaggtccctgccaatgctgcttttcagcgtggcaggggacctggtcctcagggttccgggactaccaagaggcgcttggattgcacttggggcccctgtctttccaaaacgagccactcggaggaccgttgctggacgaaacatccgcacctgcgaaaggccaaggctggtgcaccgggcattgaacccgtgcccgttgccttggcccttccaggttcgctgactcgcaagcagttgtcctccttgcaggctcagattgatgggtacgccatgtccaagaactaggaggtacgctctgtcctattctcttgcactacgaagttctctaacgtgtgtagccctagtctttctgagggtgtctggcatgtggactctggagctggaatgtcaatcacgggtgataagtctttgttcactgt

SEQ ID NO: 182 - DNA, 21926 bp, unidentified
  misc_feature 1..21926: note = Fanzor polypeptide
  source 1..21926: mol_type = other DNA
aatcagccaaagccccaccaatgctcttacgttcagggaggttcccttggacagcaactccaatacggtgaccacatcagaagcaccagatacgtctatttcgaagctattgcacgataccttgctctgaccattggccctcgcatccatggccaccgcttccgaccgaagaaatacggcgcccatgcaggcgaacgtatttatttttctatgttttcttgtggatttgtgcagggacagagacgacataatatcaagcaggcttttacacatggctttattgcctccatttgatctatttatatttcgtccgatccaagtgcataatacatcaaatgaatcgtcttgtttaactccaccatttggcatgtcggatgggttgctttacaatggaacgtttttttttcatcttcaagagttcttcaacgtttcctcaggcggcgcagtcgtgtgcgtgttagcgacggcgcagcacctgttgggggcgtacatgcgagaagcgcacgatgcgaaccaaatggccaggacgcagatctaggtaccgtgccatctggtcagagcacgcgataatcggaaagtggtacctcgacttgacgcggtatcgtgcgacgagttgctcaatcacgtcctcgtcgcggatgggttcgtggcggggcaccaactcgtgacgagagatgttgaactgcagttcggagagacagaaaaactgcacgtggcgacgaacgctctcatctagacccctccgacttgtgctcaataccttctcgcgagtcaccaaaataacctctcgaatgttgttgccgcccacaccggcacctcctccaccacgttgttgatgctgattctgactgtcgccaccacccatcttggtggtataagagtccgctttggacaacgccttttcattaatatcgttgttgtcattctcggtgtctcctccttcctccataatgacgtcatcttcttcgatatcccccacaaaatcctcatcttcatcttcatgatcgttccgtctggcaaccgccgcgtccttccctacattattttcgaggggggcgaggagtttcctcacgtcggggagcttgaacgtttgattgagactgtagatgacacggtagccgcagtctcctggaaggtcggcgtggaagacgccccccgatgatggggtgacggctctggcgtgcaggtcgagcgcgatcggggcggtctcctcaatggataacgtctcccctctgtcgacgagcatctcgcatattaccgtgaagctcttgcggacctgtttgtccaacatttttgttattaataaattatttagttatttgctttacactcgctcacattttaggcaccactttcgaattggcagtgtttctgaggcataatgtttttgccacgaaaccagccagcatcgtggggatgttgtctgggacgaactcgtacgtgtcttcgaacgtctccttattcacaatataatatccgacaccgtccgtttcctggacgacgtagtctcctgcgttcactaccatttgcgattgagagcgtgagctactgaacgcaagcgtttgcgatgtgtacacggcggctcggcgtctccctggcctgaccgtcaacgtggaccccccgatgtcgtacagcttgagtgccttgggaatggtgacgttgtaccggtccgatttgggattgcagattaccaatacggcaacgacaccttcatcggggaccatcatggacgcaatcgtgaacgtcatgctctgcaattcatcgcgtgtgcggacaaacgtgtacctcaatcgtttcttctccacatcacggaatttaaggtcgtccattctgagtttgtgacatgttcaacgtatttttaaacatttatactgtattttaaatgaagcgtggtgcggtggcaagaggattcggaaaaaaaatagaaataagatataacgcatgaatgcagctcccattgaagaagttcgacattacggatatccgccatgacaaggtgattgtattgataggaaagagagagaccggcaagtccttcctggtgcgagatattctctttcataaccgcgcaatccctattgggaccgtcatttcgcctacagaggagtccaacaagttctacggcaacatgattccgcacatgtttatccacgacgagttctctccggatatcatcgataacgtgataaagcaacaaaagttgttagctcggaaggtagacaaacaaatacaggtgtacggttcatccaatatagacacgcgcgctttcttgattctggacgactgtctttttgacaagacgtgggcaagcgacacgggcatccgctatctgttcatgaacggtcgtcacctccctatcatgttcatgatcacgatgcaacatccgatgggcatcccccctaatcttcgaacgaacatcgactacgtatttatccttcgtgagaacgtcgtctccaaccgaaaacgtatctacgataattacgcgggcatgttcccatcgttcgacatgttttgccaagacatggaccagtgcaccgagaactacgagtgccttgtgatcaacaacaatgtgcaatcgaacaaacttgaggaccaggttttttggtacaaggccgagccacatgaccaattcaaactcgtgtcaaaggaggtgtgggaactcgctagaaggaccaaacaaaaatgggacaatggtgaagattcggatgaagagggaggagactcgaagaaaccttatgacaaacgaacttatttacaaggaaagggggggaaacaacaaacacaaattagtgtcaagaaaaccatgtcctgatacacgtgtcctgatgagaacaactgtagtatcatttacatgaacagaatctcgtctccgttcttcgtggcgttgtcctcgttctgttcctcctcctcctcctcatcagagtgcttcttgacgttgttttcgttgagatacatgtcatcatcggtgggcatgaacgcgtagccgtcgaggttggcagacatgatcatgcgcagctggcagaccttccacgtaacaccgaacgatttgttcagtcccacggaccagatcgactgaagatggatgattgcggacacgcgcgcacccttgccacgcttagggctccggaggatctcattgaggtcgagaggctcgcgatcgcctccgtacacagggaaccggaaagcgccatctacgaaggggaggttcagcttaaagttgggagggtacatcgtcgacaactcgccggtatctttgtccttgctgtaccggatcgatggggtgaacatgtcggccaccacatcacaagaggggtacttcttcttgaaccacgcgttagagttctccaatgcattgtcgatcacgtgctcagaaacgcgctccatcatgtcgaaaaaatcctggacgccctggtttgtgtcccgtccagcgaaggacatttgcagtgtgtgcttgtcaggtagtccccgctctccgggccacacgctgataccgaacggcagagacatcatgggcgtctgtacaagcaggttccggttgttataattgatgaagatactgcgacctccgttgtctagctgcttcggagcactaaaggtgatcttgctcacgtcaacatcgcaagggaaggtgacgtcgctcgcgacagacttggacgtagtagtccttggtataggggaaattaggatggggtggtgggtcaacaataaatgagaggaacaaagctgatacctaacacatatcggatcctctttatacttgtttgagtgtaacatttttattcttatttttttggaaatgtgtaccgcgaactttcttgggtttggggggcatggaaagcattagcaagtcaggatcgtaacatgttggagagcgacgaacattgtcgtcacgcaggggggtgtccacgttttctcgttggattgtggagcgtgtgtgtgaatgacgatacagtcggagacgcaatttgtgggacgccctaccggtgacccttgaacccaacgggtagatcagctaaaggcgagtacattttgcccttcatctctgtatttcagcatttaagctggcccaaaggataacaaggcaagctgctgacaaacccaggtgggtcggtcggtttagcgctcacactcgcctcgatggaaactgtggttttggggggaggcgagggaacacagaatgcctcaggtcgctctctcccgtccatccacgttgtcagaagcagaagaaggttcttggcagcgttcacgtctcggttccaggttgcaccacagcgcacattggatgatgcgcttttgacactgtctctacggtgcagtactttgtggaccttgacgttcttcaccaccatcttctgcttctcaaaagttatagacccgtcgattggggactctttgcaaactccgcgccagactacgctgtctgccttcatgttgacaagcctctggaagcagccgtgacatttacaagaagtgttgcgttcgtcgacgtttttgaacaaaacattcttacgacgtgagaggcacctcctgatctctttgatgggcccagaacatgaacgactgataccatacccttggttggaccagttgccgaagccaacaacggtcgtctgtgcccttggtgcaatcacatcgcataccttttcaatcgtcttctgtttaccaacgtatcgaaagaatcgcatagatcggtagcctttgttggctctgtgttgcaggaggatcgggagcgctttgagataagctctgacatggtcctgcaagtcgaccatgttgctcgtattaggcgatggaatggacttcacgaggtcttgagtctcgtcattccatttgtaggtgcgacgcttgcttgtattgtacccagcaactttgctaaagcgagccgagctgaaagacgtgatgcgacctgcagaagatgctaccgtgacgatatctgtcattccagggtctactccgacacgcagcgcacccactgcgtccttgcactctacgatatttgcgtccttgggatagcctgcgttttctccttcttcaacgacctcttctttacccttctgcttcatttggacggatacccctttaccgtcgctgaggattcggttgtcaaagcgagaccttttcgtctcaagaccttggacattaaagtactttcgccacagcattgtatggttctcgtaacgtccatcgccagagacgctctcgagtggcgaatcacccatgctgagaagcttcatgaaagtcatggacgatatcgggacgtacgaaattgtgaagccgttcttgcgagggaggatactgaacagacgggggtgacttttttttgttttttttatctttcggatccactcgtccgacctctcccaactctgtaagcacgtgatggaacaatcgcattgtcaggtgcgctctagtgttgaactgcttccctcttggcagcggaaagagagccctcaagtgactgacaacctctttgatgtggatcgcatgcacgaggccctctgggatgattgtgtcgattttcgattctgggtactggaccaccgctttgacaatcttcttgaaatgtttcttcagagagggatgtttcaagcgcaggtacttgataacgaccctgtccacgtttgcccagacgctgttgcacgccatcgtcgccatttgtattgagacgtctgcgattacttgtccccaaggacgaacgtccaccttcacgtagcctgcaggtcttagggcgtcgaaagcaaccatggtatcattgaagctctggcccagagtatcctttcgaacattggaggtcaataccgcaaggaggcacctgtaataaaagttccgatccaggtgtggcaactgcttgacgtcaaagtctccatcatcgaggcatcttgtgatatgaaagtttgcgaataagtatgcctctgcaactgcgtggttgattaagagtaccatgctttgtatccttgaggagatctgatgcctcgatacatccatgcacagagaattaagcgtcttcttgacgacgctgatgttaatatcgtcatctcctttgtcttgcactacccccattaagagggggtgagtattctttttcttttggtgatataatattgcacccacatttccttatacacatttcctacgttatcatgattgatgcagagataagacaccgcgtgtttgttcactacaaataccataatcgtagtttgaggaaagttagtttgctgtacaaagtatcaaaatcatcactccaacgttgggtcaccaaagccaatatacaacatcatcggaagaaaagggtgagtgtcattacagaagatatcaaggctgctataaaacaactgattgactccaatcccttcttgacaatgtctcagcttgcagagggtgtgacttctctgtcctctgtcaagatgtctccaaaaacttgtggacgctacacacgcaaacttggttacacccgcaagcgcgcatacaaaacagttcggcacaagaatgaccacaaatcttctgtcgaccgtttttgtaaggagtatttagccgttcctacatcggatttgttaagcatcgggcgggttttttcattggtgacacttgtcgcagagggtactgtcaacgcggcaaacgtttaaatatccaaatttctaggacattgcgaatgtccaaattgacactaattgctgccgtttctgcttaaggtatcgttcattacaagatccttgatcacaattgcaagaaagtcgactttgtacagtttgtatctgagttacatgtacagcggggtacaatcgctgtccttgacaatatccagttccatcattcaaaggagacgatttctatgttcgattctgtaggaatacgaccactctttgtacctccttacagtccagagtttaatgctattgagaatgtctttagtttgctcaagcgaaaatatcgctgcatgtgcccaataattccagatgtagcagatatatttgattacagtaacgctttgaaaaggattattgatgcgcacgatgttagccatcattttgacttttcagggtactttgaacatgtaaattcagtgtctttagatgccttgaattttttgtgtcaatcacctgaagacagtatctgtattgacaagatcggttacaaatcttgaattggtcaacttttcagaatccccaaaatagaaggtgtcccaatatcaaatttccctagctgtatggagcctcttgcttctcgttaacgctcttttgtttaggcggcttattatggggtttttgaggtgtcttctgtgtttgttgttgagacggcgtattatggggtttttgaggtgtcttctgtgttttttgttgagacggcgtattatggggtttttgaggtgtcttctgtgttttttgttgagacggcgcattatggggtttttgaggtgtcttctgtggttggtgttgaggcggcgtattatgggatttttgaggtgtcttctgtggttgttgttgaggcggcgtattatggggttgttgaggtgtcttctgtggttggtgttgaggcggcgtattatggggttgttgaggtgtcttctgtggttgttgttgaggcggcgtattatggggttgttgcggtccgaccttattggttcgctgagattaacgatgtccctcaaactctttgatagatcgaatttgaacaccttgttatggaggtgctggagcgatgggttcaacagtgttgtcaatcgtatctggaatctgacaggctcgtcccggttgttaatgtcggtgaagatcgtgtaaaacaggttatcgaagtctttgagcatgagtattctggcagaggtattgttgtatttacgaatggagcgcaccaacttgtacttcataggcgacatcttgcgacactcgactgaagtcgtgtcaccatcaatgtcgtatgtgatcgttaacatgtgtatagcgatagcttccatctcttgtgcgtacttcgcttgatcctcagcacacttgagcaatcgatggtcccccaacgacattacgtacatgtagttcctggcgttcctggattttaagaagctagataaccctccgcgacagtgatcgatgtagtgaccaccgtgaatcaactcgttcatcaagaaaaatcgatcaagcacgctccctggatcaaacttgagctctggctcagagctcctgtagtactgtccagatagggatacgtattttatgaaagagcttatcttatggtcggttccatcgggattcagtagcttgttcattactatgctgtagatcatgtaggaaactatgtggaaggctccggcaatcgtgtcgcggtgttttacactgtccaaaccgtccagcaactccttatcattaattcctataatggtcttgtaaatccacgtattcgaaccgtcacgtttggcgacaattacattggttgtcttgtcctcgctaatgcgagctatctggttgaataacagagcaacgctaagcgctagatatcttttcaatatgtccaagtgactgagtcggtgttcgttatcgatcatcaagacgctcatgtacgctggtaggttatgttcgatgagacgctgttggattaccagtccgaaaaacagttggcgcatttggtttcctgcgccgtggttggggcgcggcacccctttgccgctcgaaaacatggaccacatcgacgggtatggcttgttggagaaattgtcaaaaacgaaatgcgcacacgacgtgatgaaggtttttattgaagttgaggaggacacgatttcttcattattgagtccaacaacgcttctacagtcggcggaacagtaaaatgaaacatgtatcagatggaaataaatgtacgacatcgccgttagaaaattggcgttaagaatggtcgctgacttgggtgtgttaaaaacttctgtgtttacaaacatcagtcgttctactctgtggaggtggaaacgctttggtgtaaatcgaaaacgacgtgaatttgtaagcaaactttttgagacgaacaaagatttgttgaaattgtttttattgtcaactcaatgcacaaccccaagaggtgttgttgcatttttcaaaagtactcacaatttacgattatcaactaaaacagtgtatcgtttcataaaactcattggttttacaagaaaaaggagcaaactccgtggacagtgtaaaggggacttagttccacttgtcactaaattttgtaatagatacaaggatacaatcaatgctgggaaaattttagtatcagttgacgaatgtgggtttagtgagcgtctcaagccacattatgggtatccccttgtaggaaaacctgttatcgttaaaactactggtgggtgggtacaccatagtttgttgatggcagttttttcagatggtaggaaggatttcgttgtgaagaaaggatctgtgaagaagacggacttcgctgcatttattgactcattgagtttgtgcaataattcagtagtaataatggacaacgccagtatccataagaacttggtcctcagaagccccgtaaatatttgttacactcctccttacagtccagaattcaatgctattgagctgtgcttcgctaaggtgaagaaggactttcgtcgattgaactatataccaaacgatacaaggacgcacgtgtctgatatgatttccttagcattcagcaacctcactgataaaatcattatgggttgttttgaccacgtatggaacacgtatgtgatgtttgtataaagagttctgtgatgtacaaattatgtaagatggcaacgaaacctccgacagatgcgaaattgaaggagctactaaaattggccgaagtagcacactcctcaaaggacaagaaggacgatattgtccgtttatgcgaagacaatggtctcatcgccagaccccctccagagtacaagacggtggaaaagatgtgcgtcgtgaaatgcaccctgaagaaggctatgagtcttgacgatgaagaattcggtaagttcagggggcatgtggatcagctcgtcaatgtggtgagccgcgttccagtctggtgctgactttccatgtcacgaggctcatggagggcgacctgccgattcctaatatgtacgatatgaaggatacctactggaaggattggctaaggatcggagttgacggcgtttttccagatgaagagagtagaatatcatacgaagccgtgaaagacgtaatgggaaaggtgcttggtagcgatgaccctgactacatcaactcctaccctatctatttcgaccaggttttaaactatgccggtcacacattgagtactgtcgtgtcgaacaacgcatgggttactttggtacctcgtctgacccgcctcactaaggctactttgaatgcactgggagctccgaagaccatccgtgtgtacgacgtgatgagggtcatccaacaagaaatacaggagatggaatcttggccagagtctgttcaggagttcgtccgtgaagttcgagtcaggctgaaagttccagatggaagtcgactttatgatgactatggcaaagacatggacttcccgaccatggtccggttcaattattggatgcagacacggttggaggctattggtgcacgttgtatccggttgatgcccatctttaatgtccaacgggcgcatgtccgccttgacatgaagaccctcgtgaacctattcaggcatgtgttccccaaagacccaaacatcgtcgagctttcaaagtggaaaaatgtaaaggatcccgaccgcttcatgttgcctctgaagcctgcatttaagaagaaaaaatcatgtggtcctggtgaatgggaggcatacaagttggcccaacagaagtacgatgctgacgttaaggatatcaagtctactgacgagtacagacatgcaaagggtaggtatgacacgctcgtgaacgcccgaaaaacagacgcaggttccttcttcaagaaaccacctgtcaagacggggtgggtgttcgattgtagcatctgtactgacggagtctcattgagcatgcagtacagcaagacagtacaggttcgtgtatccgatctgaagacgacaagtaagaggtctcgtgacgaggaaggtatgagcgtctcagaacagtatgaccataaacttaaaacgacattgcccgatatgggtatcgtcgttctgggtgtggatcctggtaggagcaacatcgctacagtcacgtatctggcagacgacaaaagcaagacatggaagcttacacgcggagctttttaccacaagtctggtatcaagaaacagaaaaaacagcaagaaaaacgtttctcagacatgattcctagatgggagtctctgcgtgaaaatggagcagcgttgagtaaatccaggaaggatgatatctcggcttacttgaaaaattacgctacgttttccgacgagtggtggaggatggcactccgtcgcagagaatcccgagacaactttcagaggtacattggcaagcgcaaggctatggactcattttgggcagggatcaagcgcaacatgaagttggatcatcctgacctgagggttcgcgtagcatatggttctgcaatcacgaagctgaaggctaccggaccaggagaggtagctgtgcctacgggatctatgttcgcttcctgcaagcgcctcttcaaagaggaggttcatgtgacagatgagttcaagacgactctcatgtcttgggaaaccggtgccaagaaggaatgtgtttacaagattccaagtgtccaaataaccacggaaggtcagattcgtctaggttacgagttgttgggtcacaccccattgaaggagactccaaaggtctcttatcgcgacgagttgacggtgagggtgtactgcacacgtaaaaaatccaagaaaaacacaggaggggtggcttagccccctctcttgtcgacaacaactcgatcaagcggtaccctgaggtacgaggactgcgattctctccagaaaccagcacttactcggaccgggaccgctcctctgctctcacaatcgcaaggctgcactgcatggaactgttgggtcaagggagaccgcttccattttgcagggatgcgtgttgttgatgatgggctacaaaaaaacatgatggtgttccactgcaatgtgggttgctacaccataaggttacaccataaggtgtaccgtacactccagaaagcggtttcattttagtattccgtcgagtgtagatgcatcgtctaagtacgggttgttcagatctatggatccgtagtgtttcgatacattggggtatccaatacccttcagtttcttatattcatagttctccttgataagcatttaggttcacccagtgcgcaaattattggtatacatttgttctccaaattaaatgatgtaccattaattgttacaatttgtctacagtcggtgaaacattaaaatgaaatagtcggagacacaaaaacaatggtgttccactgccccgtggatttctacattatgttacaccgtaatgtgtgcgtacacgaagcggtttcattttagtattccgttgactgtagagatatcagccccgcggaatcacaataccgctccagaccatgtttcgcaaccattcacaatccaccgggaggcaggaacacccattatttataatgctgccacacacccaacttgtccaataaaaatgaatctatcggttgacctccagtgggatgtagacctcgttcaccgccgggtcaatcgggtagaacatgccgtggcgcctgtaccttgaaaacttcagaattcccacatgattcttctcaatgcgccgaggcctttgcagaagccggtcgatcatgcttctcaatgagtacacgaacctattgagcgtacgcatgtatccttcgtagtcgctgcgtcccatgcagaggctcgtgatatgctccatctcaaaaggagtcagaggcgcgtgcatctcattgtcagagagaaactgttgtttatgacacttttttttgacgaaggtacgttccagtatgtccgagcacacgcttcttgtggtggtagtatcattgattactcccatgcgtccgtgcatgacgagcgactctgctgcgaagagaccgtcgagtcggcctgcggcgatgcggttactggttcctacataggtgtacttcaccccgcatcggagcatttgcgtccgtcggtgtccagggaccgcgctattgaatcccttgaacacgtacttcataacgcggttcaggccaccgattccccaaaaatcgagttccacgaagaacatggtgctccgcaccgcctctatgaacgtcggggcacagaggacctccagagcgtcggatgtagggttgcaagagatggcgaccctggacggtgcgatgtcaaagttgaggataagtgtggcgatgtcctcgttcatgctcatgatgaccttgatgacgagggggtctcccaccatactgacgatgttcatggcgtgtcgcgtcctgatgatttttccggcgtttagcctctcgatttctgcgaccatgctctcggcctctgcatcgtcatccatgcccacaaggaagatgtcgtagtccctctgcgtcttctccattccagtgacaacatggccgagcgcggctcctcctgcgagcactagttttccggcacccagtcgcaacaacgctagcacctccgttgggagggacttgtgcagttgctttgacatctctgctaccgtgagactttcgtccatcactaatggctcggagatcgagcttggacgcgatcgagcttggacgcgaccgagcttggagtcgatgccgccgtagagccaattgatgtttcgggagctcgtgcattctggtggacacgtccgccggatcggggacacgtcgttgagatttaccaggcgcgcgttccttgtggtagcgttgtcgctcgtccgacatttccactccagtgccatggcgtcccacatgttcgggttctttcgcaagatgtccaggctagcattgacagcttcgaggagtcgttgcaacctgtcctggcgcaaaccgagcatgtcggcctccacgcacaagcgacttaaacaattgtccataatgcaaccgtccacactgacactgtcattcataatgaacttgtcgtcgtcattcagaatgaaacggttgaacatgaacatgatgtctgatcgcgagtgtgtattggcagtctttggcacggcattgtagatgtcgatgaagctggtgcgtgtgcatggagccgggacgggaatgggttccgattcaggttccgattcggagtcatgaatgtggtcaggactgcggccatttagagggatgtagcacatgccaagctgatcatccagcaggggctcgaagtaggagaataggctgagcaccttgctgtttgaaggaatcttgaacgtttctccgttgtggaattgcagcgtgacgaaggttgtcttcttgttgctcgcctcttctgccgccttcatcttctccttgcacgatgtcgccacgtatttcaggatctcgtctgggatgtgcacgagtgcgttcttcagttttttgcagtgttcgattgtgttatcgcatggatgcaggatgcgtgcataggagagggggcggatccatttttgcctttacttggagagatgaccacgaagcccgatgttcctgttgcggcgacgctcttgaagtccactcctaggatgcgttgtgctggtccgtcgtagtattcttcctcttcggcgagtgcagatcggaggaaccaatagtgtctgccggctcgggttatctcggtggggacgtggttcagaatcgggaagatttccttgaggtgcttcactagcttctcgttgtccacgtcaacgacacaaagctgtctaagaagcactcctgcatccatgtggttcttgtgcttagacacgaaggtgtcgtgatcgccccattcccaaacgttgtccttgtgctgaaacttgggtttcttatcgattgctggcatcaagacatctgagaatgtaatctacgaaactgtattctcgtttacacccttaaaagctgttattgaattggagttgattttcccccttcttggagactagcttcatgtgttcaagtggaacgggtagagtggacgagtcgcgcacgtattggcggtacatgtttgcttcctttatgatttgcgggacgcagaagttgagcaccaattggtttaggtctctcacttgttctaggatgactgcttgttttccctccctattataggagtctgtcaggaatacggagcgcatgacgaacactagttgatcttctgactggcggcctatcacgagctttcaatccgagtctacccaaacgcggtagcggatcgcttggtgcagagcgcccaaattggcgtcgctgaagaacacgttagctacactggaaggttggaaggacaccatgcgcgaccgcgcgttattggattccctttgtggatagccctgttggttgttggtttccacatcacgcatgataggggggggaagcattgtgacggacgagcgtcttactatttttacatgttttataaaaaaaaggcgcgtgtgacacgatgcgtaaaaaaagccgcatcattaaagaacccctttccaaaactcaaaaatgttgagcgtgattttcgcagccttggcggtaatttcatgcgtggtcgtgtgcttcgtgatgagtgctatccatcccatgaaattgggggaaaaagaaatgccactctggatgggaaagatgatcactgtcctaaatgaaaagtacgatgcggcaaaatcaccagccactaataaacatgtcccccccaatgacaacgcttctccagaacaaaccaaggatacccccaagaccccacagtccatctctaaagcggattcctccactgcaatcaaaaaccccgccaatgccaatgcttctcaaccaaatacacccgacaatgcttctaaagaacaaaatgcggaccccactgcaatcaaataacacgcaaatgccactttaccccccaccgatttacctcctgatacaggacaccctgtataatttgaatatcccatgaaacctgctacaggtccggggttcactactactgtttaaatttttagtttaaagcgttatctgcattggaaaagtgtcttcagttcattatcatcatcacaatgagcgtttcttcataccaagttgcgtttccagagacctttccatcatcgtgtaccatatcgaccattcatacaacggatggtagttccgaggtcgttgttcgttttggcgacatcctttgggatttgtttgacgccgtgtgcaagcttcagacgtacgaagacatatgcaggactcctgagttccttcacatatcgtctgtgttcggcgctcatccgcacgcgcgatacggcctgtccctgtcgtccttgatggaggataactttgacaagacggccatctcatggcattgccttgagagcagtggtggaacgtaccttcccgatgaggacacggtggtgttccccacattcgacaactttttcagaggcgtgttggagctggtggaggagattgctaagcactcgtgtaatgcgagcactcaagagcgcttcgtggtgttccagagattctttgaaaaggcttgcagagtcgtggacgtgaacgacatgtctgaccaccttggcgagttcagtattggatgtactcgtgactactaaagggcggcgtcttcattgtgtgcatatgttttttggagactccggtggggatgcacatggaattgttgtcagagttgcgcaatgtgttgatgtactctacagggagttctggaacattgttccctggccggatgcccccgcctggaaaaaggtatatcgcctcctcggggggtacgtgcatgctctgtaggctattgtagatcatgttgactgtctccgggcgcactggcttgtttgcccaaggggctcctttgatgaacggtttgccggtgtacagaccgccgtttaaggcgcgtggcgggatctcggagtactttgcggaaagtgctccagaatctggccccaacaggacactgggttgcttgttcttgtaatggacttggtagtcgttgatggaacatacctataactttaagatgatcgtcccagttcgttgcttcacatgtggcaaggtcgttgcagacaagtggcgtgcttacacacgtatggtcgacgaggacaagaccttgacggacgaggagcgtgggaaaattcttgatacattgggcatcaagcgcatatgttgccggactgtcatgctaacaactgtagacatgatgtttgttttgtgatacaagtgcgttctatcacaaatccattttatttcagagggtgtaaatctcccgacgtcatctttgcccccccccctcccaatccattatgatttgcgactctataaggaactccgcctcttacgaaacgtgttgtatgcgtatcttgtcatccctgatggaccgtgccaaagatgatgctgtgcggtatgctgatgagcgccatgtcctcggttttttccagaaaaatcttgcgtacaccgtccagtccggtttcaaacattttttgagtgatgatgacactattgggtctagctacaccgacacagaccgcgatgtgttgttggatgtgtgcaatcacgtagcaagaatcgtgtacacaagaccgcatatcctctacgacggtaaaggattgagcccggtcgaagcggcagagaatcggaagatcctaagtcaagaaataatggcatctctgcaaaacatacatacgacgacgactctgcagaaacatatgtctatgatatccgaagcatccgagaattgtgtaaatgaagatgtggaaatagataacgatatggaagtagataacgatatggaagtagatgacgaggtggaagtagatgacgaggtggaagtagatgacgaggtggaagtagatgacgaggtggaagtagatgacgaggtggaagtagatgacgaggtggaagtagatgacgaggtggaagtagctgacgatgtttctggtcatgatgattccgatgattcttcacgtacccctcaccggccatgttggcggatgtgtgatttcgatgaggactgcaatcatcatgttgatgattatgcgatgtccgtgtctcctcctcatccttcatctgacaaggaagaagacgctatagaggaagttgacaatgaggagttgatacgtatcgatgaagagcactcccatcgcatgcgtgcgaaggtggaacgtcagtgtttggaagagatcctcggatgagggattacataaattctgaaaaaaatcgagcgcgtaatgcactctacgcacacgaggtgatcgcagggaagggcgagcgctgcaacatgattgtttaggcagcaaggacactcgtctgaaatcttcaacgagagatcccccgctagtagagaaccattggcgacactcgaacccgcacttctaaattcggctcatcaactgtaccatcgggactggtggtgttgtaatccccccttgctgtgcttaacccgtaaccgttgccctctgaatggcgatccttcacaccagcagaacaacatttgatcttgaaaatttattcctactttatttaagaacaactctattacaaacgtttaacatggcattggtgtctccgtctgcaggtgttaacgttacttctgtatcaattttgatttttatttgtttggtggcggccatccttccttcagttgttgatattcgtgttcatggcaaacgtgatgttgagatgtatctgagcgacgacgtgatgaccaagctcaagagcgataagagtaatgcgcataacgagtcagggattcgttttttttacactgacgggagctctttccctaaaaactcggtgtacttccgtccgtcggatggggacatcgtgtgcaatatttcccgtgattccgtgaagaaggttgctaactgtccttccgaattcaaattagaggatgttacggtaattgacatgcggacgcagttcacagaccctcgatacgagtgttctacaatgatgtctcctaacgtgagtcgagacctgcgaaacaacatggacgcgcgcgtgcgtgtgcttctaggcgagtacgagtttgcaaagacgtgtttgacattggagactcttgttttggacgcatctattcctacgtacactgtgcttctggaccgccgcgccttttccaccaagttgtttttcctcttgcgccccatcttcgtccggggcccggggtgtgctcccatgcgcactcgcacgataagcatgtacgactctcatgatccgaatagtgtttcccaaaccaacatccctgtagtatttgaggaagtgtccgacacccgcatcctaggtggcaatcccggggatttcgtggacattggcgctgtccttaggaatatgcgaacgacggctgtcaagtacggctcgaagcgtgttaacattcccatggtcatgtattacctcaactttgtgcaggacgttcctgtcgagtctctcaaatacacaaacgtggttaccgcgttcatcacgcgcaccaccttgaacgctcaggtgcgtttgacagacagcgtcgtcatgactgtcaacgtcggttccgtgaatgtcaacatttctaatgccagccgcccgtttgaggttgatcgcgtgcgcgatagctcgttagttgtggtgaccttcacgacatctcttatcatcatggcgtccatggactcagtgtcggggcgtgtgcaggtgctgcagatcggcggcatacctgtgatgcgcatgtcaaccgacgcactgaccaaggtggagcgtttgttccctccaacgaacaacatgtacccttacacgaacaagagcatccccaatctcgcggacctagctttgcgattaaatgcagtgactccttgatgcacattcgagtgtattaatgtaatccatgtccaacgcattcgcaaaaaaaactgcaaaaaaaaatactgatcctttatactgctctcagaagagaacgacaatcttatgtctggtaatcaagcgtcattcaatggttcctcggagtgggaacgtttctctagagttgctgctaacccgtcaggtggctccgacgggcgatggaaggtctacgccctcgtgttcctcatcatgctggccgtgtacatcggactgctattttggtggcgcaagcgaaagaccaagagttgcgagacgttcagcgagggtgacgaacagtgtgaaactcgttcgaatgacgaatgcatcgaagataatgatgacgcctgcagagacgattggagtgatggggaatgcgggcacgaacacgaaaaacccaatcaaaccaaaaaagaagtcaatgccgatgccaatggaacggataaggtgaaggagaaggagaaggagaagacgataacgaaggagaaaaataaggttgacgatagttgcgatatcgatagttctggttcacactctggttcagactcgtgttcagactctggttcagactctggttcagactctggttcggacactgattcagacactaactttgattcgtctgacgtttatgccaagcggatgtgcacaatgaacgccttttggcgcgtgttcaatcgtcgtgcaacgtctgatgaaatatctaaatactccaaactgaagtgcgaagatgacatcaacaacgctgtcgatagaattgaaaatgggaaatgtacgaagactggtgcaacactcattgatacggttgatactacgtccgacctgttgaaaaacaagccgtacccgaatcggacccggactcggactcggactcggactcgaaattggacccgaaattggacaacaatatcgaaacaaacaaaaagaaactcttagatacaagacgcccacaaccgagaatccgaggaactcgcaaccatcctaatactgatcccaatacgaacctaactcgcaaacatcctaatactgatccaaataagaagaatagaagcaaagacatcccttcatcagttattagtgcggttggtaatggtggctgcgtcgacgcttggtattctggggcgtcttactctggatctctctctccatatgtgccccacgagagtgcagcagccggtcttgatgatgactctgtgacttccaggttgttgcgggggttgcgtgtccccccttcttctaattattcctgtaacgaaacgggtcgtaaccggccacctgttgttgtgttatctagcggggatgatggaatcgatagcgcaaatgggtttaatggcataaccgaagcgtcaatcgcaaagtgtggtggcagctcaattgttggaggcttcaaaacatacgaggggggtaagaataggaaggttggtaataatactacgtctaatagtcgaaaagtgtctggacgccgtgattctgggcattccagaaaccctaataatagagatgcctctgatattgatcggcggaatgtcttgatgtccaagttggatgctatttcacaaaatgttaatgatgtcaagaacgtgtgtggagaaatattcaactgaaatattcaatcgaacggtgttcagtctacgcgagccatactattttacggatgaccagccaaaacaacatggtaccgatgattatgtacaagaggatctcgacaaattcaggcgaaaaaaaacgttgtgtctgtccacctacgtatgacatgaactgaatggtggcgtggagacatatcatacgcgctatgtcgaaaaacaaggggcggtactcctcgccaagtgtgtcggatacattgatcgtgaatagtgcctcctcatttcctcctccgccgtacaaccattgccaatccgggttgccagagattctcctagattctggtcgttccgaggatgatggggcgcaactcttatt

SEQ ID NO: 183 - DNA, 21911 bp, unidentified
  misc_feature 1..21911: note = Fanzor polypeptide
  source 1..21911: mol_type = other DNA
ttgctgcactagatacgatcaaagagatcttgctgtacgactcaggtgttgctgatctagtttcattaacaatgtataaaatatagagcaagacatttttgcggcattcaaggtgcaacacaacaagcagctgcagtcttgtctcgacttgttacaatatcatgtgtgagtgacgggactccaatgaagaacaggtgtaggcacttctataaaattgtcaggggccgaaacacgtatccgcgctgaatgacaatgcattgctcacaactcaacaaaaccacactccatctcgggaacaacatattatcaaaacaagaatcttccggaggctccctattttaaacgtgttcacatgaacacctctgaaaaataaatttctttgttcgcctgcgtaaatcctgcttcgtcgatacaaacaacgtactgtacttgtcacagaactttctacatttcttttgaatgtccgtagagaattcaaaccttcctcagattcctcaaaaatatttgtagtgaaccacggaaaaaatattgtagtgaaacacggtgtcccaaattatttgagaacaactgtatggcaaggagtaacataattatttaacatacatgctggatgtgaatgactgtctggttatgtacatgtatgtgtgtgtgtctggttatgtacatgtgtgtgtgtattaaattgtatgcacaggattcactctttgcccccttggtctattttcgcgcgagtcagttgtttcaattcgctgattgtgacactacatgcatcgagagcatcctctgtgatgtcgaccccttctcctgcgcccacatcagtgcttgacgggccgcagaagagtccattgtcatctctgatggctggcaatgaagtcacctgccacacccgagagtagttcagtaacgctatgtaaggggctcatccagtaaaatgatgcgaaacccatgatttcctgtagtggatggaatatatggttgtatgcttgaagtgacggacaagaggcagatacgatgacaaattgtgtcccatgttgggttgtttaatacatacgacaatattttgcaatcagacgcacgtagttccgacacatccatgggaattacaatgtagggcttgatgcagatgtagatttcgctttccttgtggtcctcaattgcccactaaggacctgaccgtagcgttagcgaccggtagcgcccaccaagcttcattgtattcatccagcttgacgtgtgtacggacgtggatacttgacagttcaggtcgcctatcaccgacgctgccgcctctgtctgccctccaagagatgcgttgcagccgtgccaaaatcagatgcttgaatataaggaggtcgatgacatgagtactacacacccccaacgttgcccaaaagcaagatctgcagttttttagagttataggcgtgctttattacaaatagagcccaaccattctaaaaatcatacaaatgccaccaacttacacagtcaccgttcagtatacagacgacagtagtccgatatcaggtttcatttgcagtattcgaactgtggaagattccttgttggcatgtcagggggaatagggggacaatatcagaggctatcgatgactttagacatcgggttacaatgtggctggcatatcctgagaatcatggattctctgcctggccaacgcctctcaccgacatctctgagatcaaaaacgtaattaggacttttagttggacaccagagtgattgggatcataattcgtggattcatgtagctcaagacaacaaattgcagcctacagtcggcggaacagtaaaatgaaacatccaaaaaacggtataacgcggtgacaatcatatattgtatgagtggatggtcctataaaatgacccgtccagcaaagaaacctccttacatgacgcattgcacatcaacaaagaccccgtgttcttttgggccacggtactggggaagaggcgatcgcttaagtgcggctggtccttcaatggacactgtagaacaactgtaggaaccctcatgcagcccaagaccacaaattgcaccctgagcttgcttgcagtcccccaacccctcaacatctcctcaatcgatcgccttccaatatcgcgagactcacctccctctcgacgctctggtcctcgatttttgtcgcgagagggggatgcgtgcgatgaatgcgaatctggcgcaaaatggaaagaaagtcacaacaccaaacactttgagatcccctaactttcttggctgtggtcagaatgaacgattccaaaagcgtctcccatgcaaacccacctattgaatgcgtttccgcgatctccggtctcagattcgcgagtgaactttgtgaaactcgcaagccaagtcgtaggtcgctctcgaagcagtctggatgattataggtgtgtcccactttatttgagaactactgtaaacatatcgctcgctctctggcgagaaacaatatgtgctcactcgctcagtttgcagacatggcgtgaacaccatcctaacgccacgccattccagatgctgacatggatgtagcattgcagatactctcgaacctatggcccactcttgaccatagcagccattactgcctgaaccctttgatcttggctgcagctcctagagcactcaggggtggggctctacccacaatgttaaacgcttcaagggtgagaaaggtcggcgttacaaggacacaatagagcaaatgatcttaacaggaacactcatggcatcgttttcaacgggacacctgtcgtagacctagattctcgttagaaattatgcgtttcttgtgtaccaggtaatgtagataaggggaaatcgtgtgtttacgtactcaggtcaaaatatttgacaaatgcgttggcgtctcccgcagtatgatgatgatgagaagagccagatcatcaattttgccaccgtgaactgagctccaaacgactcgccctcttcatctccagcagcaaggcacttctgttgtatgtggattatacttatgttcctacggatcacattcagaggactttatgtgtgcacatgcgtgaagcaggaccatgttgggcaagaatgtggatggtttggacataccaggtcaccacagcactggttcctttttgcacccactcgactttcatgtcgctgtgcttccggggcacttgaagaaggcggagctgatggatctgttggatgatcacgtggcacactcacatgatgactcggtgctcgtgatcgtcttgtgtggtcatggatcctccggccaactcgtcatgaccaacggggcgaaggtgtcactggaggaggtgtcacatgcgacaatgcatcactgaggaacagtgtgtgcctttcatgttgttttgcggtgcgcggacttccgaggcctcaacccactgagagggatcaagacaaccacaacttcgacggtgcatgttcatctttgcaaccgatgacgctgtcttgaactcgcaaacactgaatgcatttgtgaaagcgatcggcagcatcatggataccgggaatgttgttactctgggattgaggacgccattcgctgtcacatgctgtgtttcaacggatccgtcttgcatctggtgggggcaaacaacgagatgcgaggttctttgtttcaaccgcattcgtcatgcagagagaggtgatctggcttgtgtgcccctgttctacatgtgagacaccgggatgcttcttgaacagtgtggagagacatacaccgcaagaactgtcaattcacctgcgacagagacattgtggggggcagctggcatcttcctgaattccgttcaaacagaaaaccttgatgtaaacaatcgcctctctctccaaccacaccacaggcctgaccaccatgcatgcattccaacacggtcatgccaccagccatgcagtgcgtgcaagcactaatgcggtcaacaaggatttgcaatcatcagacaaacatcatcatgtcgctcggtagctttgcaaattgagcaataccccagtcaaccatgatattgtgcggtgcaagcatcagtgttatgtacaaggatatctatcatcccaagatgacgacagtatgccaacctgacagatgacttcatctccaaaatgtccaacttgatgtcagactctccatcttgcagactccgtatcgttctttttgtcggtactttcgagagtgtccattgaaggaccagccgcacttaagcgatcgcctcttccccagtaccgtgtcccaaaagaacacggggtctttgttgatgtgcaatgcgtcatgtaaggaggtttctttgctggattttataggaccatccactcatacaatatatgattgtcaccgccttatatttgaatatgttaaaaatttgtgtatttgtgtagttgtgttgtggttgaataaatctcttctcgttttgccacgtaatatatatagcttgaacagttttatacaggatggacacaaagaccgtatcggagcttagggcgatgctcgcacccctcaagctgatgatgcgatcgaagaactctgcgccgccgggctgagtgcaccgaggcagctgctgctgctgtgcctcctcagcctgaacatccgactacgtatggcaattgttgctcgcactctcttttcatgcgcagttcagctcgttttggtataggccgattttgtaaaaccgttgaatttaagctacccgtatatcctaaaagactgaattctccataggggtatcataggggtcaactcccccgtggctgctgtcctttacgaacagggattttctgttcgaactgctttcaggaagatgccgtctcgcccgtgccttcgggaatgacgatgccctcagatggagtttgtgcgttgcttgtttcgcgcctacgatcacgatttctgcttcgacatgccccctcctgtgtgtgttgtggtgtttggtgtgtgtggtgtgtgtggtgtgtgtaaatcagtagtgtgtctgctggttgatgttacactgtgggctttacagcaacggaatactaaaatgaaaccgttcgtgtacggcccacctacggtgtaacctaatggtgtagaaatcccggggcagtggaacaccaatacgattttgaatcaacaaattgcaagatgttaacgagaatatcgtggttcttttttagatcacgctctccatcctgcagactccgtatcgttcttttgtcggtactttcgagagtgtccattgaaggaccagccgcacttaagcgatcgcctcttccccgtaccgtggcccaaaagaacacggtctttgttgatgtgaatgcgtcatgaaaggaggtttctttgctggacgggccattttgtaggaccatccactcgtacactataacgtctgtcacgcattatacgtttattgggatgtttcattttactgttccgccgactgtagggaacttggacatctccctccggtcgcccccacccgctcggttcctccggactacctttgtaggggctcccctctggtcgccccggttgctccgctgtggggagtgaaaggcctccgccgtttgcgtgtgtgtacatggatggctggatgtgaatcgcagtggacgtcttctgtcaagatatccaccgccaggaaatttactaaaattggaggagtaagacccatttaagtggaactttggcaaaattgttgacttggagtataatgtgtgtcccactttatttgagaacaactgtaaagcccaacatggccccaatggcagcttcacatatgcatgcactgctacgggtaccccactctgatgtcgagcggcaatcgtgttgctgcccgccagctgggtcgcaacctcggggtagcttcctcgtctgaaatgctggaagtttggcaggtgcggcgagaaggtgtggagggccaacctggttgggtccacaccggcctgaatccttctgcattggaaaaggtgcaatgttggccagcattgcggcggcgaggagtagagaataaaaaaatgccctttttatataattggtgtgttcatgtggcatgagacatgcttcttgtggcacgagctggccagtcatctatctggtcgacatgtatgtattatccttgactgcaatgctgctaggaagtactactgcgcaatctactccagcttgcggtatttgacgtcacagaactgtcattgcgaagtgcgtggaccattctgtcgcatgtgcactgcaagcagtagccattcccacgagcttgcgccaaactgatttcctacacaacaaaagagtattgacaacaggggctgactgggcagcacgcaagggacacttgcccctattgcaatggtgctgttgtactgaggaggtctgcacgacttatgcattcgacttggcagcaccaatgggcatattaacgttctgttgtggctgcatgacaatgcttaggcggcactaggacatcggccgattgggcgcatatactggtcacctacatatgtaaaatggttgtatgacaacacaaactttaagtgttctgagcatgctaccatgattgctgcaggcaatggggaccttgaaatgttgctgtggttgcacgcgcaagttgtcacatgtaacacgagttgtgcaaactttggattcgcctgcgagcatgaaggaatcatgcagttccttgaatccgtggatgcaaatgatcgctagacgaagcaaacactaacatcataaaaaatattcgacacatcattgagtgtgagcgactaactccgctcggaactgaagccggtacaaggaatcctgttgttgcatgagtgtacacacgacaatttgtttgactaagctttttcacatgtatttgatgtggctcccgcgtccaatcaggcagctctggtcatgttggatggcaaggaacctgacatgaagacgaaagaatgttccctaccttgtttttgccaagacggtgcattgcgaaattaggtgagtgaggggtcttgttggaccgtgtttacagtcaacggaatactaaatgaaaccgcttcgtgtaacctaatggtgtagaaatccactggcagtggaacaccaatacgattttgaatcaacaaattgcaagatgtaaacgagaatcttcatcgtcgtctcatctaatcactatgaagataccacattgagcatgttatgcatgagcagattccttccaacgtatggcgcagtttgacaatacacattcagagctgcttgtacccgcgccaatgagatctgcaatcacctcactgcaagggcatttgctccgttgcccacgacacagtggcttcgttattgcaattgctggaggaccaggatgctggccattggtcgttggccccaacaaacaccgtggtgcacaacacagctctggcttcgagaccttacccacggagaccacgttgttgtgatgatcgggcaggcgcaatggttatcacaccatggctgtatctcgccctcacaccagcgatacaccaagcatcgctaacttcagctcccccaccgggaatagcaaaatgcgcgatgccaaacttcagtttgtgcgctacgacgtgtctcttagctggacaccgcacgtttggatgcgtgccttgcagtggtgaggaaggagacgaggcgatgcaacgtgagcgagcagtcaacattccagtcgcttatccagttgccccatgcaagcttgacgagtaccaccttatcagatggaactgtgagtgtttcgcctggatgtgcaagacgggttgcgtgcacacatcatccgatcaggtggatcgcattctgcgcgccattacaacagatcttaggaaaggggatagatcgttcattctgcaggcaggcatgatcgcatcaaaatcttgtgtagtgtcttaaccccatagccacacgcaccctctcctggtattggttttgacccgggatctaatccaaaatattggagcaaccaaatcattgctccatgacatgttagccaagagcatgatggcctggctgaatgctaccgttgaatttaagctagtccgcgaggaaccgagtgggtgggcgaccgagggggggcccacagttcacatcaactacgtaacttttagtcttacacatgtgtacgttgtttgtaaaagattcttgggaggttgcaacagtagttgactcgtttgcttccgaaaataactaaacggcggaacgctgtcgatactcttgggggatcaatcatacatgtggaaacacacggtaaagtattcgcaaatgtggtcatgacaagcagagctctgctatacaaatctgtattcaatgtggtcagggtcatcatccaacggagaaaacattacattacgagtgtccatttacattacaagtgaattatgtccacacttctcaaacttttcagcaattactgacaatattcgccgtattcatggaaaaaatacagagaatggggtctagtcgacatagtttcgcacgatgaaaggcacgagcacgtgacttaccatgtgattccttctcctctggaggtgttcgcggtatcgctctgcgatcactcgaactgccttactgacgcgcagccaagacatgcaaatcacctggaagaagaactcatagatttctgtatctgtgcactgtatcagtgtatcgtccggtaagcagtcgatttcaatgtgctcgaatccaggtcgggtgatgtacagcctctccagtatgcggtagatggttggaacgtcttcggacataaacaagcttccagcgcaaccaactacttgtgtcggttgtccgttgttcatacaatggggcttgatagcattcagacatgtctccatcggtcttctggtccacgagcttagagaacgctaggaagaaagcgtctccgaatgtgaacatcacagctggattagagtaatctctaaataattgtacattggcgaactctctcagatcatgtactttgtatgcagcattagcaagttgcaaccatattttctcaccgactgttgacattattagttatttaacgttgtggatagagttggtttggttgtcttcttgctcagatggatatggtttcaattttttaaaccctacagtcggcggaacagtaaaatgaaacatatatcagatgaaaataaatgtacgacatcgccgttagaaaattggcgttaagaatggtcgctgacttgggtgtgttaaaaacttctgtgtttacgaacatcagtcgttctactctgtggaggtggaaacgctttggtgtaaatcgaaaacgacgtgaatttgtaagcaaaatttttgagacgaacaaagatttgttgaaattgtttttatcgtcaactcaatgcacaaccgcaagaggtgttgttgcatttttcaaaagtactcacaatttacgattatcaactaaaacagtgtatcgtttcataaaactcattggttttacaagaaaaaggagcaaactccgtggacagtgtaaaggggacttagttccacttgtcactgaattttgtagtagatacaaggatacaatcaatgctgggaaaattttagtatcagttgacgaatgtgggtttagtgagcgtctcaagccacattatgggtattcccctgtaggaaaacctgttatcgttaaaactactggtgggtgggtacaccatagtttgttgatggcagttttttcagatggtaggaaggagttcgttgtgaagaaaggatctgtgaagaagacggacttcgctgcatttattgactcattgagtttgtgcaataattcagtagtaataatggacaacgccagtatccataagaacttggtcctcagaagccccgtaaatatttgttacactcctccttacagtccagaattcaatgctattgagctgtgcttcgctaaggtgaagaaggactttcgtcgattgaactatataccaaacgatacaaagacgcacgtgtctgatatgatttccttagcattcagcaacctcactgataaaatcattatgggttgttttgaccacgtatggaacacgtatgtgatgtttgtataaagagttctgtgatgtataaattatgtaagatggcaacgaaacctccgacagtcgcgaaattgaaggagctactaaaattggccgaagtagcatactcctcaaaggacaagaaggacgatattgtccgtttatgcgaagacaatggtctcatcgccagaccccctccagagtacaagacggtggaaaagatgtgcgtcgtgaaatgcgccctgaagaaggcaatgagtcttgacgatgaagaattcggtaagttcagggggcatgtggatcagctcgtcaatgtggtgagccgcatgttacggcgttccagtctggtgctgactttccatgtcacgaggctcatggagggcgacctgccgattcctaatatgtacgatatgaaggatacctactggaaggattggctaaggatcggagttgacggcgtctttccagatgaagagagtagaatatcatacgaagccgtgaaagacgtaatcggaaaggtgcttgatagcgatgaccctgactacatcaactcctaccctatctatttcgaccaggttttgaactatgccggtcacacattgagcactgtcgtgtcgaacaacgcatgggttcctttggtacctcgtttgacccgcctcactaaggctactttgaaggcactgggagctccaaagaccatccgtgtgtacgacgtgatgagggtcatccaacaagaaatacaggagatggaatcttggccagagtctgttcaggagtacgtccgtgaagttcgagtcaggctgaaagttccagatggaagtcgactttatgatgactatggcaaagacatggacttcccgaccatggtccgcttcaattattggatgcagacacggttggaggctattggtgaacgtcgtatccggttgatgcccatctttaatgtccaacgggcgcatgtccgccttgacatgaagaccctcgtgaacctgttcaggcacgtgttccccaaagacccaaacatcgtcgagctttcaaagtgggaaaatgtaaaggatcccgaccgcttcatgttgcctctgaagcctgcagttaagaagaaaaaatcatgtggtcctggtgaatgggaggcatacaagttggcccaacagaagtacgatgctgacgttaaggatatcaaggctactgacgagtacagacatgcaaagggtaggtatgacacgctcgtgaacgcacgaaaaacagtcgcaggttccttcttcaagaaaccacctgtcaagacggggtgggtgttcgattgtagcatctgtactgacggagtctcattgagcatgcagtacagcaagacagtacaggttcgtgtatccgatctgaagaagacaagtaagaggtctcgtgacgaggaaggtatgagcgtctcagaacagtatgaccataaactcaaaacgacattgcccgatatgggtatcgtcgttctgggtgtggatcctggtaggagcaacatcgctacagttacgtatctggcagacgacaaaagcaagacatggaagcttacacgcggagctttttaccacaagtctggtatcaagaaacagaaaaaacagcaagaaaaacgtttctcagacatgattcctagatgggagtctctgcgtgaaaatggagcagcgttgagtacatccaggaaggatgatatctcggcttacttgaaaaattacgctacgttttccgacgagtggtggaggatggcactccgtcgcagagaatcccgagacaactttcagaggtacattggcaagcgtaaggctatggactcattttgggcagggatcaagcgcaacatgaagttggatcatcctgacctgagggttcgcatcgcatatggttctgcaatcaagacgatgaaggctacctgaccaggagaggtagctgtgcctacgggatctatgttcgcttcctgcaagcgcctctttaaagaggaggttcatgtgacagatgagttcaagacgactctcatgtcttgggaaaccggtgccaagaaggaatgtgtttacaagattccaagtatccaaataaccacggaaggtcagattcgtctaggttacgagttgttggggcacaccccattgaaggagactccaaaggtctcttatcgcgaccagttggcggtgagtgtgtactgcacacgtaaaaaaatccaagaaaaacacaggaggggtggcttagccccctctcttgtcgacaacaaatcgatcaagcggtaccctgaggtacgaggactgcgattctctccagaaaccagcacttactcggaccgggaccgctcctctgctctcacaatcgcaaggctgcactgcatggaactgttgggtcaagggagaccgcttccattttgcagggatgcgtgttgttgatgggctacaaaaaaacatgatggtgttccactgcaatgtgggttgctacaccataaggttacaccataaggtgtaccgtacactccagaaagcggtttcattttagtattccgtcgagtgtacctgtatgagtttgctcccccctccaccatgggcaaatgcgctcacctctcgtgcatgaaacaagcatgtgcgtgagcatattcaatggatacagcacgcagtctgcgggctaaatccaataaccgctctctcttctcattatatctcaactgtaatgatgaatctcaactgaatcccgtggtacccgagctggtgctcgtcaatcagtactttgcagtcacggacgccgacgccgacgtcgttctgctgaaggatatcaacgccttcgcccgggatttcaaaatgaacaaaaacaagtctcgagaaaaatgggggcgatgccggacacgaactgcagcgtcgctggcgtgaggggggggcgggggttcaagaaactgcgcttcttcacccccgatgccaaaacataaacgcaagagcgttaccgttagtattagccatccatctgatttacacctgtatgttagtcgaatgccggccttcattccatttcccccgatccagcagttcaggaacgtcctgaaagagttgccgtacgtcttcggaagcgcgatcccgcagacgctcaagttccgaggcacggtcaaactgcacgggacgcactcggacattgtgaggcacttcattactggaacccctgacttcgtcgacaccattcagtctcgaaacagaatcctgtcagtcgacaacgacaaccaaggctgccacatgtttctgactgcgaagaagtactccaatctgttcgatcgtatccaagcgatccatggagcagatataagatcgaacatcgtcgtatgtggcgagtactgcggtaaaggtgtgcagagcaaggtggccctttgtaagctctccaagatgttagtgatatttgcgatcagaatcgactatgaatgggttgacatgaccaagtacagcacggtgttctgtcaggaagaatggatcttcaacatcatgaactttccgacgtacgaggtggaagtcgaaatgagcgacacgcagcccgcgcaagactacatggcggatctcacgaactccgtggatgcagagtgtccgttcgcgtaccagctggccggcgtcaagggtggtggcgagggcatcgtgtggacgtgcgtggaccacccatcgtctcgtctgtggttcaagacgaagggcaagacgcattgcaccgccgtcacgaagcaagcggtgccgtcgcaaacagagtacatcaagactgtgaccgagtttgtcgagtccgtcacgaccgagtctcggttgagccaaggcatcgagtgcctggttgaacagggcgtggagttgcggatacatagcgtctctgagttttcgtcatgggtgtgccgagactagttcaaggaggaacgagacacgatcgaagaaaacggattcaatgtgaacgacgttcgtaaggcgttgtacaggaaagcagggaactggtacaaacaacgggtggcaaccgcataactcaatctcttgagcatgaagaagcgtaattgtgcatggtaagtaaattcaacttaagagaaacctgttgtttctatggcagccaacaagagcatggatgtaccaatgacaaccacgtttttctccttgccaccggacttgcgctcggtcgtttggggttgaacggtttaccacagaggcgactcggaatatcttcgagaacctcttcaacctgctgcacccccccaacgttgcccaaaagcaacgatctgcagtctggatgattataaggtgtgtcccactttatttgagaacaactgtacagttgttgccaaatatgttttgcacctcttttttgtaatcgagtataaatgttatgcccaccaatgtttggtgagagattgtgagataccccccctttcatttaaaatacgtcccatccccctgcccattcccagcccgatctttatcgcttcggaagcgtcccccctcccatcttcacctccccatcgtcccttccctccccaaggccacagaccccaccgcaccttcctcttacttcgcatctccacctccccatgttgcacctctcacgagcaacatgcggcagccaggctcttagtcgtcgtgccaccctatgccacattcgccccccgaccccggcctgtccccctcatcccgcgcccacccgcactttcggcagcagcaccaacaccatacgctacgtccgcttgtactgggatcagaaggcgcaatgcagtgcccaacagaatgggagcgggtcggttaccggtcgggagggggcgttgcccgatcccctaatcggtccttatgatggctgggtggatggagtgtactgcttagagatgggtgtgagagactatgagctggatcaatttggagtggtgaacaattccgtgtatgccaactacttccaacatgatcgacacgaggggttggagcgactgggtattgactgcgatgcctatgcatgagcaaacctagggctggcaataactgacatgaggctgtcatacaaggctccgcttagatctaaggacaagttcagagtgttagccggggtgagccgagtcactggcgctcgtgctgtcatggacgaggtcattctaaagtctgtgacgaatggcgacggtgaggaaaaggacgtggtgatcgcaaaatgccatgtcactctggttgtcctggattgaggttacaaggcgactaggatcccggctgcgatcaaggatgtatttacaacgctaatgcaagaggcaagtgccagctcaggagggcactctgaacactatatgtgctgagtggtacgatacgcagcacttgatgctctatgtgttgcaagctgcacgacactcgaagcgcgaggcacacagctggtgcaagaggcaaacgatgacaaacattaaattgttgtttaaggacatgttggtttcaggggatatcattcaaattatacagagtgtcccaacattatttgagaacaactgtatagacggcaatatatactgcctgggtaggcgacaagtactggcaggcagaacgacgctgggcgaccattagcgaatacatgcagtattccgaaggctacctagaggtgcacttagacgactcgggtggggcctgggcgcccttgtactgtcctcgcggcaagaacataaaatacagaggcaagcccgagaacaccgaaaactttagatgataaccccgcttgcagagttgggaggtcatcgacgcagtctagtcgtttaggcatttttcaggaatgaatgggcgttcctgcttccgaacggatttccaatcttacaatcacttttggggggtcttttgatgcttttcaaatgcaatcttacgataaaaaacgtaagattgtagtcaattttgacaaaatatgcttgaaatgagcttgaaagacggagaaacgtacagattgcgaatgttacaacgttgaaatgccatattttgtaacaaaaggtgttaacatcaattcgtgtcttacaattataattgtaagaaataaagggaaagcggacggttataaggcggcaggcagaattcagcttttacatcttacaataaaaatcgtaagtataattcatttaatttttctaatttagtaaaaaacggctatgtgtcaaacatcttactcctcctcctcccccccctcctcgtcctcctcttcctcctccttctcctcctccatgtccccatccccatcttcctcctcctccatctcctcctcctcagcaatgtctgcattgtctccatccgattgcacagcctctgccctggtgtccttctcaatggattgacaagctaggagcatgcttgtgtggtactttctctggatcttcatacccttggtgggttcgcagctaaattgaaatgcgtcaatgggaatatcgcccgtccatgttgcttttctcctaacccccacagtaataggcacaagcttgtggtccatccaatcttctggccaagttgggtattgtgtttcagtgtacaccaacttctgacccccaaagtacaagggctttaaatacacacattccacttctccattcactggtagtgattcgacctccaccacgtcccatcctctcaatccgctagagtcatccatttgtaccttgaccacagcgacatgaccaacaaccaaatcagtagtgggctcgtaggctattcttctatccggcttcgtcccttgtgaagaatataagtacaacacatcctcctcctctggcctttccatattagtctccaaagtgtgtgcaaccttcatagtcttggcaatctcgttacttgcaggtaaaatgtctgacacatccatggacaagtcatccaatgctgctatcaagcgcttggccattgatttctcagactgtgtcagaacacgactggttgctgacaactccgatgggaagtcgacaaaatgttggtctttcggatactccccagtcacagcatcatctggttgagtgctccaataactcttctcaactttgaagaaatcagtccaccacttattgctggcttcccaagtttcacgaagcatctcggcaatatgtttgaaggactgggcatgggatgggccatcggctgctggttcatccatcggctgatggtcatcggctgctgctggttctagaaccagaaggtcctccgctgcgtgttgtacacggacatcagctacgggtcctgcacggtcgtcaccggcggtttgtacaggaccatcggccatgtggcctgcaaggatgtcacctccgggcttcttgttatgaatagtcttccagacagccgcccagtttgcctcgatattctcgagctcttcaatcttgatcttgggggcttccttaaatactgttatggtgtccaccagtgggaagccttgaaggacgtaaataggttcagcgtcattgtcccactgtcctctccaagatcctgactcgtcatactccttgtaatagacccctgcaattgttggtgtgcaaacatgtattgtatattagtgaatcatttaggacacccatattcctcccgactatactcgggagcatcccttggataatacatcctaggtcctaggtacaacttcctttgtatcatttagtttctattgaagactgtacatgtaaatcaatgaggacatggcacacccatattcctcccgagcataatcgggagcattgtgcagacagtacatacacgcacggtagcatttaatttgtaaatatcagtatatcaagtattcttaccgactctcccgttgggacctttcgttatcttgaatgcgtgtaaacggcgattaactcctttgacggtgctagtgccatgtccgaacaacttgtaaacgttgtctaggaggacagcggagaagtcccctatagaggtcacgacgtcttgccttgtgtaagggcccattctcttgaataagttaccaacaatgcccatcagatggtccagggtgtacacttccatgttctttaacccttgcgagatcacagagtacttttggtcaagattgctatgtgtgtgtccgggagggaggaaatggacgtacacctcctcaaaccagttcatttcaaccagcaaggacaagtatgcgaacatgaaagcgttcttgttgtcctttgccgcgttgtccatttgcaagaagcaatacggtggaagctgctcctcttcttcaaggacccggttgaagaaatgttggaagcatgatatagtcagattgatggactgcgagtagaatggcaaagcccaataaccaatgaagcctcttccctgggagaataatcctgagttaacatagaaggaaacatgaagtcagaatattagcattattttgttaagtaatcatttcaagttttaaatactgtgtatgctcccgattatgatcgggaggacatgtcctacgtgcgctgtatttgtactcacacatgatgcgtgtctttagaagatcacctcctgcagtcttctttgtatgtgagaagtggcgtgactgaggaagattagtcttcttgttgtccattgcatcagcggatacgtgcaagaagagcttcggatactgttcagacagtttttcacagatgtcatacctacgccttgactggttttaggattgctttccccctacttttcttctccacgggaatatttgtctggcttactccttatgacttgtgttgtggaatcccaggaattctgggtaccagaataccagggattggggggaatgttatgatacagcctatagctgtatcagtaacggtgcggggcttaggtccgacacccactctagcagctggtgaccaggcatctgcctggcagctagcagtgtagtaggtgacttcaagcgaatagggtcgttgggtttgtcaatgctcccgattatgatcgggagaattgtgtgtattccgagtttggttttctcaatcattcgctcgttgggtttgacaatgttcccgattatgatcggaggactgtgggtattctgagtttggtttttctcaatcattcgctcgttgggtttgacaatgctcccgattatgatcaagaggactgtgggtattctgagtttggtttttctcaatcattcgttcgttgggtttgacaatgctcccgattatgatagggaggactatgggtatgccgagtacaaaaaaaaaaaaaaaaaaatgctgagtacatgttttctgaatcatttgctcgttaggtttgtcagtgctcccgattatgatcgggaggactgtgtgtattccgaatttggttttctcaatcattcgctcgttgggtttgacaatgctcccaattatgatcgggaggactctatgtattccaaatttggttttctcaatcattcgctcgttgggtttgtcactcctcccgattatgatcgggaggaatgtgtgtattccgaatttggttttctcaatcattcgctcgttgggtttgacaatgctcccgattatgatcgggaggaatgtgtgtattccgaattttgttttctcaatcattcgctacttgggtttgacaatgctcccgattatgatcgggaggactctgtgtattccgaatttggttttctcaatcattcgctcgttgggtttgacaatgctcccgattatgatcgggaggaccgtgggtattctgagtttggttttttctatatctgaatctgattttgaatctgaatctgaatctcaatcatttgctgaagtcaaggcagcccagttgcttgaagtcactagcattcggaggcccatgttaggagccctatcatggataccagttcacattcaggctcttgggttggtagttgacaatgcgcagcaagcctgtcagggtcggcgagggcgaatttatcgccgacaaagagcttgaggaaactagggcgtgggttgagacatgcgaaggaatgctcatgagcaatttcgaggagtttggtcctagcgacaggaggacgtcacctcgatgtacaccaaaagggccttcacctgacgccggtaagagagcaatcgaacggactgtattgctgcaccgtggctcaggttaaattttcaaatctgacagatacatttcgaatgttacgtacgcggtgggatgtacaccgttcgaaacaaccattgtgtgctgaccgcacttgccgctttcaatttcgataggatattgcgtaacttctgcactttttacatttcctacagcctccgcgaagaagtcaggaaaggcgcgacgaggtcagattcctacaatcaacgaagaggacagatcgccgacaactttgtaaggtcatcgtattcaaattgttatctccttatagcccagctcctgacatgggcctccgaatgctagtgacttcaagcaactgggctgtcttgacttccgcaagggtgagtgtcgaccagaatgctccgcacatatgcctgcattcgccgtgaaacctcaaccagtgagcgtgcgtagccgtaacatagaagtctggtccaccaacaacgacttcgatgttcattggcacttggcgctccttggtccattcgtccatgacgccacatcccaaatccttcccgtccgattggagtttaacttccactgtactgtcattgtagaccctgcggaagacaaataggttggtaaagcaaatgattgagattcagattcagattcaaaatcagattcagatatagagaaaaaccaaactcagaatacccatagtcctcccgatcataatcgggagcattgtcaaacccaacgagcaaatgattgagaaaaccaaattcggaatacacacagtcctcccgatcataatcgggagcattatcaaacccaacgagcaaatgattgagaaaaccaaattcggaatatacacagtcctcccgatcataatcgggagcactgacaaacccaacgagcgaatgattcagaaaacatgtacttggcattttttttttttttttttgtactcggcatacccatagtcctccctatcataatcgggagcattgtcattcctaacgagcgaatgattgagaaaaaccaaactcagaataaccatagtcctcccgatcataatccggaacattgacaaacccaacgagcgaatgattgagaaaaccaaattcggaatacactgagtcctcccgatcataatcgggagcattgtcaaacccaacgagcgaatgattgagaaaaccaaattcggaatacacacagtcctcccgatcataatcggaagcacttacaaacctaacgagcgaatgattcagaaaacatgtactcggcatttttttttttttttttttttgactcggcatacccatagtcctccctatcataatcgggagcattgtcaaacccaacgaacgaatgattgagaaaaaccaaactcagaatacccacagtcctcccgatcataatcgggagcattgacaaacccaacgagcgaatgattgacaaaaccaaattcggaatacacagagtcctcccgatcataattgggagcattgacaaacccaacgagcgaatgattgagaaaaccaaattcggaatacacagagtcctcccgatcataatcgggagcattgtcaaacccaacgagcgaatgattgagaaaaccaaattcggaatacacacagtcctcccgatcataattaggagcacttacaaacctaacgagcgaatgattcagaaaacatgtactcggcatatatattttttatttttttgactcggcatacccaaagtcttccctatcgtaatcgggagcattgtcaaacccaacgaacgaatgattgagaaaaaccaaactcagaatacccacagtcctcccgatcataatcgggagcattgacaaacccaacgagcgaatgattgagaaaaccaaattcggaatacacagagtcctcccgatcataattgggagcattgtcaaa

SEQ ID NO: 184 - DNA, 21545 bp, unidentified
  source 1..21545: mol_type = other DNA
  misc_feature 1..21545: note = Fanzor polypeptide
agcattctcagtgtaaagtttacaaattgtggatcattcatgaaagagattgcacagttggccgaacaatgctcagatgtttacatgttcactgaaaacccgaccgtgattggccggatcccaaacccgaccccacacattgaaacattgatgggtcacattgatgggtcacattgatgggtcacattgatgggtcacattgatgggtcacgcgagcatgcaccatcagttaagccacaacacatgtttgaactcatcggctggttgccccaactgcatgcccacctggtgtgtgtatgcagctcaggaggggaactgccagagtgggctttccagctcgtgcatgtgagcgaggtgcagtacctacatggcctactcagccatctcgggcatcctgtcgtacaccttcatggttgcgctgtcaagctcggtaggaacaagctcactgtggacaacccggaatccctcgacgaccctaaacccacctattgtgcccctgtaaccactcaacgaggagaataaggttcgttaaaagttgtttacaccacttaaggttcgttaaagttgtctgcgttgcttacaccacttcattcgaggacgtgtgacgacgagacgaggagtgacgagaatccgcagccgtgacatgtgtgtgtgaggatgaatgaatgaatgtacggacggacggggggatgcgcaatttgggtcaccggtaaggtgtcccacaatttgtgtctccgactgtattcgttctgtattaaaactttacgaacatcagtcgttcgaagttgcggccgcggccgcaatgcgtcgttttctgcgcaagataagaatgacgacgatggtagcaatcaaaatcgtgccctgacagactcccaacccgacgcccagcgcgatgctcgaactgcccccggatccgtcttccgatggcatctgaggtgtgggcgcatccgtgatgatgggggggggcggttcaggcacgggggacacggaggcctctgtgatcccccacatgttcttgaaggtctcctggaacacgatgttctccgtcgcgggtggttcgttcgcgtaccgaaccgtgacgtccacgaccaccgaccccgggcgtatgcccgtaattgagacgagctcgttcgggacgtccatgctctttgcgatctctgcgcgcacggagtcgttgaagactcgcaaggccttggggtcggtctcgaggatcgagtaatcgattccgctgaaggctatggtgaggcgcgatgcatagcacctgggtatgtacgggtcgtcgctgtcgcactgggtttcggaaatgagcgtgcgccagtcgtggtttgtcgagggcagggtctgcgccgacgatgagtcgctcccgaagactgtccactcccattccgtgagcgcgagtctggtgtcgggtggcggcgaggaccgcggagtcatcttgagatcgatgtcgatgatgccgttcagctccgtgcggtacaaaatagcgcgcgcgacgtccacgcagtcctcagcgcttcgccccccagggagtaccgttcccgttcccgacgggcacaggacgcaccacgcggcgtccgcggccgcgaaggtgttcagagggcaaatgcggcacgtcgggttcgcctccagatccggcgcaaaccatccgggcgcgcacggccagcaggacgcgccgtcgcccatgcgccccgcgccgcatcttgggcaaaaggaggcactcttgtctttgcgcagcgaactgctctcaccggggtcgtcgatatcccccctgtagtcctggcccagcctggagtcctggtcgctcttcgtagagaagcccgacgggcagggggtgggcgcttccagcgctgcgatcagcgtcgcgacgacctgccccacgggggccgtcacgagaggctgcatccaccagctctgcgggacaggcaccagccagtatcgcatccctagggcgcgcgagagctgcatgaagtcccagtgcggatcgaatgtgaacatcatttcgataaggggcgtccctggcgcgcagaacatcgcgttcacgaggcccgctccgtggaagcccaccacggccgccgctcctctgaagagcgcgacgatctgcgtcggtgtttcgcggtcggtgaagacgacgagcgggtagggcgacgcgtggcgcagcgcctcgattagctcgtgctcgttgcgcagcctgcgatcgctcgacgacccgcgggatgcgtagagaacgtagggcctgtcgttttcgacccgcgggggcaggtgcgcgaggacagctcgtaccagctcggggttcgtgtagccggtgtgccccggagacgggacgaacagctcgtcggcgtggtacacggtgtggtggtcgtactgcacgattctgtgtgcgggaaggtcgaatagtgtctggatccacgttgtgtcgttcttccagacgagaagcttcacctaggggtctgcgcgcaggagcgcgatgcccttggcgatcttggggacgatttcgtacatgaaatggaacgtcatgaacccgtagctgtggaccaccgagaacagcttggcgtggctctcctcgcggggaaagtggcgcaggcgttggatcaggtcgtggaacggcatcctcggttccgagacgagcgggtacaccacttcgcgggcgtgcgggacgagaacgtcgcccaggggaccggcaacgagtgccctgtcgtaccgggtgactccgatgacgggggggtacgggcggtcctcggggttctgcacgaaccacgcacgcagttcggtggtcagcacgtcggcattgagcacgctcaccttgaggtaggtgcacgagataccggttacgaaaatcagggagagggcagctatgggaagccggtacttcatggtaactctaagcttaatataggtggtcggtcatgtgcgaaggaagagagagaacaaattccttatacactgttaggtttacttattttcggaaagcaaacgagtcaactgttgcaacctttcccttggtggggcgcgttatcaatgcgcccgtcattgtagttctcatcgacgcagtcactgtcgtttaggcatttttcatgaatgccttaatgccctgtatgctactcaattcctgtgtggttgtgctttcttttgttccttcccacgcgacacctgtaatttcttgcatcttagcgtatgcatcggctccttcaaagatctcatttttgtacacgattgctggaaacttcgtgatcctcaacaacttcagcaggtctcggacctcgagatgtgataggtcattgacaacaactctcgcatcctcgcattccaaccaagaaatgtaatatgttgcaaacaaccgacagtgttcgcagttgctgctcaacaccacagtccatccggtagctgggacagttgtcgaaatcataacctcttaatgttgaaccaatgaataataatataattagactacattttgattacgataaaggtggatcatgcgcagtgcctactggcaaactggtgtggacgcagcaggaggaggaaggttgcaacgttttacttgtcagatgcaacagttgtaaagacaaaacaggaacccccccaatctgccccattgtccatcattcgcacatgccacaacggctggctgccgcatgccccatgacctttaaaaacttacaaaataaattaaacttataatgattgaggatgagaacaaccatgtcgtaggatgtaatgataatgataatgtaaatacgattgggtttccctgaattttgttatttttcttatttttgttacttttgtaattttggatggggaggaccactacttcactgctgctgcacccacatgcacttcactgcacacaccgcatcatcatcatctgttttaactgccgctgcacttcgcctcccccctcttaaaatgaaaatggtcatgagtctgtgctcttctcaatccgtcttgcgacaccccattcttctcccacgatttccgcctgtttgtcacagtccatacgtagagaccggctacatttgcatgcatgcattgatgcattcggtagatgtgccaaagagtttccgtcatcctaatggggctcctctcagtgccttgcacaactgctgcttgtccagcccccctgcgtacaattaacacgaacaaaattgtgatgattagtaaaaatggatcctgagacggttgttctagttggtgctggcacaggtgacatgaaaatgctgaatatcggcttgtgtatgcagatgagtgattacaagacctgcatacaacaagcactaactttgtcatgctcactaaacaaactagagagtgtcctcgcactgatttctgcaggatcgcatccaactaattgcgatctttctgcggcttctcgaaacggtcattatgatttagtaaaaacattacttgccctcccaggtgcacaatttgatacaagtactgcatgttatgtcgcacaacacaacgggtatcatgatatagtgaacctcttatcatccaacttgcctgcggcctgccgcttgcagagcggcaaagacgagggcatgctcagaggaagcagcgcgtaattcccgggccaaaaccaatacctgctctcttttcacttcgtattcgatgtctgaagatgtagacaaatttgcaatttcttgcatcaaccgctcctgctcttgtgacaggaatttcacatgagcattgaggccttcattatgtcaagcaggaggagtcgtgtgatcttctcaatcttgctacaccccccaacccaattcttctcacacgctttccgcatgtttgtcacagtccatatgtagagaccggctacatccatacatcgtattgtctgctgcatgcatgtgaactgtgggctcccctccggtcgcccacccgctcggttcctcacagacttcccgtgggggctcccctccggtcgcccccggtcgctccgctggggaagatgtgaaaggggctccgccgcttgttgaatacaagccctctccgcggtgcccctttaaggaacccaatatattctgcttgtgatcgtgaggtttctttggatgacccctgtacaacagtgaatacggctgcgtcagatgcgtcggcgtctcattcaaaacacggaaacacaaaaaacacgccaatttactaaacttgttctttcgttcgtgaaacatcgcatcgcttcatcagacaatattaggaaaaaaagttttaaatttgtagtacagagattatcttgcagctgtaaacaccaagacggaacttggcacctgatgttcagggcacaggcgcatgaggcacatgatctgctgatcactgtgctggatgactacacgccatcgcgtccgcagtacaagccatactgggtgagtgagagttactgttgtgggtgaggatggacgagtagtggacgacgagcccatgtccgacgacgagcccatgtccgacgacgagcccatgtccgacgatgagcccatgtctgatgacgagcccatgtctgacgacgagcccatgtctgacgacgagcccgagcccgagcctgagcccgagcccgagcccgaggcccagtccgatcccgaggccaatatatataagccggcccacacgtttgaagacgtatccgggctactggtgaggaccgggatgttagaaacgttcctcgcaaaagggcctacccaggcgaccatgtccaccacctggtggaagtactggttgtctaacgacgccattgacatctggttagctggatgttggccgaggaatgaacagaagatgatgatcatgcggctgcatcccgacaaggccaaggtcttgcgcgatgcgcgcatgaccgatgatgatcacaggtggatggacaaactgtcccagaatctgaatggtgcactcgacgtgtcgagtcccgagattcccgagattccccgtgagatgttcgacatcatctacttgctcaataaggagcatccctccacgctgactttggattaaattgctgcgtataattatattttttcgaaatgcggacttcatgtgtgcgttgttcagtatttgtatgggtaggttgtcgagcaggagtctgctctgcttgaattcaaatgtgagaatgagtatgcgcaagtcaccgtggcatgcccccaagggagataatctcaaggaggggtgatgtttccatcgccgtagaaatgcatacacgggctgtgcggaaacctagcgagctgcgatgccaactggctgacccgggcctccagacagtttgtcttggctgcatcctgtacagctttggctgacatgacattggagttacagtcaacggaatactaaaatgaaaccgcttcgtgtacggcacaccttacggtgtaacctaatggtgtagcaacccacggggaagtggaacaccaatacgattttgaatcaacaaattgcaatcgtggttctctgagcgcgctcgaaataaggcataaatgaaggagcgcgcagaagcacttgagaagcaactgaggtacgaactgtcaagcatgactgccgagcaatggaattccctgaacgatcatgacaaagtagtccaggctccttcaggtaatgccagctaccaactgtgggtggacaagtacaagccaacaaacactaaagagctggtgggaaacaacacgctgattgccaccctcaggatgtggctcagcaactgggatggtgtaaatctgcgtggccagcaaccacaggcccctcctggcagccggaagaatcctaaggacctgtccaagaaggcggtgctgctcagtggtcctccgggaatcggcaaaacctctgccgcccatatcttggccaaggagtgtaactttgagattgtggagatgaatgccagtgacacccgtaacaagtcggattcaaagatctcagctggcatgggagggaagtcggccaacatgatcaaggagatggcaaccaatcgatctctgttggttggagctgatgggaagatgaagaagcagctgctgatcatggatgaggttgatgggatgtctggtggtgaccgtggtggtgtgcaagacctgatccagacgatcaagtcctcaaaggtgcccattatttgcatctgtaacgacaagtggaacaagaagctgaaaagcttgcggaactactgtgtggagcttgacttcaggtcacccaccctacagcaagtcaagataaggatgatggagatctgtcgcaaggaggggctgactgtcaatgatgccaccatggaggccctggccaagggagccaatgccgacctacgctctatcctaggacagctgcaaatggtccgtcttagtcgcaccaccctgtcctacgatgacgttaatggcagacaggcatgcgacaaggacagtgacctttctcctttcgagtgtgcaagaaagttgctagagcctgccagctcaagcatgagcattcaagatctgctgaacctagctatggtggacgacatcgtccccctgttgatccaggagaactaccttaaccaccgcccagtaatcgcaggaaatgatgagcagcggatgagggcagtggcgaagtcagctgaggccatatctgcaggagatgtgatcaatacatctgtgcggcgctacatgaactggagccttatgcctgccttcaacacgctttcatgccttgtgccgggggcttacatgcgcggcgggagggacgccttctggccaggcgacaactactctcgcttcacctcatggctgggcaacttctcaacctcaaacaagcaaaaacgcttgctgggagaactcaccaccaccatggcttccagcggccacatggcttctagcagatctcccgtgcggttagagtacctatcagccatgcgcaccctactgacgcgttcactagtgactgatggagagagtggtggcatccagcagagtgttaccctgatgcaggactactgcgtctcccgggaaatgtttgactacgtgattgacgtgaccaagttcaagaccaaggccgattggggagaggaccccatgaaggatgtccctacaaagattaagagcgcctttaccaggagcttcaaccgacaaggcctgcatgcgaagtgcggtgcaatgctctctgcacctctgaagggcaaaaagggtaagaagggagctgccggagcagaagacggagcggatgacgatgaggacgagtccggtttcgagaagcttagtgcaggcgttgcatatgaagacgaggacgcagatgatggcgacgagatggtagcggatgaagggcaaaaatatgtactcgcctttagctgatctacccattgggttcaagggtcaccggtagggcgtcccacaaattgcgtctccgactgtagttgtaatcccaatgaaatcagtaagcggcaactactttcgagtcggagcactccttcgcgtttgccatgctcataattgtttagggttttatattgtacatttcaaaacacgatcttcagacatggattacttaccttaccagaatcccacgtacactgtagggtccattgtaacaatagacaacccaacaacgcacaacgacttggataagacaacaagtatcgttgggctagtatacgaggcttacattcacaatggatttccgatgtatggtgtgctgatgagaaagaaccatgcgtgctatgacatgaaaaatttcaagcaatcaacctcatgcttgtcaagtgatatatgttgccaacacttggatgagaaccgtatcacaacacttgatgtcaacaacaacaacaccaacaactagagtggaatagtcatcactttcgggcaaagcatgatcagcatgtaatgggcgttcctgcctcccggccgattttgactggttgcgaaacatggtatggagcggatttgcgattccttggtgctgatgtctcaagctagcgagtcgttcaggagtctctaaatcctgattagaaatttaaaaaaatcggccgggaggcaggaacgcccattatgtcgggcatgaacaatgtgtcgggatcgagacacttcacacactccggaaactttaagcccacgccatctacaacacacattgcatataaaaaaacaggcatctacagtcggcggaacagtaaaatgaaacatatatcagatggaaataaatgtacgacatcgctgttacaaaattggcgttaagaatggtcgctgacttgggtgtgttaaaaacttctgtgtttacgaacatcagtcgttctactctgtggaggtggaaacgctttggtgtaaatcgaaaacgacgtgaatttgtaagcaaactttttgagacgaacaaagatttgttgaaattgtttttattgtcatctcaatgcacaaccgcaagaggtgttgctgcatttttcaaaagtactcacaatttacgattatcaagtaaaacagtgtatcgtttcataaaactcattggttttacaggaaaaaggagcaaactccgtggacagtgtaaaggggacttagttccacttgtcactgaattttgtagtagatacaaggatacaatcaatgctgggaaaattttagtatcagttgacgaatgtggttttagtgagcgtctcaagccacattatgggtattcccctgtaggaaaacctgttatcgttaaaactactggtgggtgggtacaccatagtttgttgatggcagttttttcagatggtaggaaggagttcgttgtgaagaaaggatctgtgaagaagacggacttcgctgcatttattgactcattgagtttgtgcaataattcagtagtaataatggacaacgccagtatccataagaacttggtcctcagaagccccgtaaatatttgttacactcctccttacagtccagaattcaatgctattgagctgtgcttcgctaaggtgaagaaggcctttcgtcgattgaactatataccaaacgatacaaagacgcacgtgtctgatatgatttccttagcattcagcaacctcactgataaaatcattatgggttgttttgaccacgtatggaacacgtatgtgatgtttgtataaagagttctgtgatgtacaaattatgtaagatggcaacgaaacctccgacagtcgcgaaattgaaggagctactaaaattggccgaagtagcatattcctcaaaggacaagaaggacgatattgtttgtttatgcgaagacaatggtctcatcgccagaccctctccagagtacaagacggtggaaaagatgtgcgttgtgaaatgcgccctgaagaaggcaatgagtcttgacgatgaagaatttggtaagctcagggggcatgtggatcagctcgtcaatgtggtgagccgcatgttgcggcgttccagtctggtgctgactttccatgtcacgaggctcatggagggcgacctgccgattcctaatatgtacgatatgaaggatacctactggaaggattggctaaggatcggagttgacggcgtctttccagatgaagagagtagaatatcatacgaatccgtgaaagacgtaatcggaaaggtgcttggtagcgatgaccctgactacatcaactcctaccctatctatttcgaccaagttttgaactatgccggtcacacattgagcactgtcgtgtcgaacaacgcatgggttcctttggtacctcgtctgatccgcctcactaaggctactttgaatgcactgggagctccgaagaccatccgtgtgtacgacgtgatgagggttatccaacaagaaatacaggagatggaatcttggccagagtctgttcaggagtatgtccgtgaagttcgagtcaggctgaaagttccagatggaagtcgactttatgatgactatggcaaagacatggacttcccgaccatggtccggttcaattattggatgcagacacggttggaggctattggtgcacgttgtatccggttgatgcccatctttaatgtccaacgggcgcatgtacgccttgacatgaagaccctcgtgaacctattcaggcacgtcttccccaaagacccaaacatcgtcgagctttcaaagtggaaaaatgtaaaggatcccgaccgcttcatgttgcctctgaagcctgcatttaagaagaaaaaatcatgtggtcctggtgaatgggatgcatacaagttggcccaacagaagtacgatgctgacgttaatgatatcaaggctactgacgagtacagacatgcaaagggtaggtatgacacgctcgtgaacgcccgaaaaacggtcgcaggttccttcttcaagaaaccacctgtcaagacggggtgggtgttcgattgtagcatctgtactgacggagtctcattgagcatgcagtacagcaagacagtacaggttcgtgtatccgatctgaagaagacaagtaagaggtctcgtgacgatgaaggtatgagcgtctcagaacagtatgaccataaactcaaaacgacattgcccgatatgggtatcgtcgttctgggtgtggatcctggtaggagcaacatcgctacagtcacgtatctggcagacaacaaaagcaagacatgaaagcttacacgcggagctttttaccacaagtctggtatcaagaaacagaaaaaacagcaagaaaaacgtttctcagacatgattcctagatgggagtctcttcgtgaaaatggagcagcgttgagtacatccaggaaggatgatatctcggcttacttgaaaaattacgctacgttttccgacgagtggtggaggatggcactccgtcgcagagaatcccgagacaactttcagaggtacattggcaagcgcaaggctatggactcattttgggcagggatcaagcgcaacatgaagttggatcatcctgacctgagggttcgcgtagcatatggttctgcaatcacgactctgaaggctaccggaccaggagaggtagctgtgcctacgggatctatgttcgcttcctgcaagcgcctcttcaaagaggaggttcatgtgacagatgagttcaagacgactctcatgtcttgggaaaccggtgccaagaaggaatgtgtttacaaaattccaagtgtccaaataaccacggaagggtagattcgtctaggttacgagttgttgggtcacaccccattgaaggagactccaaaggtctcttatcgcgaccagttggcggtgagggtgtactgcacacgtaaacaaatccaagaaaaacacaggaggggtggcttagccccctctcttgtcgacaacaactcgatcaagcggtaccctgaggtacgaggactacgattctctccagaaaccagcacttactcggaccgggaccgctcctctgctctcacaatcgcaaggctgcactgcatggaactgttgggtcaagggagaccgcttccattttgcagggatgcgtgttgttgatgggctacaaaaaaacatgatggtgttccactgccccgtgggttgctacaccataaggttacaccataaggtgtaccgtacactccagaaagcggtttcattttagtattccgtcgagtgtaaccttcaatacgacttgccaccatgtttactggtacactcggacaagggaattatgttacataattcccttctccgagtgtacagtgtacgcgagtcatcaaatgaatccaatccaatcaaatcctctgccccgctccgcggtgcccgcgctcccccttcagaaaccaatcgagcaggagtctgctttaagcctccgtgtgaaaatgagtatgcgcaagtcatcgtgatccccgcaatccgcacgactgccgacatgatcgatcatgtatgtatcatcttctgtgtcaagtttaagttgttgtttgcatcgagttcttcatgaacacagatttgatcatgttggagggagttgtcaattgagcattgcctagtatcataaaatccgatagaccaagaccaatctaaactgttttgtgtggcatgcttcatgtacttgactacctcatcgcatgtatttggaaattgtgcaaattgtgatgcaaacccatggaaattggtgatgctgtgtttggggaactgcattgagtgggacatgtcttcataatggtttatcgaaaatcctcgaagcattttacagttttgaagcgaacaccaatcgacatcgtataggaaaaaacgcaactccagaaatttcatgtttgggaatgtatcaatcaatgcttggacatcaccttgtagtttggacttcatattgatgtcgccatcccaatatcttgcttgtggaaaaatatcttcgccgacaagctcgacacaaactgcattgctaattactgttggatatgatttcaacagtaaacaacctccactctggacctcgattgttatgttatccactgattcacctcccattttcacaacttctgcaatactttgtgtgcaccctcgcttgacgtaaccgatatgtgtgatatccatattcattttactgttccgccaattgcagtagatgccctcgttacaaatcgggtcatttggcatctttaccatcaggtgatctgaactcgcctcagcctgaagatctccaaaatggacatctttgaccccagtgcaaatcaagttggacgtacctaacgcagtgatgagagaagcgtaatctgtcattctatactgtatgcaaaagaattgggagttgaatgagcgaacgtgtagatagatatgaaaatctttggggggggggaagagatgtcacgattaaccaagtttgctgatgctgtccatgaacgagatggaacttggtccatgaacgatatggaacttggtccatgaacgagatggaggcggtgtcgcgtgtgtatgtgtgtgtgtgtgatttcagtagactactggtgtaagtgtagtgtgtctactggttgatgtgaagtgtgggctcccatccggtcgcccacctgctcggttcctcgcggactcctttgtgggggctccccttcggtcgcccccggtcgctccgctggggggaagaggtgaaaggggctccgccgcttgcgtggtggtgtgtgcatcttattcctattcagcacatttgcggccagctggaattcatacttggcttttaatttgtttaggcattgcacgccacatgagtctttgtattcactcagttgtataattatcccatcgccatcagctgggatactgaatggatgtgaaactgctacaattaaccgtgttccagttttgacatgcagtgatatagcatcttgtagtagcctgtctgtcgaattgaaaatgacgttgtccaaaactataatattaaacccgattaggctatccagggtgtctcgcatgctcataattgcaattggggaatgcagtttatgatgagttacgtcatggtctgtctcacaaaccaccaaagtggattcaccatcccctatttcgtttgtgatcatgaagctctttccagtctgcctacgcccgacaatatacatcacatgagggtggtctagaatggcaagatctgtgcatggtggtggaatgacgtgctcagacataaattattattattattcaaatttactttattctctttacattcgacgttttccatgcactttgtatttttgtaatattaccacaccaagtctgtccctgtttccactgtagatacccacgcataccgagtatgaacccaaacattgcatgggatattgtacaagcaaacatcgataaaccatggaattggtttggcttgagtagaaatcccaacatcacatttgacattgtgcaagctaacccagataaaccataggattggactgtattgagtatgaacccaaacaccacgtttgacattgtgcaagctaaccctgataaaccatgggattggactgtattgagtagaaacccaaacacattactgctattgtaaaaattgtcacaatctagaacaaaaacgcaaatcgcattctccaaatccagccatagcaaatcattgcactggggtacaacaacatcgcaacttgttgatgcgcagatgacgtggctcacgcacgacctatgattgggagtaagatctgtaaacctgtcatacaacacaaacatacgatgttttagactaagggcattcaataacacaacatctggctcaatgcgcacctcctcaatgtcatcaaatgcatatgctaaattcccattctgcacacaaagtatgacaaatggaatgtgtttgtgagggacaaacttaaatgcgtcttggacagtattgaaccctgtaagcacacacactgtcggctgcgacaatacggatgcctcatttacagaagcgttggttgccatacatggcattctgatatctagtacatgcaaattccttatacactgttaggtttacttattttcggaaagcaaaagagtcaactgttgcaaccctttgacaccatggacctacatcgcgcatggaattgaattagtcatgtgtgtgggtcagcacagagagatgttattgtattgcatgcattgtggggcacaacgcgcaccgcgtctattcatgagtgcacgagcaagcagcacgcacttgaggttctcgatctcttcgtcctgcttggaaaccaagctcagcgcctggtttagtagacgatgttgctcatgcgcagactcctccgtctgagccagtagcgttttgtacgctcgctgaacagcgtcagcacgcaagcgctctgcagccacggcatcagccacggcaacagccacggcatcatcgagttgggctttcgtgtacatttcggccatgctcagtcactgcacatgcattgccttgtctggggctgggtccctatactcaaattcttcgctcacgaagaactcagtgtgttagggagcatccagcgaactccgaaagtagctttgcatttcagtgagtgaatttggcgattacgttacgtgtgttgttgttgtgctggctctgttgagaaaatcatttcgttttttttcgaaacgtagtctatttggcgcgcggggtccgcgttgcctcatccgcgtttccgattcggtccgtcccccccccccctatttgttgtttttatctgctaaaaatccgttgcatttccatgctaaaaaaaaattgacgcctttttccttcctttgaaaccaccacaacaacaacaacaacaactgataaaccccaactcaactgatatcatgtctaccaacaacatgtctacaaacaacatgtctgccaacaacatgtctaccgagatcacatcattcgtgaatgatacctgtatattcaaagttgtcctaacgacggaccgaacgaagctatccagcaaacccaccgtccctcaattgaaggacatctgctacaagataatttcatttccccgcgttcctgcgtgcctcgcagaccctgtctgcgcaatgaaaattgcgtacgctaagtttatcaaagattcccccggcgcggagaaaaagcctttacagctaatgcttctccttgttgccgtcgctgctgcaaatgccgtcgcttctgcttctgctgctgctgctgctcctgctccttcctccttgcttgccctcgccagtgcccttgccctcccagaggacgacggccccaccgaggacgtttgcatgtcggaggagtgttccggtggtaccaagcgcccccgcaccacggtgttactctctgtggctcatgctgctccggctgcttctactgctgcttctgcttctactgctgctgctgctgctcctgctgctgctcctgctcctgcttcttctgcttctgctgctcctgctgcttctcctgctggctcgttctcaacgtgctccctgtcctcctccttggcctccggtcgtgttggtcgcgggtccccgctgaagaacgagctgcaggttggtgccaatataggtacatttaccatcgtggggtattcccccaccctgggctgcactgctgtcaccactcaaggcaacccgtgcagccgccgtcaagttctcgttaacaaccccgatggtggaccccccttcaccacgggcaagtgcgcgcacctcgcgtgcatgaaacagactccctcacagcgtgaggcgtacctcgccaagtagcgagctacgctcgacgagcttgcaattgagcttcgctccctgtccctcagccagcagctttaattagttatctttaattagttatatagatactctttaattagttatatagatactctttaattagttatatagatactcttttttttgctacatttcttagagacgagaaaaaatggtcctgcctgtatgtactgtactgtaccgtaccgtgtgaattcccccccctccgtttgcgtgcgtgcgtgttccatgcgtgcgtgcgtgcgtgtctattgttctcctgacgtcgtaggcggcgtcatgctccctcctcccctcttgcacatacaaccaaccaaccaccccaccaacttgctccctccctgcctgcatctatcatccgcggcgtcgtgtgtgtgtgtgtgtgtgatttccgttccgtaaatcagtagtgtgtctgctggttgatgtgacctgtgggctcccctccggtcgcccacccgctcggttcctcgcggactcctttgtgggggctcccctccggtcgcccccggtcgctccgctggggggaagaggtgaaaggggctccgccacttgtttaatgtggtacggtggttctcatccattgacaagcagtttttaggttggttgcttgaggattagaacaaccgtgatgtgtaatgataggtttccctgaattttgttactttcgttatttttttattgggagggccatagcggcacatgtgccgacacaggtgccgcctgatgcgaggttattttacgtctgcatggcactggatacaccactctattttatgtctgcatggcactggatacaccacgctttacagtgagaaagccgtgatgccgttgctagcagagaaagcttgctgcttctggttgtggagccacaggatgtcgacgccacagacagccagcacctagctttcaatccacacgatgaggaactcattgttgtagactgggacgttcacatcgtctccggtgcgcaatgagacgttgacaggcatcggcagcgggttgccgttctcatctgtggtatagatcttcgcaacgttgttgttgatcgcctccactcggacctggagctgattggtgatgttgaagccgttgacggtggcattcttgtacgagaagcaccccttggctgtcatttctgcacagcataacgtagtcatgtcagtgttgtgcattaaaactataaaagtttacagccaacagtaaacacacactacttcacttttccgtcgcttttatctcatggagacagatggacgatacaatgaggatgcgcttgccgccgcggtgtcttttggagacagatggacgatacaatgaggatgcgcttgccgccgtggtgtcttttggagtcagatggacgacaatgaggatgcgcaagccgccgtttgcgtggtgtgtgcatcttattcctgttcacttgcgtgagtcgtgagggctccccttcgtatgttgcttgttccgcgcctacgatcactatgctacttctgcttgaggcgtatttaatgtgttttgtgcattttgagaggcacgtaaatacgcacaaggaaagcaccggagggcttgagttggcatgaatgtgccaaaaactcagacgacatctgggtgattttaatcagatcagatgaatccgacgtctcgccaaattgtataaagggtttacttgagaacaactgtaaactgtacagctcctccatccatacaacgaaatagacaccgtgcgaggaaaacaaatcaggccaaaccatttacaataatagctcgaataacgtcggaccgttttgtagggaaaatcaaatatggacaaatgtctcatggtcattcaagcatccactcaacgtgttgctgatgtggatagagttatttcacgtgaagcctgctataatatacctgagagtctgagcaatgagatctgtgaagacttcaacgacatagaaattgatctgcctcacatgcgaacaactggagaaccagggagattgttggtaatgaaggaaagttctttcttgcatgcaatttgtatcatgtgtcaaacatgtccacgtgacatcgaaatagccctcatatctgttgacttcttcagactacatccaaatgaaatacacttccttcatgtttgcaataaacataaattgcatttgaacaagtatctattcaccaattaatcttgctggctgtgaagaggagaataaggttcgttgcagggtcttctgcgttgtttacaccccttccacgagacgatgagtggcgatgatccgccaccgtgtgtcatgaatggacggccggacggacggtgtggatgcgacagttttccacagttttgcgtgtgatgattgataccttgacaggtttctgtagctcaattcccctgccccactccgtggggcccgcgatttccctatcgatatacgatatatattgtctagcagacctctgcttgacatgtgatcaccgtttgcgattactttaccgagttttccgtaatcgatgagagtgctgtcaaggtagccgccaccgcttgcgaagacgagcagttcctctgtcaaaagaggaatcgtcagactctctccttccaagctgtgaaagtctcctaggcactctgtacgatccttgagggttccttgaagccgccgtagcagtagaagtatcatgatgatgatggaccgtagtagtgtgtgatccacatagcatacttcgctgcatctgcttgacacagtttccgccttgatgagagcgcgagtggtcgtcgtgtgatgtgactcgactcgactcaacatgatccgccttgatgagagcgcgagtggtcgtcgtgtgatgtgactcaactcgactcaacatgatccgccttgatgagagcaagtggtcgccgtgtcatgtgtcgtgtggaggctgatgggcgaggattcttcgacagccgccgccgtgcgtgtgtgaggatgcggtcgggcgagcgctctttacacatcccatccatcatcccccttttgtttgtgattcgtgagtgagtgagtgcactactgcggattttgaccacctgattccttcaccaatctgaacttacggtgtaacctaatggtgtagcaacccacggggcagtggaacaccaatacgattttgaatcaacaaattgcaggatgttaacgagaatatcgtggttcttttttagatcacggctctccatcctgcagactccgtatcgttcttttgtcggtactttcgagagtgtccattgaaggaccagacagccgcacttaagcgatcgcctcttccccagtaccgtggcccaaaagaacacggggtctttgttgatgtgcaatgcgtcatgtaaggaggtttctttgctggacgggtcatttttgctgcgcagacattcattcacattcacgacgaattcgaggaccagcgcgcaccaatctggccgaaggtgagtcccccgatattggtaagcgaccgactcgaggacatgctgaggggcatgaggatgcataaagctgcatcgtgttggtttacatacagaatgggtgatgtcatgaaaactgcctaccaggagcccccccctgcattggccacgtccatgctgcagcagctctataaacttgagcatgcagtgtctgacatcaagttggacattttggatatgaagtcatctatcaggttggcatactgtcgtcatcttgggatgatagatatccttgtacataacactgatgcttgcaccgcgctgcttgccatgcgcaggaacatgggctcgtcatccagcatgagcatggctgagatagttgccgattacgaggtaaacaatcgaggagaaggactagtcgggcctttcggtggcgactgccagtttgctgctagggctgctgaagaattcttctcaaagatccatgggctggtgcgtgcgataatggtcactgtcgtaatgtactctccgtcgggcgccaccctatcattggctccaggcatcaacggcactgctcctgtcaaagacagaaccgtcccagatggttataaaccgtacaggctgacagagggcagttgcgtttggactcagtatgctacgcaaacacccgggcccttgcaagggatacgtccactatgttgccagtgtggtcactctggatggtcacaatatcatggttgactggggtattgctcaatttgcaaagctaccgagcgacatgatgatgtttgtctgatgattgcaaatccttgttgaccgaattagtgcttgcacgcactgcatggctggtggcatgatgttgcatgccgtgttggaatgtatgcatggtggtcgtcaggcctgtgttgtggtttgagagagaggcgattgtcagctccgccatatcccatcagaacacactatagtctctcaatagcttctggcgcctggttgagcatccggccaagcgcatcacaggcgtcacaggcgtcattgaacaaagggaaaa

SEQ ID NO: 185 - DNA, 22409 bp, unidentified
  source 1..22409: mol_type = other DNA
  misc_feature 1..22409: note = Fanzor polypeptide
cgactgtagaggtggaaacgctttggtgtgaatcgcatggtaatgtaagggtgtagcaacccacaaacgctcgggatattgtaaccaccttctttttcagtacctctctccccagacacaagacccgttctaaacgcatcggtactctattcccgtcccgtactctattccccgttgccccccatccccattatattttgtataccgagtttgcccgtgccccccctgtcccattagtaccgcaatttttgcttacgccgtcgcgcgcgtaactcttagatgcttccgttcctgtataacatacgttgccatcctgaatcgcaaagatggtgtgcccccttccctttgctacattcgcgcactcttttatgatcacgtccttgtcgtttgaatagattcgaccgtcacccttagttgacctgttatcgttaaaactactggtgggtgggtacaccatagtttgttgatggcagttttttcagatggtaggaaggagttcgttgtgaagaaaggatctgtgaagaagacggacttcgctgcatttattgactcattgagtttgtgcaataattcagtagtaataatggacaacgccagtatccataagaacttggtcctcagaagccccgtaaatatttgttacactcctccttacagtccagaattgagctgtgcttcgctaacattagcgttgagatacatgtttatcccgttagctttaactaaaaacacatcttagctttaactaaaaacacatcttagctcatgggtgcattgccacaagatgtgttaaacacgatcatcaacatgattgatacgcaaacaaagatcttgctgtacgactcaaaggtgttgcatgatctagtttcgttaacaatgtataaaaatatagagcaagacatttttgcggaattcaaggtgcaacacaataagcagctgcagtcttgtctcaactgcttacaatatcatgtgtggagtgacgggactccaatgaagaacaggtgtaggcacttctataaaattgtcaggggccgaacacgtatccgcgctgaatgacaagtgcattgctcacaaactcagcaaaaacgcacactccatctcgggaacaacaattatttcaacaaaaaataaatactgaagaattcttccggaggctccctattttaaacgtgttcacatgaacacctctgaaaagataatttttctttgttcgcctgcgtaaaatcctgcttcgttgatacaaacaacgttagagctttctctgtacttgtcacagaacatttctacattttcttttgaatgtccgtagagaattataatgtatgcacaggattcactctttgcccccttggtctattttcgcgagtcagttgtttcaattcgctgattgtgacactacatgcatcgagagcatcctctgtgatgtcgaaccccttctcctgcgccaacatcagtgcttgacggccgcagaagagtccattgtcatctctgatggctggcaatgaagtcacctgccacaccgagagtagttcagtaacgcaatatgtaaggggctcatccagtgctatgatgcgaaaccccatgatttcctgtagtggatggaatatatggttgtatgcttcaagtgacggacaagaggcagatacgatgacaaatttgtgtcccatgttggttgttattaatacataagcgacaatattttgcaatcagacgcaccacctacagtcggcggaacagtaaaatgaaacatatatcagatggaaataaatgtacgacatcgccgttataaaattggcgttaagaattctcgacatacaagaaaagcgcaggagcgggtcggaagctgttacgtttgtcacagaccacttgtagagtccgcccaccaagcttcattgtattcatccagcttgacgtgtgtacggacgtggatgacttgacagttcaggtcgcctatcaccgacgctgcctgcctctgtctacccctccaagagatgcgttgcatgccgtgccaaaatcacatgcttgaatataaggaggtgagtacgatgacatgggtacgtacacccctcaacgttgcccaaaagcaacgatcttcagtttttagagtataagtcgtgctttatttacaaataaatcccaaccattctaaaaatcatacaaatgccaccaacgtacacagtcaccgttcagtatacagacgacagtagtccgatatcaggtttcatttgcagtattcgaactgtggaagattccttgttggcatgtcagggggggatagggggaacaatatcagaggctatcgatgactttagacatcgggttacaatgtggctggcatatcctgagaatcatggattctctgactggccaactcctctcaccgacatctctgagatcaaaaacgtaattaggacttttagttggactccagagtgattgggatcataattcgtggattcacacccgatgggatcctgatgtaaacagaagtagttgagatcccgcgtttgtgacgcaactcgcggaaaagatgatcaattgaatccttgatgatgttggtgacttgtaatctatgctggtcatgccaaatgtaccccatggccatcggaaactgtttgctgagttgtatgtcaatgtcagatatcacgaagatacggctgtgattggtcacaatgtctggcgccgccatacctgtgagtatcgggaggggcggagatgacatgagcaaccaatcttgttatataatatatgccgccccagccttgcaacgggaaaatggaagcagtccccatagacccgtggacgagaagcccccctcaagacaccccatgcggtgcaatgagaaagttacgatatctgtcatacccgggtcgacaccgactcgcagcgcacccaggcgcaaagaagcgtcctggcagtcttcgatacttgcgtctttgggataccccgcgtttcttgtgtactcaggtgaatgtagataagggggaaatcgtgtgtttactgtactcagggtcaaaatatttgacgatatgcgttggcgtctcccgcagtatgatgatgatgaagaagagccagatcatcaattttgccaccatgaacatgagctgccaaccgactcgccctcttcatcatccagcagcaaggcacttctgttgtatgtggattatacttatgttcctacggatcacattcagaggactttatgtgtgcacatgcgtgaagcaggaaccatgttgggcaagaatgtggatggtttggacataccaggtcaccacagcacgtgggttcgctttttgcacccactcgactttcatgtcgctgtgcttccggggcacttgaagaaggcggagctgatggatctgttggatgatcacggggcacactcacatgatgactcggttctcgtgatcgtcttgtgtggtcatggatcctccggccaactcgtcatgaccaacggggcgaaggtgtcactggaggaggtgtcacatgcgacaatgcatcacagaggaacagtgttgcctttcatgttgttttgcggtgcgcggccttccgagggcctcaacccactgagagggatcaagaacaacaacaaacttcgacggtgcatgttcatctttgcaaccgatgacgctgtcttgaactcgcaaacactgaatgcatttgtgaaagcgatcggcagcatcatggataccagggaatgttgttgttactctgggattgaggacgccattcgctgtcacatgcgtgtgttcaacggatccgtcttgcatctggtgggggcaaacaacgagatgcgaggttctttgtttcaaccggcattcgtcatgccgagagaggtgagcttggcttgtaccaaagaggctactcggaatatcttcgagaacctcttcaacctgctgcaccccccaacgttgtccaaaagcaacgatctgcagtctggatgattataaggtgtcccactttatttgagaactacagtcggcggaacagtaaaatgaaacatcaaaaaaacggtataaggcggtaatatatatagcttaaatagttgtatacaggatggacacaaagaccgtatcggagcttagggcgatgatgctcgctgatgctatcgaagctgatgatgctatcgaagaactcttccgctgggctgaggtcaccgaggcagccgaggcagccgaggcagctgctgctgtgcctcctcagcctgaacatccgacgtacgtatctgcaattgttcctcgcactctcttttcatgcgcagttcaagctcgttttggtatgaggccgattttgtaaaaccgtttcattttagtattccgtcgagtgtaagaaagacaatgaattctccataggggtatcataggggtgaactcccccgtggctgctgtcctttacgaacagggattttctgttcgaactgccttcaggaagatgccttcgggaatgacgatgccctcaagatggagttcgtgcgttgcttgtttcgcgcctacgatcacgatttctgcttcgacatgccccctccgttgtgtgtgtgtgtgtgtgtgtaaatcagtagtgtgtctgctggttgatgttacactgtgggctcccctccggtcgcccacccgctcggttcctcgcggactcctttgtgggggctcccctccggtcgccccctgtcgctccgctggggggaagaggtgaaaggggctccgccacttgtttaatgcggtacggtggttctcatccattgacaagcagtttttaggttggttgcttgaggatgagaacaaccgtgatgtagaatgataggtttccctgaattttgttactttcgttattttttgatgtggagggccatagcggcacctgtgccgacacaggtgcctccgtgatgagagtggtcgcaacctcgggatagcttcctcgtctgaaatgccggaagtatggcaggtgcggtgagaaggtgtggatggccaacctggttgggtccacaccggcctgaatccttctgcattggaaaaggtggcagtgttgtccagcattgcggcggcgaggaggagagaataaaaaaatgcactttttatataattggtgtgttcatgtggcatgagacatgcttcctgtggcacgagctggccagtcatctatctgcggtcgacatgtatgtattatccttgacatgcaatgctgctaggaagtactacatgcgcaatctattccagcttgcggtatttgacgtcacagaactgtcattgcgaagtgcatggaccattctgtcgcatgtgcactgcaagcaggtagccattcccacgagcttgcgccaaactgagttcctacacaacaaaagagtattgacaacaggggctgactgggcagcacgcaagggacacttgcccctattgcaatggctgctgttgaatactgaggaggtctgcacgacttatgcattcgacttggcagcacgcaatgggcatatgaacgttctgttgtggctgcatgacaatggcttaggcggcactaggacatcggccgattgggcggcatatactggtaatctacatattgtaaaatggttgtatgacaacacaaactttaagtgttctgagcatgctaccatgattgctgcaggcaatggggaccttgacatgttgctgtggttgcacgcgcaaggtgtcacatgtaacacgagttgtgcaaactttggattcgcctgcgagcatgaaggaatcatgcagttccttgaatccgtgggatgcaaacgatgcatagacgaagcaaacactaacatcataaaaatattcgacacatcattgggtgtgagcgactaccatccgctcggaactgaagccggtacaaggaatcctgttgttgcacgagtgtacacacgacaatttgtttgactaagctttttcacatgtatttcgaatgtgactcccgagtccaatcaggcagctctggtcatgttggatggcaaggaacctgacatgaagacgaaagaatgttccctaccttgtttttgccaagacggtccctcgtctagcctcatccggtggtagactaagtaggactcagtgccttgcacaactgctacttgtccagtccccctgcgtacaatgaacacgaaaaaaattccttttctcctgccccatggattgctacaccattaggttacactccggtgtggccgtacactctcgaaaagtagaagaagaatagcgtacgagtcctcagtcacactcactgagcttcactgagcttcactgaacctggaacaaatataaacccctcatcgtcgtctcatctaatcacgatgaagataccaacattgagcatgttatgcatgaagcagattccttccaacgtatggcgcagtttgacaatacacattcagagctgcctgtacccgcgccaatggagatctgcaatcacctcactgcaagggcatttgctccgttgctcacgacgcaggatggcttcgttattgcaattgctggaggaccaggatgctggccattggtcgttggccccaacaaacaccgtggtgcacaacacagctctggctttcgagaccttacgccacggcgaccacgttgttgtgatgatcggggggtgtcgcaatggttatgcacaccatggcattgtatctcgccctcacaccagcgatacaccaagcatcgctaacttcagctcccccaccgggaatagcaaaatgcgcgatgccaaacttcagtttgtgcgttacgacgtgttcttagctggacaccgcacgtttggatgcgtgccttgcagtggtgaggaaggagacgaggcgatgcaacgtgagcgagcagtcaacattcccagtctgcttatccagttgccccatgcaagcttgcacgagtaccaccttatcagaaggaactgtgagtgtttcgcctggatgtgcaagacgggttgcgtgcatacatcatccgatcaggtggatcgcattctgcgcgccattacaacatattttaggaaaggggatagatcgttcattctgcagtcaggcatgatcgcatcaaaatcttgtgtagtgtcttaacccgcatatccacacgcaccctctcctggtattggttttgacccgggatctaatccaaaaatattggagcaaccaaatcattgctccatgacatgttgagccaagagcatgatggcctggctgaatgctaccgttgaatttaagctagtccgcgaggaaccgagtgggtgggcgaccggaggggggcccacagttcacatcaactacgtaacttttaagtcttacacaatgtgtacgttgtttgtaaaagattcttgagaggttgcaacagtagttgcctcgtttgctttccgaaaataactaaacggcggaacgctgtcgataccaaatggtggtcatgacaagcagagcccccgtattcattgaaaaaatacagagaatggggtctagttgacgtggtttttaagtggccacgtctagttgacgtggtttcgcacgatgaaaggcacgagcacgtgactgaccatgtgattccttctcctctggaggtgttcgcggtatcgctctgcgatcactcgaactgccttactgacgcgcagccaagacatgcaaatcttctcgaagaagacctcctggatttctgtatcaaagtaagaggtcgacagtgtagtttcgtccaagaagtcgatgttgatgtgctcgaatccaggtcggatgatgtacagcctctccagtatgctgtagatggttggatcgtcttcggacataaacaaggctttcagcgcaaacaacttgtgtctgttacttttgtccatatacaatttggagtcaaagcattcagacatgtccattccatagatctcatggtccacgaacttagagaacgctgggaagaaagcgtctccgaatgtgaacatcacagctggaaaagtgtatctgttgtataccagatgcggatcatacggatcatgtaatttgtatgcagcattagcaagttgcaaccatattttctcaccgactgttgacattattagttatttaacgttgtggatagagttggtttggttgttttattgctttgctcaatggaaatggtttcaattttttatcttttaggtaatgcatacagttgttctcaaataattttgggacactcagtataatttgaatgatatccccctgaaaccagatacaggtccgtggttcactacaaatattttttgaggagtctgaggaaggtttgtaatatatacaacgtgtccgagagctcatgacatgttgagcccagagcatgatggcctggctgaatgctaccgttgaatttaagctacccgtatatcctcgggtccgggggacatgtagtaagaaagacaatgaattctccataggggtatcataggggtcaattcccccggggctgctgtcctttacgaacagggattttctgttcgaacggccttcaggtattcagttgcagattttattcaacaagcggcggagcccctttcacctccccacagcggagcgaccgggggcgaccagaggggagcccccacaaaggagtccgcgaggaaccgagtgggtgggcgaccggaggggggcccacagttcacatcaactacgtaacttttaagtcttacacaatgtgtacgttgtttgtaaaagattcttgggaggttgcaacaaaaatggtggtcatgacaagcagagctctgctatacaaatctgtattcaatgtggtcagggtcatcatccaacggagaaaacattacataacgagtgtccatttacattacaagtgaattatgtccacacttctcaaacttttcagcaattactgacaatattcgccgtattcatggaaaaaatacagagaatggggtctagttgacgtggtttttaagtggccacgtctagttgacgtggtttcgcacgatgaaaggcacgagcacgtgactgaccatgtgattccttctcctctggaggtgttcgcggtatcgctctgcgatcactcgaactgccttactgacgcgcagccaagacatgcaaatcacctggaagaagaactcctggatttctgtatcaaagtaagaggtctccagtgtatcggagccaaagaagtcgatgttgatgtccttgaatccaggtcggatgatgtacagcctctccagtatgcggtagatggtagatggttcatcggtcatacacaaggcttccagcgcaaacaacttgtgtatgttccttttgtccacatacaatatggagtcaaagcattcagacatgtccattccatagatcttatggtccacgaacttagagaacgatgggaagaaagcgtctccgaatgtgaacatcacaggtggaacagtgtatctggtgaatgtaagatgcagcggatcatacggatcatgtactttgtatgcagcattagcaagttgcaaccatattttctcaccgactgttgacattattagttatttaacgttgtggatagagttggtttggttgttttattgctttgctcaatggaaatggtttcaattttttatcttttaggtaatgcatacagttgttctcaaataattttgggacactcagtataatttgaatgatatccccctgaaaccagatacaggtccgtggttcactacaaatattttttgaggagtctgaggaaggtttgtaatatatacaacgtgtccgagagctcatgacatgttgagcccagagcatgatggcctggctgaatgctaccgttgaatttaagctacccgtatatcctcgggtccgggggacaagtagtaagaaagacaatgaattcagaagccccgtaaatatttgttacactcctccttacagtccagaattcaatgctattgagctgtgcttcgctaaggtgaagaaggactttcgtcgattgaactatataccaaacgatacaaagacgcacgtgtctgatatgatttccttagcattcagcaacctcactgataaaatatgggttgttttgaccacgtatggaacacgtatgtgatgtttgtataaagagttctgtgatgtacaaattatgtaagatggcaacgaaacctccgacagtcgcgaaattgaaggagctactaaaattggccgaagtagcatactcctcaaaggacaagaaggacgatattgtccgtttatgcgaagacaatggtctcatcgccagaccccctccagagtacaagacggtggaaaagatgtgcgtcgtgaaatgcgccctgaagaaggcaatgagtcttgacgatgaagaattcggtaagttcagggggcatgtggatcagctcgtcaatgaggtgagccgcatgttacggcgttccagtctggtgctgactttccatgtcacgaggctcatggagggcgacctgccgattcctaatatgtacgatatgaaggatacctactggaaggattggctaaggattggagttgacggcgtctttccagatgaagagagtagaatatcatacgaagccgtaaaagacgtaatcggaaaggtgcttggtagcgatgaccctgactacatcaactcctaccctatctatttcgaccaggttttgaactatgccggtcacacattgagcactgtcgtgtcgaacaacgcatgggttcctttggtacctcgtctgacccgcctcactaaggctactttgaatgcactgggagctccgaagaccatccgtgtgtacgacgtgatgagggtcatccaacaagaaatacaggagatggaatcttggccagagtctgttcaggagtacgtccgtgaagttcaagtcaggctgcaagttccagatggaagtcgactttatgatgactatggcaaagacatggacttcccgaccatggtccggttcaattattggatgcagacacggttggaggctattggtgcacgtcgtatccggttgatgcccatctttaatgtccaacgggcgcatgtccgccttgacatgaagaccctcgtgaacctgttcaggcacgtgttccccaaagacccaaacatcgtcgagctttcaaagtgggaaaatgtaaaggatcccgaccgcttcatgttgcctctgaagccttcagttaagaagaaaaaatcatgtggtcctggtgaatgggaggcatacaagttggcccaacagaagtacgatgctgacgttaaggatatcaaggctactgacgagtacagacatgcaaagggtaggtatgacacgctcgtgaacgcccgaaaaacagtcgcaggttccttcttcaagaaaccacctgtcaagacggggtgggtgttcgattgtagcatctgtactgacggagtctcattcagcatgcagtacagcaagacagtacaggttcgtgtatccgatctgaagaatgaaagtaagaggtctcgtgacgaggaaggtatgagcgtctcagaacagtatgaccataaactcaaaacgacattgcccgatatgggtatcgtcgttctgggtgtggatcctggtaggagcaacatcgctacagtcacgtatctggcagacgacaaaagcaagacctggaagcttacacgcggagctttttaccacaagtctggtatcaagaaacagaaaaaacagcaagaaaaacgtttctcagacatgattcctagatgggagtctctgcgtgaaaatggagcagcgttgagtacatccaggaaggatgatatctcggcttacttgaaaaattacgctacgttttccgacgagtggtggaggatggcactccgtcgcagagaatcccgagacaactttcagaggtacattggcaagcgcaaggctatggactcattttgggcagggatcaagcgcaacatgaagttggatcatcctgacctgagggttcgcgtagcatatggttctgcaatcacgaagctgaaggctaccggaccaggagaggtagctgtgcctatgggatctatgttcgcttcctgcaagcgcctcttcaaagaggaggttcatgtgacagatgagttcaagacgactctcatgtcttgggaaaccggtgccaagaaggaatgtgtttacaagattccaagtgtccaaataaccacggaaggtcagattcgtctaggttacgagttgttgggtcacaccccattgaaggagactccaaaggtctcttatagcgaccagttggcggtgagggtgtactgcacacgtaaaaaaatccaagaaaaacacaggaggggtggcttagccccctctcttgtcgacaacaactcgatcaagcggtaccctgaggtacgaggactgcgattctctccagaaaccagcacttactcggaccgggaccgctcctctgctctcacaatcgcaaggctgcactgcatggaactgttgggtcaagggagaccgcttccattttgcagggatgcgtgttgttgatgggctacaaaaaaacatgatggtgttccactgcaatgtgggttgctacaccataaggttacaccataaggtgtaccgtacactccagaaagcggtttcattttagtattccgtcgagtgtaggagacacgcaaaatgaagcgattacagagtggcgccaacgaatcgcgcaatggttggtagagaaccccagctgcagaacctggccgataccacacactataagccccgaaggcaatgccctagttgtcaaaagattcacatggtgcgccagatgtgacagatgtgacggttatacagcagtttgacttttcatgctactttttgacatacctcttcaacctgctgcaccccccaacgttgaccaaaagcaacgatctgcagtctggatgattataaggtgtgtcccactttatttgagaactactgtaaggctccaccgacacctgtatgttagtcgaatgccggccttcattccatttcccccgatccagcagttcaggaacgtcctgaaagagttgccgtacgtcttcggaagcgcgatcccgcagacgctcaagttccgaggcacggtcaaactgcacgggacgcactcggacattgtgaggcacttcattactggaacccctgacttcgtcgacaccattcagtctcgaaacagaatcctgtcagtcgacaacgacaaccaaggctgccacatgtttctgactgcgaagaagtactccgatctgttcgatcgtatccaagcgatccatggagcagatataagatcgaacatcgccgtatgtggcaagtactgcggtaaaggtgtgcagagcaaggtggccctgtgtaagctcgccaagatgtttgtgatatttgcgatcagaatcgactatgaatcggttgacatgaccaagtacagcacggtgttctgtcaggaggaatggatcttcaacatcatgaactttccgacgtacgaggtggaagtcgacatgagcgacacgcagcccgcgcaagactacatggcggatctcacgaactccgtggatgcagagtgtccgttcgcgtaccagctggccggcgtcaagggtggtggcgagggcatcgtgtggacgtgcgtggaccacccatcgtctcgtctgtggttcaagacgaagggcaacacgcattgcaccgccgtcacgaagcaagcggtgccgtcgcagacagagtacatggagactgtgaccgagttcgtcgagtccgtcacgaccgagtctcggttgagccaaggcatcgagtgcctggttgaacagggcgtggagttgcggatacatagcgtctctgagttttcgtcatgggtgtgccgagacgtgttcaaggaggaacgagacacgatcgaagaaaacggattcaatgtgaacgacgttcgtaaggcgtagtacaggaaagcagggaactggtacaaacaacgggtggcaaccgcataaatcaatctctcgagcatgaataagcgtaattgtgcatggtaagtaaattcaacttatgagaaacctgttgttttctatggcagccaacaagggtaccaattttctccttgccaccggacttgcgcgccgtcgtttggggtatctatcgcaaactcgtgttcgcgacgcagtcgctgtcgtttaggcatttttcatgaatgccttaatgccctgtatgctactcaattcctgtgtggttgtgctttcttttgttccttcccacgcgacacctgtaatttcttgcatcttatcgtatgcatcggctccttcgaagatctcatttttgtacacgattgctggaaacctcgtgatcctcaacaacttcagcaggtctcggacctcgagatgtgataggtcattgacaacaactctcgcatcctcgcattccaaccaagaaatgtaatatgttgcaaacaacggacagtgttcgcagttgctgctcaacaccacagtccatccggtagctgggacagttgtcaaaatcataacctcttaatgttgaaccaatgaataataatataattatactacattttgattacgataaaggtggatcatgcgcagtgcctactggcaaactggtgtggacgcagcaggaggaggaaggttgcaacggtttacttttcagatgcaacagttgtaaagacaaaacaggaaccaccccaatctgccccattgtccatcattcgcacatgccacaacggctggctgccgcatgccccatgaccttgaaaaacttacaaaataaattaaacttataatgattgaggatgagaacaaccatgtcgtaggatgtaatgataatgataatgtaaatacgattgggtttccctgaattttgttatttttgttatttttgttatttttgttacttttgtaattttggatggggaggaccactacttcactgctgctgcacccacatgcacttcactgcacacaccgcatcatcatcatctgttttaactgccgctgaacttcgcctcccccctcttaaaatgaaaatggtcagatgtagcatgagtctgtgctcttctcaatccgtcttgcgacacccctaccccattcttctcccacgttttccgcctgtttgtcacagtccatacgtagagaccggctacatttactatgaatatatttgcgttcgtgtggcatacttgacatgccatggtcatgcgtgtgcgtgtgcatgcatgcattgatgcattcggtagatgtgccaaagagtttccgtcatcccaatggggctcctctcagtgccttgcacaactgctgcttttccagcccccctgcgtacaattaacacgaacaaaattgtgatgattagtaaaaatggatcctgagacggttgttctagttggtgctggcacaggtgacatgaaaatgctgaatatcggcttgtgtatgcagatgagtgattacaagacctgcatacaacaagcactaactttgtcatgctcactaaacaaccgagagagtgtcctcgcactgatttctgcaggatcgcatccaactaattgcgatctttctgcggcttctcgaaacggtcattatgatttagtaaaaacattacttgccctcccaggtgcacaatttgatacaagtactgcatgttatgtcgcacgacacaacgggtatcatgatatagtgaacctcttatcatccaacttgcctgctgggtgagtgagagttactgttgtgggtgaggatggacgagtaggatgcgcaagccgccgcgttcccttggcggggcgcgatattaatgcgcccgtccttgtagttctcatagaacgcgcgttccttcatgtatttctcctcgtagtgcttgtgaaaaaaaattgaaatgtttcgctcgagctgtaaagacacacacatattatacttccactttgccgctatttatcatttctcaactcaatcaatcatgtcttgtactttcgttaacgtgtcagaacaaccctgcatcatcgacctatcaagggacgatgaagacattgttcgcgactgcgtgaatcaaatctgcaactgcgttctgaacacacttgagccgtgcattgtatccttggtatcgtctgatgatgagtccgacgacgaggcccaggccatgtccgagtccgagtctgacaaggaggcccaggccatgtccgagtccgagtccgagtccgagtccaagtccgagtccgacgacgaggcccaggccatgtccgagtccgagtccgagtccgagtccgagtccgagtccgagcccgaggcccaggccatgtccgagtctaacgacgagcccgaggcccagcccgagcccgagcccgagcccgagcccgagcccgagcccgagcccgagcccgagacccagtccgataatcagtcgtcccccacgtttaaagacgtatccgggctactggagaggaccgggatcttataaacgttcctcgcaagagggcctacccgggcgaccatgtccaccagctggtggaagtactggttgtctgacgaagccattgaaacctggttacatgccggttggaagaggaatgaacagaggatgatgatcatgcggctgcatcccgacaaggccaactccttgcgcgatgagcgcatgaccgaggctgatcacaagtggatggacaaactgtcccagaatctgaatggtgcattcgacgtgtcgagtcccgagattcccgagattcccgagattccccgtgagatgtacgacattatctacttgctcaataatactgagttggcttaaattgctgcgtataattattttttttcgaaatgcggacttcatgtgtgcgttgttcatatttggttaggttttcgagcaggagtctgctctgcttgaattcacgtgtgagaatgagtatgcgcaagtcaccggcatttgaagtcttcacacaggcggtctcagaaatgcatacccgggttgtgcggaaacctagcgagctgcgctgccaactggctgacccgggcctccagacagttggttgcatcctgtgcaaatgctgctcgagtgaatagtctggagattgagcttgagactgagcgcgctcgaaataaggcataaatgaagattgagactgagcgcgcagaagcacttgagaagcaactgaggtacgaactgtcgagcatgactgccgagcaatggaattccctgaacgatcatgacaaagtagtatttggtgtccaggctccttcaggtaatgccggctaccaactgtgggtggacaagtacaagccaacagacactagagagctggtgggcaacaacacgctgattgccaccctcaggatgtggctcagcaactgggagggtgtaaatctgcgtggccagcaaccacaggcccctcctggcagccggaagaatcctaaggacctgtccaagaaggcggtgctgctcagtggtcctccgggaatcggcaaaacctctgccgcccatatcttggccaaggagtgtaactttgagattgtggagatgaatgccagtgacacccgtaacaagtcggattcaaagatctcagctggcatgggagggaagtcggccaacatgatcaaggagatggcaaccaatcgatctctattggtgggagctgatgggaagatgaagaagcagctgctgatcatggatgaggttgatgggatgtctggtggtgaccgtggtggtgtgcaagacctgatccagacgatcaagtcctcaaaggtgcccattaaatgggcgttcctgcttcccggccgattttgtggatgcttctaaatttgtggaatcttatgattcaaatcaaaagaccgtttaggcaaatttcttgatttgtgagtttttgctggatttcttcgaatcttcttatgtttttgaacataagattgttttctagttttttgacaaagagacaattcctttactatcttagaatcatcttatagtttttaaacataagattgttttctagtttttggagaaagagacaattcctagacaattattgaatcttgttacataactcataactcataactcataaatcgtaactaataacctcgcaatctctgaactcttacatcaaaacctcataagtcattaccttgtaactcatcattcgttactcgtaacctcgcaatctcagaactcttaactcattacctcataactcattatcttgtaactcataactcataacctcgcaatctccaaaccgtaaatcatagcctcaaaactcattaccttataactcatatacttccaacctcactgcctcacagccccattcacggtggtggtggaggacacacatttgggtaggtccacattggtgctgcagcactctacgagacctccacgcactacaccaccacgacaaaacattatcctagcacctgaacacatcaccctacttcctaacctgacaacgtcttaatcccattattcacgtgcccgctttacaacctcattccccctcagccatgctcttcatctgcttcatcatttttccaatggtgatcaagagggccgatggttcgtcgatgaatgcctgtgctgtggcgatgtcggtgactataccatgcctccaacatttcttcaaccaaatccttgaacgggaagggcggcttccacagtattgcttcttgcagatggacaacgcagcaaaggacaacaagaacgcattcatgttcgcatatttgtcgctattggtggagcttggctggttcgagcaagtgtacgtccactttcttcctcccggtcacacacacacagcaatctcgaccagaagtactcggtcatctcgcaggctttgaagaacaaggacgtgttcaccttggaccatctgattaccgaggttggtggcgttttccaatctatgggcgactacactaagcaggaagttgtgacgtcaattggggacttctctgctgtcctgaaagacaacgtgtaccagctgtacggtcacggcacgagcacggtcaatggagtcaatcgacgtttacacggattcaagatcacgagacaggccaataggcaagctggtgagttgtcaaatttgaatgctttgtcctttattttaataccatatcctcccctatgcgtgggggagcatgaacaatacttattccttgttttcacaacaacaactgcaggggtctatttcaaggagtatgatgagtcgggacactggagagggcaatgggataaggacagcgaacccattcttgtcctatcaaggtttccattaagcaagtccgtgccattcaaggatgcccccaagattaggattcaagaactccaaaacatcgaggtccactggaagagtatcttggatgtcattagtccgaaggatgcagcagaggacattgctgatgacctttccggaccagatgaccttgctgtccgggagtatggccttgacggacaagatgacattcctggcccggcagctgatgaccttgccggaacttcagccggcgacggagccgggtacgccgcaagtattaccgctgacattcgcagaatttggttggacagcaacaaatggtggaaggagttctttgacaatgagaaagagtattgggccagactaccacctggtgctgagacgggggaattcccagcagacaaacattttgtcgacttcccttctgccttgtccgaatttcctcaatttgacgcttctcggatatccctaggcgagaacttgatagcaactctggatgacttgtccattgacttgccagatatcctacaaagtgaggtggcaaagggattgaaggacatactcactatggaaacagaacttgcaaggccacctactgcggatctgctgtacttacattcttcgcaagggaccaagccagatacaagagccgcctacgaccccaacacagatttggctttgggacatgtagcagtggtcaaggttgccgtggaagactctagcggggagagaggatgggacgtggttgagatcaaatctgatactgtcattggagaggtagaatgtgtgtacttaatgcctttatactctaagagaggtgaggcattggtgtacaccgacaccgactacccagagtggcctagtgagtggatggaccaaaagcttgtgccgattaccgttaagcttgggaggaaccacaaggctacatggacaggcaacatcccccttgatgccgtgcaattcagttgccaacccacgagcaacatgaagataccaaagaagtaccacacaagcgtgctcttagcttgcaaagccattgaggacaacactagaccggaggccgtgcagtcggatggagataatgtagacattgatggagaagaggaggaggtggaggagggtttaggggggtagtgggggtgaggagggggagaaggaggagaatgacgtttcatagtcaccttaatgatattattcataaaccactcttacgtttattttcataagccgtgaatgctaaattctatattccggtcaataactgccagttttacacattttccttacattaaaaaaaataagatgtaaaattggtgtttctaagttgttacacaatagggcaatttcatgctcataagattcgctatatccattcttatgagctcgaattgagcatatttcgtcaaatttgaacatattgaccgaaatcttatgttttaattcataagattgaacttgtaaaaaatcagaatagccccttaaaagtgaacataagaatggaaatcggccgggaagcgggaacgcccattattatctgcatctgtaacgacaagtggaaccagaagttgaaaagcttgcggaactactgtgtggagcttgacttcaggtaacccaccccacatcaagtcaagataaggatgatggagatctgccgcaaggaggggctgactgtcaatgatgccaccatggaggccctggccaagggagccaatttcgacctacgctctatcctaggacagctgcaaatggtccgtcttagtcgcaccaccctgtcctacgatgacgttaagggcagccaggcatgcgacaaggacagtgacctgtctcctttcgagtgtgcaagaaagttgctagagccttccagctcaagcatgagcattcaagatcggctgaacctagctatggtggacgacatcgtccccctgttgatccaggagaactaccttaaccaccgcccagtcatcgcaggaactgaggagcagcggatgagggcagtggcgaagtcagctgaggccatatctgcaggagatgtgatcaacacgtctgtgcggcgctacatgaactggagccttatgcctgccttcaacacgcttgcatgccttgtgccgggggcgtacatgcgcggcgggagggacgcattctggccaggcgacaactactctcgcttcacctcatggctgggcaacttctcaacctcaaacaagcaaaaacgcttgctgggagaactcaccaccaccatggcttccagcggccacatggcttctagcagatctcccgtgcggttagagtacctatcagccatgcgcaccctactgacgcgtccactagtgactgatggagagagtggtggtatccagcagagtgttaccctgatgcaggactactgcgtctcccgggaaatgtttgactacgtgattgacgtgaccaagttcaagaccaaggccgattggggagaggaccccatgaaggatgtccctacaaagattaagagcgcctttaccaggagcttcaaccggcaaggcctgcaggcgaagtgcggtgcaatgctctccgcacctctgaagggcaaaaagggtaagaagggcgctgctggagcagaagacggagcggatgacgatgaggacgagtccgggttcgagaagcttagtgcaggcgttgcagatgaagacgaggacgcagatgatggcgacgagatggtagcggcagccaaaacccagctgctaagtgccaagctgatcaagaggaggcatgacgatggacttaaagtctgacaatgctccagtcaagggggagggcagtgcgggacggggctccgggggcagaggggcaggtgcaggtagagggagtgggggcagagggggggtggcatagacctactgtcacgtgggttgctacaccattaggttacaccgtaaggtgtgccgtacacgaggcggtttcattttagtattccgtcgaccgtatcactatactaacgacttaaccctactgtctggtctcacggccttacagatcttgagctttaatagtccctgcttccagcaacatttaaatagggttttcagagttgtaatcccaatgaaatcagtaagcggcaactactttcgagtcggagcactccttcgcgtttgccatgctcataattgtttagggttttatattgtacatttcaaaacacgatcttcagacatggattacttaccttaccagaatcccacgtacactgtagggtccattgtaaccatagacaacccaacaacgcacaacgacttggataagacaacaagtatcgtggggctagtat

SEQ ID NO: 186 - DNA, 21317 bp, unidentified
  misc_feature 1..21317: note = Fanzor polypeptide
  source 1..21317: mol_type = other DNA
tcctgcattagacccgaattcacccgcattagatccaaagtatcctgcattagacccgaattcacctgcattagatccaaagtatcctgcattggacccgaattcacccgcattcgacccgaattcacccgcattagatccaaagtatcctgcattagacccgaattcacccgcattagatccaaagtatcctgcattcgacccgaattcacccgcattagatccaaagtatcctgcattagacccgaattcacccgcattagatccaaagtatcctgcattagacccaaagtatcctgcattagacccgaattcacccgcattagatccaaagtatcctgcattagacccaaagtatccggcattggacccgaattcacccgcattagatccaaagtatccggcattagacccgaattcacccgccttagatccaaagtatcctgcattagatgcaaagtatccggcattagatgcaaagtatccggcattggatccaaagtatcctgcattagatgcaaagtatccggcattggatccaaagtatcctgcattagatgcaaagtatccggcattggacccaaattcacctgcattagatccaaagtatccggcattagatgcaaagtatccggcattggacccgaattcacctgcattatatccaaagtatccggcattagacccgaattcacccgcattagatgcaaagtatcctgcattggacccgaatatgcaagattctatcaaatcaatgtatcgagtgttgttgctaggatccttgatcacaatattcgactcgaatacagatatcccaagtattgttgtttttgcagattgaatgacaatatctttcacgatgttcgatgtaccaagcactcctgtgttagaagtaacatacatggaaatacctccctcagagtcaggagtcagcacagaaacaccgcctgcacaattcccattatcataaattgaaaaaaattgaaaatttgacttccaagtaagtcacactgcggggaacagttgaccctactaaggacgtgatattatcgacaccggttcgtacgcacgaagctagaaccagtcacgtttcatacggtcaacgactaccgtgagagccgaaacgcccctgccaggattcgagctcccgcgttttccttcgaccaaggccggatactctcccattgagccactccgagcccggatcgggatcccattatcatatagagcccccttcacgacaagcccttcatgttcgtctacgaacacgctaggattggaggcaccgattctacctgcgagcactctgttcccttgctgcgtccataaaaggaggaggtcgttttctctcactacccaagggaaaattatattgtcggcggttgccatcatcacaaccgcacccatcatgtcaagcgcatcgttagaactcgacatagtcttgtgtactcaatgtgtctaaaaaacctttgctctacagtacgggcagcttttctgaatgcgcaaccaatcgcaaattcctcgccccttttttttgtgatgggtgatcgtggaggggcatgtaacgtggaagttgtgattgcaacttagattgatgacgatgtcttcttctttgaacgcctcatgacagaggccgcacacgtcactggtgtttggatataggtaaggtatgtattcgataccctcttcagtcacctctacaccatgaggttcgcacacctgcatgtacaaagaggatgacaaggcatgtttggcttcgctctctgtgatggtctcgttgtgacacgattggcgcaggcgaacgttagtggggtccgtgcacataacaccccacttggaaacgacccacacacaccacccgcacaacatgtcgtccataatccaccccctgttgcgcacgaacccatccgccctctcaatgcagcatacgatcgagtcataccgtgtattttcgtcgcatgtcacgatcccacggtcggctacgtacgccggcgaaatgcagaaacgtttcatctgaacgcggtggatgcgggatgtcagcgaagtgacaattgaaatcttcaatagtttgtccgtgttaagtacgtacaaccgatcctgggtatggcaaagagagtcaatgtcgaacgctatgttgaaccagttgaagttgtgccacgcactccagaaacaattcacaatcgccacgctcacgcgtctgtgcacgctcttgtccgcaagaggaatccacacatggtacaatgtctccttgaaaacatgcgaagagcgataatcggaatcgttcttcgtaattccgtgccgggtgcaaacgaactgggtcgcgaacaaagcccccatcacccttgggaacaactcagtgttgctagggctcatcttgcaagtgatttcgaacacgtggaccgatgaagactcatcatctcccatagaagagagagtctgcatgaccgtgtcacccaatatgtcggcatggaaagcatgcataatcatgacgagcttgttaacaccttccttgaatgcatccgtgccagcagagtcctccacatgcttcacgtttttaacgaatggtagagaactgcccataaagcctggtaccacgatacccttgcgacaatgcatgtatgttaaataaagtccttaaactgggcgaatttcttgacgtgtattcactatcacgtaagacataaaactgattcgtaggaacgcgagcgagcgagtcctcaagattttgcggtcgccaccaggatccatggctgccgaaactcgatgcggtaccctctccaaactaatgtcttcagaggcgcctcaacgactgtacccaagaagatgaacagcgcagacacatccgcggatacatcgatgttcctcgttgcggaatacacaatcaaaaagaataataagtgacgaacaagagggtttgagaatagcgcttgcatttcctcgtcaggttggaggacgaacctccccccaaaaccgacaatcaacgatgataaacctaaggcaacttgattcgccattaaacaaatttatgaatacactcattttattctgtcatcgcccttaggcacgcaaccgatattgagagtcacgaaagcctgaagggattggttgacgattgcccctggcctcacgaacgcatcaaacaataccattgcacggatcgcctcgagcatctgctcgtgcaacacgagcctgccttcgacgctgttgtagaaaccgggagcgagaatgtagaacgagttcaaaaaaccctgagcgttgggttcgccaagacgaacgacttcgtgaccctcctctcggttgatataagcgttcgcctgcaagatcataggcatattatctgcctcacctgacgcagactcgggacgaccatcgaactctgagaaccggacatcgtcccctactacgaactcgttcatgtcgaagaaacggttgcacacgatgcggatgtacaacccatactgtgtttcgtaggacaaagatgtcagtcgcaaggcgtcaacactattgttgaacaatgcaccgctaggacgtgttatcgacacaacgagcgaacggagggatgcaagaggggtgtcgaacgtcttcctatctagttcacgcacgggtttaagcatgacgtatccgcgcccgttggcagcgcggaacgaacggtcgaacacgagcacgcaaaaactccgacggatggcctcggaactcccgtcgtacatgccatcgaatccctcaaggttcaccaggacataagggtacgaaaagtcatagtcgtgaaggtacggacgcgcggaacttgctcgcttctccataggaacgatagcgctagacacggatatccacgagattccgcggaaatcctcacgcccaaaccctgtcacactcgaaccgaagcgaaagcggtgagggtgcgcctcaacgtccctatcaacaccgtggagaccaacactcctatagacatcacccacatggtgggttacagagggaatcaccgcagaagaaggcaaagcaaacgcattatcagttacaatgtgatcaattagattgtgaccacttagattgtgagcggttagattttgatcggttacagaatgatcagtatctggagcagaggtactaaacgtaagacggtctcttacaagatcctctacacggcgatcgaattcctcgtttgatatatgagggacttcatctccgtccaaacgaagatcagatccgtcgtcgttggtgttacgagagttcgtgttgtaagaggatgatgaatctacaaagttggtcatgaccgtgtcccggtcctccgcacgcaatctagagagcgtgctctgggggcgagggggcgcatcttccaatcccggcaaacgtggtcgtgattgctgctgaaaaacgtccctttcgcgactaatgaatagagtgtcgttgttgctcttttttttgatataggttgtagatttcgggggggattcttcctcatccatcttcatcatgtcccgcatgagatttaacgctatattgttcttatcgcgcaatgagagggagtcgctatctctccgcttctccaccccctgcatgaacatgaaaagtttttggcgaatgcggagaatatcggatgcaccctgaaagacaatgttgtggcgctccttcatgtagacgtgaaaggctgcctcgcaagtcttgacgttctcaagtgaaatgaatgcagatgactgatttttggattccataatgaatcgacaaacacacgtccaatcccaacacgtccaataatggttgcaaatatttctttacgagacaacctcacgcatcataaaataaaaaaataacaatttataagaacatctaatcgaatatgtctgacatcatcaacaacaacaacaacaacaacaatggaatccgctcccaggggtgggtcgtgatcgtggcatcggtcatattccacatcaccgtcatagtgacaagcttgatgcgcaacaacttcaacatcacgttggcgctgatgttgcttctgtcaattgcgttaacggcgcttgcggtctatgacattcagtgcctagagtccggaggatgtacagtttggagttggataagaactatattaatcgtcttaactatggtattgtccacgctaactgtgataatgttgggatacaaggacaatgaaaacaaaacaaagaaaaaacgtgggcagttgactcgtttgctttccgaaaaaagtaaacctaacagtgtataaggaatttgcatatttcttaatacatgccccccggaccccggatgtgtaataagaaattcataggtttgaggatatacgggtagctaaaattcaacggtgaacgttcaaacacgtgcttatactcgactcgactaaaatgaaaccggaagcatgaattttacagctacgggaaaccttgtatttttgggattctgaaaaattgtcaaattcaagatttgtaaccagatactgtcactacagtcggcggaatacttaaatgaaaccgcttcgtgtacggcacaccttacggttttacctaatgttgtcgcgaccaccggagggggaccgagtggtgtctacaacaatacgattttgaatcaacaaattgcaggatgttaacgagaatattgtatgttttagatcacggatctccatcctgcagactccgtatcgttcttttgtcgagattgaaggaccagccgcacttaagagatcgcctcttacccagtaccgtgacccaaaattatttgagacatcttactaacgcatgcctcctccggggaagccgaccaggttggcaccgatgccgaaaccggcaccactgcggacactagatccaacggcaggggcgaacaggtccaaaacggcgaacgtggcggcaccgaccaaagaaatcatcattagatccttaggcggaagcttggtgttggggatgaagtacgctgcgacagcaaccatcaatccctcgaaaatgtacttaaggaaacgaacgagaatctctgatgcatcgaatgaaacaccagatgcctgagcagaattgtacattttgttgcaagggtatataacaccaggggtagaacaaaatcctagcaacgtttttcattcggtcggtgacaacaaaacatccatcactctctcaaacgatgcgatgtcgtaatcgatgtcgcagacagtccccgataacaaatacaccaacctaatacgcttgcggtcgtcaccatgcatccacgcatacaaagctgtctgcaatatgtgaacaagctgcacttcaccactcgtgcacttcaactcatataacgaatcctcagtcaccacatccgcctcgccataaacatggcacgcattgggaacgaactcgcgtcgaagaggaacctcaaacctcgtcaccactccaccgcaaatcccagctccgcgcatgacctccagagaggactcaacatcgacttcgtccaaccagtcaaagcgagtaatctgcttcgctcgataaaagtactgagatgcagaagactgatgcagtgtagccgcacacagaaaatcagacacactaggatcgcaaccagaagatatacgcgatacaagagcatctcgtaaattcccgcaatatttcgaactgctcatgttgagagtcgggagcatgtcaagaagctgcgacctccctgtaacacggtattccaagattgccgggattgcgatgccgtgaagatcagccacgtactccgcaagagcccccctagttctcacagtactgcacaatgccggcgcacgcacgccaatgtcctgaacacgccacgtaagatgagcactagctcgctttatcgtttggaagggaaggtgctcgagtagagagcatactccgcgctcattaggacggatatctgcatcatcattggtatcgtcaggagtcacttcttttttagatgcggaggcaggggggcacccctgcaacgttgctgtttcgagaagcgcggttgcatccatgtaaggagcaagatgagatctcatgttgtgaaccacgatcagctctcgcttcacccgtgtcagactgacgtataccgggttgggacaatccacagtcgatgatgagagcggcgcatcatgatgcatccgctggaagaaggtcatgtaagactcttctgtacctcccaagacgaccacagcttctcgctcagtacccttactcccgtgaaatgtcatgaaggccaacttcccacgcagcacctgctcgttcaaggagcactcctcgaatacgtcattcacactcagagggacgttgcgatccaacagccgcttctccagtagacgcaggggggacttgcctcgccctttctttacgctcggagaaagaaccattatctgatcgggtcggtaacgggtgaggaggtcgaacacgactgacgttggcgagacgtcgaacacattgcaactcataaaccgcggacacaacgtcgtcgacgacggcacgtgacctgccacaaggacatcttcacccttaaggaacacctcgttaacaaaacgaaccatgggcgcggttagacgccacgtcgtcttcaaggtgtgctgtctccacccacggacacccgagatttctgagggcagcaacgagtcgcattcggcgaggaacctcgggctggcacccttgtactcgtagatggattgtctcgggtcgccgatgaaaaggaattgaggcggtcggtggcacaggcgcgcgatcatgaggatgcttttccaataaagagggttgatgtcttgcgcttcatctacaacaacgagtctaaatgacagagcgctacgcaagcgtccattgttagcattaatagcatctaccatcgtgtgaagcgcctcgtcggtgtggcatccctcgtcgtaatagtgcgtaccgaagctgtggaacgaatgcacctcagcagcggattcaagtcccaaggctgcaacttttttgcgtgtctccgtcttcaagttggagttgtatgtcaggagcagggagcgggcatcggggaagagcgcatgcaatcgagtgacgcagtgtagagataatgtagtttttccagacccggccacgctttgcaacttgacattcttattctctagcaccagtgacttgatgacctcagattgctctggagaaggaggaggaaggagcatagaacaagtattagataacctcaaattacaaggctataaatcaatgatccatgcgtggtgtggtctgttgattcagaatcatcaagttagctttatacagttgtgttcgaaatgaaatgaaatgaaataaaatgaaatgaaatgaaatgaaatgaaatgaaatgaaatgaaatgaaatgaaatatcatgtcctaaaatatatgggacaatattacgagaacgatggttttgttgtcatcaccatcaacattcttctcaatacacacttgatctgggtgtaaggcagcagctttacgcactagattggatgttgcccctggaatcattgacagcaattgtctcaatgacatcttcatgcttgaaacattcaaattcatgtgcaatccagaccccttccacatccggagcttcctaatgagccctctcatgtcgaggggcttgggagcttgcaaagaggaagcaggtgtcgataggatctgctgattgtcagtaccttcagatggcatattcagaccggaaggagaaacatggggggggtagcctggtatgtataacacgttcattcgttggcaatactccagcatgctccggttgtccattatcgactggtgcacatcgctgttgtcattggtatggatccatatgacccattcatgctcgtgtgtcttcaacattcgcccgatgcagaagaacaaataggtcgttcgatctttgtccaacccatatgacatccgttctgtattccgaggaggaggagctgcacatggaaatacaaaggattgtgtaagaaaatgggattacgaacactctcaaggtacaatacacttgaaggaacataaatgaaatgtattgtgtacggctcaggtacccaaaatacaaggtgtcccaattcaaacgtccctctacagtcggcagaacagtaaaatgaaccgtcccgaaaagaaatgttgatttaatctcacattcagattcaaagattacctgaggttactttattgtacatttccagtaacttcttgctgagatcatcattggaaggaatcatgtccccatcgcatggcaatggcctagccgacgcgtcttctggagaagttccattgactcggtcggactgagtgctcctcgataagcaccggagactctcagatgacttctcaaaagattctcgtgattcagaaggtacatccatccatcgatctcgtgattcagaaggtacatccatccatccatcagaaggtacatccatcaatccatcagaaggtacatccatccatcgatctcgtgattcagaaggtacatcaccattgttttccattccatccataaacggagaacgactcttgtgtctggggagttccacttgtcactgaattttgtagtagatacaaggatacaatcaatgctgggaaaattttagtatcagttgacgaatgtgggtttagtgagcgtctcaagccacattatgggtattcccctgtaggaaaacctgttatcgttaaaactactggtgggtgggtacaccatagtttgttgatggcagttttttcagatggtaggaaggagttcgttgtgaagaaaggatctgtgaagaagacggacttcgctgcatttattgactcattgagtttgtgcaataattcagtagtaataatggacaacgccagtatccataagaacttggtcctcagaagccccgtaaatatttgttacactcctccttacagtccagaattcaatgctattgagctgtgcttcgctaaggtgaagaaggactttcgtcgattgaactatataccaaacgatacaaagacgcacgtgtctgatatgatttccttagcattcagcaacctcactgataaagtcattatgggttgttttgaccacgtatggaacacgtatgtgatgtttgtataaagagttctgtgatgtacaaattatgtaagatggcaacgaaacctccgacagtcgcgaaattgaaggagctactaaaattggccgaagtagcatactcctcaaaggacaagaaggacgatattgtccgtttatgcgaagacaatggtctcatcgccagaccccctccagagtacaagacggtggaaaagatgtgcgtcgtgaaatgcgccctgaagaaggcaatgagtcttgacgatgaagaattcggtaagttcagggggcatgtggatcagctcgtcaatgtggtgagccgcatgttacggcgttccagtctggtgctgactttccatgtcacgaggctcatggagggcgacctgccgattcctaatatgtacgatatgaaggatacctactggaaggattggctaaggatcggagttgacggcgtctttccagatgaagagagtagaatatcatacgaagctgtgaaagacgtaatcggaaaggtgcttggtagcgatgaccctgactacatcaactcctaccttatctatttcgaccaggttttgaactatgccggtcacacattgagcactgtcgtgtcgaacaacgcatgggttcctttggtacctcgtttgacccgcctcactaaggctactttgaaggcactgggagctccgaagaccatccgtgtgtacgacgtgatgagggtcatccaacaagaaatacaggagatggaatcttggccagagtctgttcaggagtacgttcgtgaagttcgagtcaggctgaaagttccagatggaagtcgactttatgatgactatggcaaagacatggacttcccgaccatggtccggttcaattattggatgcagacacggttggaggctattggtgaacgtcgtatccggttgatgcccatcgttaatgtccaacgggcgcatgtccgccttgacatgaagaccctcgtgaacctgttcaggcacgtgttccccaaagacccaaacatcgtcgagctttcaaagtgggaaaatataaaggatcccgaccgcttcatgttgcctctgaagcctgcagttaagaagaaaaaatcatgtggtcctggtgaatgggaggcatacaagttggcccaacagaagtacgatgctgacgttaaggatatcaaggctactgacgagtacagacatgcaaagggtaggtatgacacgctcgtgaacgcccgaaaaacagtcgcaggttccttctgcaagaaaccacctgtcaagacggggtgggtgttcgattgtagcatctgtactgactgattctcattgagcatgcagtacagcaagacagtacaggtttgcgtatccgatctgaagaagacaagtaagaggtctcgtgacgaggaaggtatgagcgtctcagaacagtatgaccataaactcaaaacgacattgcccgatatgggtatcgtcgttctgggtgtggatcctggtaggagcaacatcgctacagtcacgtatctggcagacgacaaaagcaagacatggaagcttacacgcggagctttttaccacaagtctggtatcaagaaacagaaaaaacagcaagaaaaacgtttctcagacatgattcctagatgggagtctctgcgtgaaaatggagcagcgttgagtacatccaggaaggatgatatctcggcttacttgaaaaattacgctacgttttccgacgagtggtggaggatggcactccgtcgcagagaatcccgagacaactttcagaggtacattggcaagcgcaaggctatggactcattttgggcagggatcaagcgcaacatgaagttggatcatcctgacctgaaggttcgcgtagcatatggttctgcaatcacgaagctgaaggctaccggaccaggagaagtagctgtgcctacgggatctatgttcgcttcctgcaagcgcctcttcaaagaggaggttcatgtgacagatgagttcaagacgactctcatttcttgggaaacaggtgccaagaaggaatgtgtttacaagattccaagtgtccaaataaccacggaaggtcagattcgtctaggttacgagttgttggggcacaccccattgaaggagactccaaaggtctcttatcgcgaccagttggcggtgagggtgtactgcacacgtaaaaaatccaagaaaaacacaggaggggtggcttagccccctctcttgtcgacaacaaatcgatcaagcggtaccctgaggtacgaggactgcgattctctccagaaaccagcacttattcggaccgggaccgctcctctgctctcacaatcgcaaggctgcactgcatggaactgttgggtcaagggagaccgcttacattttgcagggatgcgtgttgttgatgggctacaaaaaaacatgatggtgttccactgcaatgtgggttgctacaccataaggttataccataaggtgtaccgtacactccagaaagcggtttcattttagtattccgtcgagtgtagctggatgatgcaatgggcgttcctgcctcccggcggattttgactggttgcgaaacatggtatggagcggaattgtgattcctctgtcgttccggaggctctaaattctgagtagaaatctcaaaaaatccgccgggaggttttttttcattcaaagccaatataaaacataacaaaatggatattagtattgacttcgtgtgcaacggtaagaaatcattgcaacctttgatgtgggatatgcttgcggccgggggtaatgaatcttgcaaggagcttttaaacaccttccgagtagcttatgctaccggtctgatcgattacatccgccagatgtgtggggatgatgtttgcaacccgaaacaggtcgggactgtaaacgtcaactactcttctgacatcgacgtgaatctgaacttcaatggggaaattctgcataatgatttggatcgcatcgtattaattttcaaatcaatcaacgattaccattatcaacgcttcaaacgtaatttcaccgacatgtttgacatcaacatttacggatctcatttcggcatgctcaacaaccccaagagcgcgaaaagtaaggaagagtttgaccttatttctaatgatccgcaacaacgtctctttgccatgggtaagttggcaatcatgtgcaaatggagcgatagagaagacatgttgaaggccagagatttcattaagaagcagccgacatacaacagtaataacaatgagaagttgtacacatcttatctgaaaaagtatttcgcaattgatagaaataatacgacgactactacgtcgtgaaccggggctgtatccggtatagtgaaggtgggtcatattttctcgatgacgaagctccttgagaacgatgtttactggtccgttggtgcgtttctccacattgtttcaggaaggaaggatcttccagagagcatgtacgtggactcgatgttggacaacacggggttcattgtttccaatttgcgtaaaaagcacgtttgcaaaaaagaggtttctccgtacaccactgtgctccgggttgctaagtacatggagagggtcctggatgcttacatgttgtgtcgacatgtcaaatcagaagcccacttacagaaattattgaccatgtgctctaagttgaacattgagaggaagagaaacgtgattgacgatgaaacgattaataatgtagatacgttcgtttcattgttgggacttaagatgtcgaatcggatatcgtttttgaagtttgaaaagaaaattgtggagtttgtcttcgatctggtggacaatttacactagtttttatgaaaataaatgtttacactcgttttttgaggaacggacggcggatcatgccgagtcacacggcgaccatgcagtgaagtgcatcggcagttaaaacagatgtcaagcaaggtctacttattttcggaaaggaaacctgttctgagcaaacacgacggttccgcaggcgaccgtcccagacaccaaggccgcaatggccacgatcgatagcacgagcggggccatggcaagttgctgttgctgttgctgttgctgttgctgttgctgttgctgttgctgttgctgttgttgttgttgttgttgttgctgttgttgttgatgttgttgttgttgttgctgttgctgttgacttggttgagaattctctggacaagcggctcctccgccagggagccatgagttgttcaggctccggaggccccaatagtaatatgggtcaacgtagctcaacgcggaacgcggaaggtggtatcggtcgtcgtacacgcttggatacgagtagcgtatgttctccgtgtgcgtgtggtgcgtgttccctcctcccccccaaccgccgttgccgctgcctccaccaccaccattgttgtttgtgttgttgttggtcacggtgatgttactgggctgtggtggggggggggggctcggaagcgggcggaggaggctcggaagcgggcggaggaggctcggaagcgggcggaggaggctcggaagcaggcggaggaggctcggaggtgggtagaggaacatctccttctgcaaattgctctctgatgtactgtgaggaaacgttactgcagttattggtgatcagggtaatcactgacgccaacactacaagaataatgatgattgctaccaaccaaagccagatgccagggacgcccttggacgaggttcgcgctcgcgaagtgaccatattgtatgtatgtatacagttgttctcaaataattttgggacactctgatatcccctgaaaccagatacagatccttgcttcactacgaatattttttgaggcttttacgttccacgatatccaataatccagtccgtgtcgtctgcgtgttgatggattttataaaatcgtattgttgtagacaccaccgcacagagacgtttcatttatatattatgttgagtgtaaatggatatcatccctcgaatgcaacacccgcgtgggaggacaaggcaacgtccagagttcaaactcagagaagagcttataaaccgcaataggggcaaacacatttggaaatgtggtctactagaaatgtcagaattacaaccataccgatgcatgaaatgcaacctgacaatggaagagctgcaggaacttggcaacactggagtttgctcctcggaaattgactttacaggcaccgtgattgccgaggatggccgactgttattggatttaggcacatccatcgtcatccgtgattggatggggtagagcgtttattttttcgcagcatcgtggcgagcggccaagaaatttgttggccgctctctacgatgcggtttgctggtccctgaactctttcttgaggtaaaaaactctcttccgaattcgaatgtgcttctttatcttcatcatctcttttgaatcagtttgacaagggtcggatgcctgtccctgaccaagcatggaggattcctcattctctggtgtacgtaccattgttttgcggacgcctgtgtctatggatgcattttatctaccgccccattttttttattactattattatattcaaaaacgtacacaatgcaacctaagcaacaacaaactaagcaacaacaaactaagcaacaacaacataagcaaattggctcaggtatgttctcaaccgctgtgaccccaaagatggtgcagaaggaactcgcaaagatccccccaggcgacctcatcaaccgcatgaacatcatcaacacaaaccaacacatcaagaagacctcaaccctagaagagcaggatgcaatcacaaagctcgtgcagatcatcgagacagctacgaagcagaaggaggatttcgataaggccacacgcgacttctataccgtctacgataagctcaagattgcaatcatggaaacgtgcgacaccggccccaggttgtgcggcgtcgttaacagcgcactcaataccccgaagaggaactcgtaaatttcccgacaataaaaaaacacacaaaatgtagacgcgacgcaaaaatacactatgcactacactcccgacgccgcagccgcacccatcatggacgcattcttcaaggaacgcgagaaacacttcgctacacaacatcacatcgactcgttcgatgacctactaggaacgcgtctaagagcgatcgtacgcagcatgaacccaatcacaatggtgcgcgaagaccccaacacgaaaaccaaacacacggtgaaggtgtacgtaggaggagacgaaaaactccgccccgatcacgacgtgcacataggagacccaaccccgactctaccatcacaagcccgggtagcaaaccaaacgtacggggcggacatcttcgcagacgtccacgtggtctatccggacgacaacgacgagacacgagactttgaacgcgtgcacatcggattcatacccatcatgatccactccaaagcgtgctctctaagagggctaaagccgcaccagttacgagcacgaggagaatgcccatacgatatgggcggatactttgtaatagacggacgcgaaaaggtcatcgtgacacaagaggaacgcgtcccgaaccgactctacacacgacgcggagagaaaatagaagacgacaaactcatcctaaaagcattcatcaggtgcgtctccacagacgcacgcgacgtgttcccacgcacaagcgtcttccgagtcatgacttcgggtgaaatcacagccacggtcacccacatcaacgaaggagccgtgcccgtcacaactctcttccgagcacttggcatcgaaagcgatcgcgccatcctcaaaaccatcttccacgaagatccaggagaagagagaaacaaggtcgaaatcgcattcatgcacgcatccatagccgcaggacacaagtccggagtaagcagccagagaggagccatagatttcctcataccacgcacacgattcaagtcccaactcgacctcaaaagcgtcctcacagacgacctcttcccaaatgtaggacgcacgttcgaggccaaagcaatcgccctaggagcagtcgtgagacatctcgtaagagccgctctaggaaaagaacccatgtcggaactcgatcactacgccaacaagagactcatgtgctcaggtgcaatcacagccaatctcttcagagacgcgtacccactatcaatcgcaacaaccctgcgcacgctcaacgaagagttcctcaacggaccatggcgagtcgcaaacgatatacacacgctcgtcaacgaagccaacctgaaaaatatattccaaccaagaatcatccgagaagccctcgtacgagcactcaaaggatcgcgacgcggcgatgacaatgcacgcgtgcccgtccaagaactcagcagagtctcatatctaggatacatttcacacatgagacgagtaaacaaccccgtcgacaggaacgtcaagatagcagacacacaccgtctaaggccgtcgcactggggagtcatctgcccagtagagtcaccagacggacccaacgtaggcctcctcacgcacctagccacgcttgtcaccatatcacttgccataccagaacccgtcgtacaagaaaccataagacccaccatagacaaatacacgagacatctatcaaacagcacactatccccacaagcaaccgcggtgcactttaacgacacatggatagcgatcacagacacacccaaggacctagtcgatgcactacaaaaaatgaggacggaaggcaccagactgaacacacccggcgtcacatgggacgtgtggaggaacgacgtggcaatccgcacagatgcaggaagatgctgcaggccactaagaagagtacaagaaggaaaggtcgtaccaatcaacggcgatccgtcgtggaccgaattgatacgcagcggagcgatcgaaatgatagacgtcgaagaagtagctacatgtctagtggcaatgaacgaggcagacgtcaacaatcgagacccgatcccaggcagatacacgcacgcagagatacacgcaggaagcacactctcaatggtgagcaacaccttcccactacttaaccacaacaacggggcgtacaactcactatgtctagcgcaatttaaacaagcgctaggaacgaccatgacctccatcagggaccggttcgatacaaacacattcctactacaccacgcccaacgccctctggtaagcacgagcttcgcagaccgactcttcggaggacgtttcgcgcacggcgagaacgtcgtagtagcaatcgccacatacacaggatacaaccaagatgacgccatcatcatcaatctagacgccgtgtagcgcggccgactagaactcacagtattcgaaaccatccggtacgaggagtcagaggaggaaccagaggacccaaacattcaaaaaacaaaaaaacaaattgtgtttgcgaacccacagcggctagtgtcacgcgggtacgccctatcaaccaccaccaaaacaaccacaaaagaatacaaaaacctcgacgaacatggaatgccaaagatcaacaaaatgctaagagaaggagacgcagttgtaggaatggtcaaggtaccatcgaccgcagcaaaggaagacgtcttcacggacgcatctcaacgtctacaatccagagaatccgaccttcccacgtatgtagacggcgtccacttgcaaaacatagatcagaacacagcaaaagacaacgcactaccacaacttagagcatgcaaagtacgtctccgccagatgcgcagccccgaactcggagacaaactaagctcgcgttacggccagaaaggggtggtgggaatgattatacccgccgtggacatgccgttctgcgcagaggacggtatcgtacccgacatcatcatcaaccccaatgcattccccaaccgtaggacagtctcgcatatactggaagccgtgctagcgcgcgagggagcagtcaaaggagctcgcatgaacgccgacacattcggaggcgaagacatcggagccgcgctgacccaactgggtctgcgtgaaaacggacacgggaacatgctcatgcacaacggacgatccggagaagaggcgaaaacacgcatctttgtaggcgtgaattactacggtcgcttgaaacacatggtagaggacaagtaccagtcgcgtgcacgaggaacagtcgacgccacaacacgtcagccaacgaagtccaagggacagagcggagggctgcgcatcggagagatggagcagaacgcactcgtcgcacacggcctcgcatcgttcacacgcgaagcgttcatgcagcgcagcgatcaccactcaactaaggtcaatgccacgtcaggaacgccggcggaatggtgggccgcagcacgcgaagacccagaaggacccgacgaggaggcaactgttgaaacaccttacacgttcaccctcatgcagcacgaactcagagcattgggggtggaggcagcgcttctcacatccactgatgaattttatttatagctcagtggcgttgggttgtttgattttttccgtgtaaaattcgtacgaatcaatgtcgagcagttgcaacgccttgtcgatcaaattttcccgcatgctatctggaagctccagacacgaggacgggttgcaccaacagatgtttacgaacaaccgcccgctctacgggacgtcttctgcactcctcgataagcgtgcacagtcgctcgaactcttcgtagtccaagaatgtagtgtgacatgaagcaaataggaacgccgttacaacatgccaacgcggcttccgttttgcttgccagatagcggtataaagaattttccaatttattcgataacaacaacaactgcgaagaccataagaccatcaggagtatcgggagagatatggcgtctgcaaaccccgcttggacggatgccaacgtcgtctcagcccgcgaggcattttgcaatcgcaaggcgtttgtttccgggtggtcaaactacgaagacgtcaagctcgtggcgtctctcaaaaacgcaaagtcgcttgcgcaggtcaacgagctggagtgtacttacatctcgtacatgcaagcattggagcccttccaacccaagcgttcagaggtggatgagcagaaggaatagctcatggagagcattagcgataaggcgggatcactgatgaattggtatatgaaggaattgatagacagcatgcctgatgcaaaatatgtgcccatgatgtacgtggtgccccagtcaggcacatactgggtcaagggcgtgccgtttgctcgcgaacaggcgggccgcgcccgcaccaacatgtactttaatggggcgaccgttgttgtatttgttgccgttgttgctgcatttatctacaaaaagtgctgtcaaattaagtacgaaatgaattggtgatccgtgaaccagtcgattctgaattgggccatttgtaaatggtgcggaaaagaaaacggtaatttacgttgaatctaacatagttttcttttctcaaggaattcagcgatatcagagggggtcttcggttgctcaatgccttcgagagttttttctgacaatagtttaacggcaatgtccggagtagtgttgatacttgtattcaacagacagaagtttgtcgaacccttatcaagcgggtgaattacaatcgagaatttagattggagctgagataagaatatgtccgcaatttcagagttgaatctgaaagatttattcgtacctgattccatcccaatgttgactcggcggttccgtgagaatgcatttttgttttggtcatgtccgccaagtctcttgtagagagtggagtcgggattcccggtggttaatctccgcgtcgggataaaccatgcatctgccttatctatactcctcagggtgacgtacatgataatgtacaccacaatcgtcttgatccacattccataaggagcaggaggagcaggaggagcaggaggagcaggaggagtgtaagcaataatagaacgtactaacgaggcttaactaatgcaatcaaccttgatgctggggatgagcccagtgttaatagctgtcaggataacaactgtcaacaacacctcggcaggttacttggctcgtcagctcagtaaggacatcctgccttgtgttacaaggtacccggccctagctgccctctggtcctatccacggatccaaagggcctgtcgttgcaaggcaacagtctagggttcgtacagttcagtcgggtctaaggtatccg

SEQ ID NO: 187 - DNA, 21620 bp, unidentified
  source 1..21620: mol_type = other DNA
  misc_feature 1..21620: note = Fanzor polypeptide
actcggcgaatgtagtgttacaaggaaatgacctgtaggagagaatgtcttgtaccatggaaaataggaaagaaccatcgtcaaatcccctcgcctcgaatacttggtctatacaattaagttctggtaactgcatgtttttgaacacacaaatcatgtcatggctagacaacctcaatattacaccgagagacacaatggatcctgaagaagaccctacgaaggtgtctatctgatttttgattcccgcctcttcaaaatacttgatgcatccgatttgcaaccctcctaggaacccgacgcccccgaatgtgagacatcgaacttgagtaagatcaatcatgattgttacacttggaccagactctttgtgaacgcaacagacgcattaaatcacacgacaccgtagacgttcttaaaagtacgatcatgaagacatgtcgtactcctcgggttcgagaaattccgacatctccacacgaccgatcttcttacgcgtgagcctcttcttggcaaggtgaaacttgcttgtggtcattcttcgagtgacggtctgcaacattgatgcaacttgaggtgcctcatccaagcgtgaatcattagacacatctgtatccacaacaatggacggagtatcgacagactttgaatcaactacaccatcatcctcgacatcgacatcttcctcgacatcgacatcttcctcgacatcaacatcaacatcgacatcgacatcaacatcaacatcaacatcatcatcgtcgacatcatcatcttcctcgacatcgacatcgacatcgacatcgacatcgacatcgacatcgacatcgacatcgacatcgacatcgacatcgacatcgacatcgtcatcgagatcatcagaggcagggttcatagcacaggaagtgttcagcgaggtcccggagatgcggcacctcgtctcactccccagagactttgagatcgatgacgacaacacgcttagcaatgcgccggtcgggtcagtgggtctgaactatgtgggcattatcgcgtacctagtgagcgcgatgcaggaacaagcaaaaaagatcgaggacctccaggcgaggacctcacgcggcgttgttgtccccggacgtgagtctcgcgagattggaaagcgatcgacttgaggggctcaagcagctgaatgtgggatgaatgctcttgggcgttcattcggggcggaaaaaagtgtactgtaccttagatatcatggtagagcacttgaaaacagtaggtgagaggatcgaacacctaataaatgagatggtttctttgtacgaagagacaggagtggagtatttcaaagcccaggcatcagcatggtcccaatgggtgtggatgttacaggatagcaagcgccgagagtggcagattacatgccctggggatgctcagggtgtgtggcattcactaaagggttgcaacagttgactcgtttgctttccgaaaataagtaaacataatagtgtataaggaagttgcatgtactaaatatcagaatgccatgtatggcaaccaaagcttctgtaaaattggcaaggtctccgatgcccttggtgtctccaggaccgtcctccgtcgatgggcggataatggcacgatcagaacgatccggactccaggcaaccaacgtctctttgacccaagcagcatccaaggctacctcatcgagcaggaaaaaaaacccagcagtcgtcaagtcattctctacgcacgtgtgtcctcacacacacaacaaggcgcttggagttgagccctgatccgacgtccttgacttcaatgacttgctcgcatccggaatgtttgtcagaaatatggttttgcaagaacaattgctgtctgagcaggttgggttgttgtttgtgtgaggacacacgtgcgtagagaatgacttgacgactgctggtttttttttcctgctcgatgaggtagccttggatgctgcttgggtcaaagagacattggttgcctggagtccggatcgttctgatcgtgccattatccgcccatcgacggaggacggtcctggagacaccaagggcatcggaggccttgccaattttacagaagctttggttgccatacatggcattctgatatttagtacatgcaacttccttatacactattatgtttacttattttcggaaagcaaacgagtcaactgttgcttccttttgggctttgtgaatttcgcgtggccacaacgtacatccgatcgtcgtcaaattgaaactgtaccgtcccataatatttgaatcatgtacctcaccctcctcgtattcggatccggggagaatgactctgcacaatttggggaactcgagatccccgttgggacatgatacacgaggtccgaaccgtaattgtgacacaccctatccccatccatcagtcagctgccccttaacgtaattcaacaacttgacatcaataacatccatcctcgagggcctccattcgtccggaactttgtttttcccaaaagaaaacagacctcctcctcctcctcctcgttggtgtttcttcgaaaagtcttcgaaaagctcaagacgatctcgacgaacatgaacccgttcgcgacaggttttaaacgggcgtgcttgaaatcgaccggccacatacccatcgagttcagcagagggacctcttcgatcagatgctcgaaaccgaacgatttccatcgtttttttatggacgcgatcgcttctcgcgggacgggtgtgggtgtggacaatcccaggttgacgtcgggacggtgacattgcacgtcgtccaacacggcggggaaagtcagcgtaatcattggcgcacacgatcagaatctaaaatacgaagatgttaaaaaatcactgacatgttgtcgcgttcctcttctgcactcgaaggttgcaacaaaaagtccggtccgacttttctgagaaaaatcatttcggagaaaaaaacatttcggagagcatgacaaataatgaatgggacgcttcgctgaaattttcgccgtgttcatcatcgtgatcatcattgtagggtacctccgcggattctacagcgaggtcgtgttcgtgagctcggacgtcaacggtcgcgaatacctgatgcgtcggctgcccgaccgccagaacgcggcgaacctcaaggcgcgcatcaactcgaatcttaacaagctggttcagcatctcgtggccaagtacccgaaaaacccggtcgtgcgccagcggtacgataactacaacccagacgctctctcggagggcggggcggaacttgggtacacatcgtactctgtaaacaagggtgagaagatcgtattgtgtctgcgtcagcgtgaccacgagctagtggaggagaacatccttatgtatgtcgcgatccacgagctgggtcacctcgcgacggacgaggtgggacacacgcccaagttctggtcgaacttcaagtggatcctgggcgaggcgatgtctatcgggctctacaccaaggtcgactttgacaacgagccacaaaagtattgcgggatcaacatcacctcatccatcgtttgatggtttacagcgttcttgtctacaaaaaatatacaccgaaaaataatgagtcatccggggtacgcgcatgcaacgtacacggtcctgtgtgtcgccttcctgatcgcgtggatttccagttacatattgaagtcgaccaccagcagcagcgacgagtcgaccttggagaacgtagggaccatgtacgccggtttaaggaatgaccttgtgttctcgatgatagagcctctcataatgttagcgatcggggcgaccgttctggcagtactgcacgcgtttgtcctcccaacgatcgtaggaaacgataacgaggccatgttgttctgcggtctgaatctcatgtacccgcatttcaagttgtgcctctcgcacttcattggcaagatctatgatgcttttatgctcttggggatggggtgcgtgcccatactaatgtacacagtcccaatggataagtttatcatctgcattctctggagcagcctcttcatcgtcattgcgtctttcgcgagtagctgatggaccggtcgttgaagagccagttcgcaaaggcgccctggtcgttgggggcggcgacagtgtaaaactgacggaagccggaattacgtttgaacacatcgtgtggctcctgccatttatcgccgtggaagagtttgtcaactcgctttcggaccgacggacgcgtgatgtcgcaagggggacgcgtccctcccaccagcactgtgcccatgtcaccgattgcaggattcatgaacgggttctctttcgtgggcgcgcgacagagcctcgccgtctcggggtcacgttcgagaccctcgttgcgcatcatctcgatcgtgttcgttcgctggccaacgtcaaaacggtggaccgcggcggtcagcgcacctgtcaaaacaggaattagcagcgccttgggggaggcacagaaaatgcacacggcgatgccgtagtatatggagaatctgaacagtgcgttcagctgctctgtgaggagtatccctggaaggggtacgaaactgtagagtgcttccgttgtgcccatgaaactgcgtaggtcatcgtgccatatggttgtggctgccgccgcattgtcgttcatgttgatatagcaactaaactgctttacatgtacttgacaaaattacttggggaccccatacttgacggggcagctcgggaactgcttggcgatggccatggcgacactggcggtgctcttgggtgtatggagagcctcgtcaagtacgacatttagtgtatcggtttcggtttggcttacctcgacggtcgagacgcctggaatggcccttaccatgtccatcttctcctccgtcagcacatttgcgtcgcacaatgtaattgagatagtgatggtcattttcagttcatacaattgttttcaaaataaaatgggattgtttttaatcagtagtgagtgtacgcggcgcctcctccatgacgacggtaccgcatccccattcccaactttacgaatgtctctagaatgaatataagcatgacgcctgctagcacaaacattgcgagctccgtcaacgcttgtctaggcttcggggacgtgtccatttgtggatgaaagaatccttcgactgggtttttactgcttttaggcaggcgagcggatgcaatttttgttattgtgggggtggtgggcggctcattgtatgaatctgaatcgttggcatcgtcattaggatgatcatccgattcggagtcaggatcattgtcgtattcggtattattgtatttaggatgctcttcaatcttttcttcttcggcatgagattttcgatactctgtgtctcgttggtaaatgtccatgatgtcgtcgaatgaggaattgaacccctgtgtgtacatgtcgcacaacggactagggttcttgtcaaagacgcacgcgtacgacggcgtctttgatttcgcaattgattcccccccctcatccttttccttcttcttccggaagctgctcgtcgtcttctttgttttttagtttttggttcccggagctcgcttgtccgtgaagacacggtcgtggttgttccaaacctcgttcaatggggctccagtcaatatgtacgcggacatatatgcttggtgaatggctggctattacatgttgaaacataacactttttttgacacgcgataaacagatctccatgcgcactttttgacaaaaatattgtggtttgaagaaaagaacacatccgcatggaggctgcgcttctccttatcgtcgcaggcgcagggtacatgctttcaaagcgacgcaacgaaccgggaagggtgccgctagctgtctccccgatgacatcatacacgataaagaagagacccggcacattccgcaaatcatcatcatcatcaatgcctatctcgtttgacgcgtctgacgcggaggctcgtgaccgaccatccgttcacgacccgtaccactgcacacgcgtgcaagatgtctacgcacacaaaaaggagctcctcatgcagaacacattcaggtcctcaatgactggcgaccgcatgccagcgacgcacggcaacatggtccctttcttcagagggagtgagcctccaggatcggcgtccgtctccacaaaccgaggacacgagatggagaacttcgtgggcgagaaaggctcccaagacttcacatcactaagcggtggaaagcaagaaattcggcaactcttcagccctacagaggcgagagtggacgtcctgcgtccgcctgtaggcgttgggggatccgagtaccgcgacgtcgtgcaattgccacgcaatcgcgctaacgaactccctttcgaacaggttcgtgttcaaccgatcccggaggaagagatgcgcgaaatggggggtctgcgcgcgctaacagtggacgacatgcgtcctctcacgcgtcccaaacagagcttgcctggatagcttatccccgggtcgtccacatctactgctacggaccgacctaagcaccaacccatcaacactcagacgcgcccccctcctctcatccgcgagcagaagaccaccgacgactttatgcgcaccggtggagcggccgggtctcagcccgggtacgacaagatccgcattgtcgaccggcacaccgagcgtgaaacgatgcgttccgccgacctgtacaagggtgcagctgcccctgtgggcgtgcaccggatggaggaccgaggagggtcccaacgggacctcatctttcgaacccccctgggtgagatgtcgcgagggcctgccacgacgacggtcaagagcgtcactgactacggtcgaagcggtatgtcggcccttggcaacgcgcgaatggagaccgggtctcgcacgcgccctggaactctcactacggccgtcaaggcgttggtcgcgcctttgcaggatgtgctgcgcacgacgcgtaaggaggagtacctcgattcggcgcctgtggtgaaccttgtaggatctcacggcgtttccaagctcacggtgtacgactcgcaggatgtcgcgcaaacgacgctcaaggatgttctccttgattcggcgcctgtgttgaaccttgtaggatctcaaggcgttcccaagctcacggtgtacgactcgcaggatgtcacgcaaacgacgctcaaggatgttctcctcgattcggcgcctgtattgaaccttgtagggcctcacggcgttcccaagctcacggtgtacgactcgcaggatgtcacgcgaacgacgcgcaaggaggtgggtatccacgacggacatcagactggcaactttgcgggcggctctgtgtcacgccgcggtcctgtggtggatcctgattctggagcgcgccacacgcttcgcgaggcgaccgctgtcaaccctgacggtcaccaacgcaatttgtatgcgaagaacgttggtggcgttgtttactctgctgatgacgcggcgcccgatgcaactcgtaaggacgttgcggtgggtcaggatcgtggtggtggcttgccaacgatgacacctggacgcggagctaacagtgtttcagtgttggaccctcctcgagcgactatgcgtgagacggcgactgatacgggaacacggttcggtgtgtctcggcttgcagagagttctggtgtgtacgttgtggccaagcccgacagtttagaggcgacgatgcgcagcacgacgactgacgggtctgagtactatggtacttctgagtctgctgtgaccggaccggtttcgcatgccgacgtcggttcggtggagcccgcactgtctcgtgaggcgcttgtgatgactgggcgtgaatttctggttgacaggagggggtgtgacgctccggctggggcgcggttcggtgccggcgtagctgagatggttgttgttggcgacgaacgtggcggggaccctgctttgcgtgacggtgggtggcagagtaggtacttgaattctagtgtagctgggggcggtgacatgttgttgccttacaacactgtcgagcctgatcctgagccgcggtacacggtggaccgtttgatgggtgacatagagggcagacgtgcacaacaagaccaccaacaataaaaaatatcatatgtatgaagtttgtattgtgtttgctgttgttgtagcagttaatgggcgttccagcctccccggtcgatttttactggttgcgaaacatggtctggagcggaattgtgattcctcagtgctgatatctcaggctcaataacttgttataacaaaaattgaatgcgtgtggcaaacttattaaagtgcacacaacagcacaacagctctatctctcacaaatggcacgtattaagcaaaccgctcgtaagtccacatgtagcaagtctcccagaaagcagctagccataaaggcgtctaagtatgcttcaaaagtacctgccacaggtggcgtgaagaaacctcaccggtaccgccccggcaccgtcgccctgcgcgagatccgcaagtaccagaagtctacggaccttctgattagaaagttgcctttccagaggctggtgcgagagatcgcacaggacttcaagaccgaccttaggttccagtcttcggctgtccttgccctccaggaggcctcagaggcctacctgattggcctctttgaggactgcaacttggcggctatccacgctaagagagtgacaataatgcccaaagatattaagctagcaagaagaatccgaggagaacgtgcctaagttaattagttgttgtgtacatttttttgaattcgtttgcatggagaagtcacaattttgtaatgcaatagagattgaattcgtgtgggaaacccatacagttgttctcaaataattgttggacactatcccctgaaaccagatacaggtccgtggatcatcgaccttacccaagatcgtatctgatttaatcaatgatctggtttaccataaacgtcataccggtttaactctggtttaactctggttttgaaaacagtaggtgagaggatcgaacatctacagtcggcggaacagtaaaatgaaacatatatcagatggaaataaatgtacgacattgccgttagaaaattggcgttaagaatggtcgctgacttgggtgtgttaaaaacttctgtgtttacgaacatcagtcgttctactctgtggaggtggaaacgctttggtgtaaatcgaaaacgacgtgaatttggaagcaaactttttgagacgaacaaagatttgttgaaattgtttttattgtcaactcaatgcacaaccgcaagaggtgttgttgcatttttcaaaagtactcacaatttacgattatcaactaaaacagtgtatcatttcataaaacacattggctttacaagaaaaaggagcaaactccgtggacagtgtaaaggggacttagttccacctgtcactgaattttgtagtagatacaaggatacaatcaatgctgggaaaattttagtatcagttgacgaatgtgggtttagtgagcgtctcaagccacattatgggtattcccctgtaggaaaacctgttatcgttaaaactactggtgggtgggtacaccatagtttgttgatggcagttttttcagatggtaggaaggagttcgttgttaagaaaggatctgtgaagaagatggacttcgctgcatttattgactcattgagtttgtgcaataattcagtagtaataatggacaacgccagtatccataagaacttggtcctcagaagccccgtcaatatttgttacactcctccttacagtccagaattcaatgctattgagctgtgcttcgctaaggtgaagaaggactttcgtcgattgaactatataccaaacgatacaaagacgcacgtgtctgatgtgatttccttagcattcagcaacctcactgataaaatcattatgggttgttttgaccacatatggaacacgtatgtgatgtttgtataaagagttctgtgatgtacaaattatgtaagatggcaacgaaacctccgacagtcgcgaaattgaaggagctactaaaattggccgaagtagcatactcctcaaaggacaagaaggacaatattgtccgtttatgcgaagacaatggtctcatcgccagaccccctccagagtacaagacggtggaaaagatgtgcgtcgtgaaatgcgccctgaagaaggcaatgagtcttgacgatgaagaattcggtaagttcagggggcatgtggatcagctcgtcaatgtggtgagccgcatgttacggcgttccagtctggtgctgactttccatgtcacgaggctcatggagggcgacctgccgattcctaatatgtacgatatgaaggatacctactggaaggattggctaaggatcggagttgacggcgtctttccagatgaagagagtagaatatcatacgaagccgtgaaagacgtaatcggaaaggtgcttggtagcgatgaccctgactacatcaactcctaccctatctatttcgaccaggttttgaactatgccggtcacacattgagcactgtcgtgtcgaacaacgcatgggttcctttggtacctcgtctgacccgcctcactaaggctactttgaaggcactgggagctccgaagaccatccgtgtgtacgacgtgatgagggtcatccaacaagaaatacaggagatggaatcttggccagagtctgttcaggagtacgtccgtgaagttcgagtcaggctgaaagttccagatggaagtcgactttatgatgactatggcaaagacatggacttcccgaccatggtccggttcaattattggatgcagacacggttggaggctatgggtgcacgtcgtatccggttgatgcccatcttcaatgtccaacgggcgcatgtccgccttgacatgaagaccctcgtgaacctgttcaggaacgtgttccccaaagacccaaacatcgtcgagctttcaaagtgggaaaatgtaaaggatcccgaccgcttcatgttgcctctgaagcctgcagttaagaagaaaaaatcatgtggtcctggtaaatgggaggcatacaagttggcccaacagaagtacgatgctgacgttaaggatatcaaggctactgacgagtacatacatgcaaagggtaggtatgacacgctcgtgaacgcccgaaaaacagtcgcaggttccttcttcaagaaaccacctgtcaagacggggtgggtgttcgattgtagcatctgtactgacggagtctcattgagcatgcagtacagcaagacagtacaggttcgtgtgtccgatctgaagaagaccagtaagaggtctcgtgacgaggaaggtatgagcgtcgcagaacagtatgaccataaactcaaaacgacatttcccgatatgggtatcgtcgttctgggtgtggtaggagcaacatcgctacagtcacgtatctggcagacgacaaaggcaagacatggaagcttacacgcggagctttttatcacaagtctggtatcaagaagcagaaacggcagcaggaaaaacgttttactgacatgattcctatgtgggcgtgtctgcgtgaaaatggagcagcgttgagtacatccaggatggacgacatctcggtttacttgtcaaattacgctacgttttccgatgagtggtggaggctggcactgcgtcgcagagagtcccgagacaaccttcggcggtacattggcaagcgcaaggccatggactcattttgggcagggatcaagcgcaacatgatgatggatcatcctgacctgagggttcgcgtagcatatggttctgcaatcacgaagctgaaggctaccggaccaggagaggtagctgtgcctacgggatctatgttcgcttcctgcaagcgcatcttcaaagaggaggttcgtgtgacagatgagttcaagactactctcatgtcgtgggagacaggtgccaagaaggaatgtgtttacaagattccaagtgtttctctaaacgctgaaggtcagatcagtatcggtgatgagtggttgttgtgtcacactctcttgaagaagcctcccaaggtagctgagcgcgacctgtcggcggtgagggtgtactgcacccgtaaaaaaatccaagaaaaacaccggaggggtggcttagccacctctcttgtcgatgtcaacaaatcgatcaagcgataccctgaggtacgaggactgcgattctctccagaaaccagcacttactcggaccgggaccgctcctctgctctcacaatagcaaggctgcactgcatggaactgttgggtctagggagaccgcttccattttcccggtgcaaggctgcgtgttgttgacgggctacaacaaacatgatggtgttccactgccccgtggatttctagaccataaggcacacactccggtgtggccgtacactccagaaagcggtttcatttatatgttccgtcgagtgtaatacacgagatggattctttgcatgaagcgacaggcgtggattatttcaaagcccaggcatcagcatggtccggatgggtgtggatgctacaagatagcaagcgccgagagtggaagattacattccctggggatgctcagggaatggattgattgatcatgcaaacacacgcacgcagagtgataggcgaacggaggatagagagatagagagataggatttacatcacaggatcacgcacgcacgcgcacgaaggtgataggcgacattaactagaaagccagacgacaagctgaatgaatacatacaaacaggatcgaatgacacatccatcgaccgaatgcatgcatgcaagcaagcaagcaagcacgcacacgcatgacctaacttctttggcggaatttgacaccttcgcggtcaacctgacacctctgtcagacctatctgcgtttacgcacttggacatttcggaaatcgaagagctcgaagacctgacacctctgtccggtctaacttcgttggttcacttggacatgtcgagcacctacgtgtgcgacatatcaccgttgtcctgtctaacttcattgattcacctggacatgtcgagcacctacgtgtacgacatatcacctctgtccggcctcacttccttggttcacctgaacatggcgcacaccttcttggtcaacgacatatcaccgctgtccggcctcacttcgttggttcacctcgacatttcggaaatcgaatacaggctcgaagacatatcaccgctgtccggcctcacttcgttggtccacctggacatcaattacaccgacgtgttcgacatatcacatctgtccggcctcactgcgttggttcacctgaacatgtagtacacctgcgtgaccgatatatcacctctgtccggcctcactgcgttgcttcacctgaacatggcgcacacctacttgagcgacatatcacatctgtccggcctcacttcgttgcttcacctcgacatttcgaacacacttgtggacgacatatcaccactttccggactcacttcgttgaagtacttgaaaaatggagtgtagtcatccaaatcttgccagccacgcattatttcttgtaaaagtatttgttgaaattgcagagaaacattcttgcttcaaacattccccattcaaaattgtaaaatgtaggtgaggaaggtttgtaatctatacaacgtgtccaagagctcactacatagatgggtcaatgctgatcaggtgggtaaaatcaagcgtttaaaacggaaaaggaaagaattgtccatgcttttacgttccacgatatccaataatattgcagagaaccttcataacatgcaaggatttggtaggtataatttgcaagagttgtaatgtgagattatcgatcagtacggcatcgagacacataaaacaatgtggattttctaggaagaaggcgtttcccacagttctctacggacattcaaaagaaaatgtagaaatgttctgtgacaagtacagagaaagctctaacgttgtttgtatcgacgaagcaggattttacgctggcgaacacagcaaatatggatacagcaagatcggttctagattaactacgaagacaatgagtaacctccgtcgtgtgaagttcactttattactcgctatttcatcagggaataatagattatcagttattggagcacaattgtaaaaaataggtttttattaaattctttaaaactttggtcatcccaaagaacaccacgatcgtcatggataatattcggtttcaccattcttcagaaataaaggatatatccgaatgcaaagggtggaagcttttgtacacccctccttattgacccagagctaatgcgattgaacaaatatttggaagcatgaagagagactacagggcatccagactgcagatcgttgcttttgggcaacgttggggggtgcagcaggttgaagaggttctcgaagatattccgagtagcctctttggtaaaccgttcaaccgtctgtatctggtttcaggggatatcattcaaattatactgagtgtcccaaaattatttgagaacaactgtatgcacctacgaggagcgcatgcacgccgttgttgcggtaggatgccttgcccctccacttagggtctagtagaacactctcccatgcggggatgtgatcagagaacaagtcgattctgaattggggcatttgtaaatggggcgggaaaaaaatggtgcatcgctgttaatgcaactagaccttgttcttctgctcaaacaattccaggaccgcatcaagggtcttgggttgagcaacgcttttggtagacgcttctgaaggtacatacaccagaaatgttttgtctttacgggcgagcaagtattcggaatcttgttccgaaatcgattttatcatatcatgatatttcgacttgataacctccaagaaatgatccgcaattctagagttgaaccggtaggttcccttcaagacagttgtcttaccagggctcatggcagattccataccaagtttggttctgcagtcccttgcgaaaccattatttttgttgtcatggcctccaagactcttgtagagaccggtattctgagaggtgttgggccgtaagtttaaccagataccctccatacccttgctcttcagagtgatgtacacgctgatgtaagccacaatcgacttgagccaaagagcaaacttagatgcatcagcagcaagagcagtacgggtagagggggtcgcaggagcagcatacgcagcaggagcagcatacgcagcaggagcagcatacgcaacaaaagcagcaggagcatgaggagcatcagcaggggtagagggaggcgcagtagcagcatacgcagcagaagcaacagaagtatcacaattgaatgtattcaacaaccaatccatttcgtcctcaatctccatattctcagcaggagcaggagcaggagcaggagcaggagcaggagcaggagcaggagcaggagcaggagcaggagcaggagcatcagagttaccagggaggacctggttatccgacacttgcacctcatcatggtcgcaaagaacgctttccgcttctgagggtccaacccggtatgggtttccattactgaaaaggcttctcaaacttcccaaacttcccaaacttcccaaactgagatgtaggcttccggggggtccccaactggaattggtgttaaaatcagacatcgttgtggtgaacttgagtaacttgtggtgaacttgattaactcgattttcattcaattttttttacaaaaccccaaaaacgacgtagtctttgcatgttttgggtgtttcttgttgcaaaaatatgcggtcacataatgtttccaataatgggggggggggggggggcgatacatgtatgggattcatagaattatttgcgagcggttggacgttcttttcgaactccccttgtacatttccttgtgggatgaagtggaagacgagtgagtacctgttcgtggttgtgtctacagcgtaagcgaatgtcattgttttggaccccttccacacgatttgcgtaaagtggccggtgactcctccgttacgcgaatagtaatttttaatttcttcgtcataaaatagacggaatgcctcctttatgacgtccctctccggggagggcgacgatacattgccgtacacgaacgctatgttctctcctaggtccgggtacgagctgtgcgcgagtatcggatcaaacctcagatagtctgcccattgttgcgtgaacttgctctctatgcttatggaaccgtatgtcagcgggggtgtatccacatggcgctttcgatactcgttggtaatgtcgagtgccgcctgtctcattgaaggggacgtgagggtcatgcgggcgcgtcctgctaaggaggatggtggcgaggacaatgttagtaacattcccaatattgatgtgaacacattgagtatcatcattcttttcgaatgcggtgtattgtgtttgtttgttgtacacttgatggaataataaaatacaccaaaatgcgagtgtaaaggtcttcgaacatgaacaaaatgtattatatttgagaatgaatatccttctcctgatcagcactctttcggtgtccctattgcatgttgcgacgggatccttccctggtggaagttgttcgatgcgttcgtgtgcttcctcgccatacgcaattcgttggatcaacgagtcgtcgaactcggatggaagcggtactatgtgcttcgaggtttctaaggcactcgcttgtgaggaaacgtctcccgattggtgctgcacatcgctgaagaacatggcgaacaagatcgtgatgacgtcccctatcgagtgcattcgcacggtcaccgaggttacttggaacaacgagcgtcgtggaggcggcatctattttgatttgtttgataatgatacaagaggggaattcaggattaccaacatgagatcaaacttttggaccatgttcggatcgatcttttgcgtcactgctcgtcctccttgcaatcaaattgatagcttctgtaccgatcctacaaatgataacgaccctacatgcaaggcggccttctatgatgtggacacgcacaaatgttgtccaacttgcgacgtccaaccacttgtccaatctctcgttggaacattggtcccatgcatgaacaacgatccaccatcaccggacaccaccaatggcatgcctccacacatggacaatgacgtgcctccacctccaccaatggacaatgacatgcctctacccatggacaatgacgtgcctccacctccacccatggacaatgacatgcctctacccctggacaatgacgtgcctccacctccaccaatggacaatgacatgcctctacccagggacaatgacgtgcctccacctccacctatggataatggtggtcgcaattgggagggagggtacgattactatgtcgattacaatgacatctttcccccgacgcaaaccgactacctagaaacccctgtaaatcctggaaggtttggaaacccaggaaacccaggaactccaggaaacccaggaactccaggaaacccaggaactccaggaaaccctggaagttgcagagttattgttccttcatcttgtgtgtgtagctgtgatacccccactatcgatcagtgccaagttgctgcatctgatacagctacagctaagctcaccatttcgggctgtgtctgcgagtgtcttcttcattaaatgattaaaatagtaaacaaactgactgttttacgtgaatctcgatgtaattgtgctactttctgcaatgatctccagaacatggtcttgattctgaaagtcgacaagcgatccgtcgtcgtttttgagtgtgatgccgatacgtcggatcgatgacagaggagggttacaagtctttggtgtccccatgatggtccgtatcccgctagatagacttccgcaatgctcggacgtggaagtgttcgtgggatactcgatcactgcgaatgcggtgttcacgttagcgttggggctaacaagtacttcagcgctcggctgccacatctctacaacgatgaaacgtctgaacgctagtaggccgatacggaacggggcctccagtagccagacgttagcgtccgtgtcgaaggtcgctgaccaaatcgaatcagactcgaatcctatgagccgcgccggacatgaggattcgttgccgaaccaaataccgaacgcggcatccggacttgagaacacgatccggctgtctacgtccctaaaagacgcagtgatagaatgggatcccaactgtgtattcaaagcaatagctagagctgcaccagacatgtaatcgccgctttgaagcgcaagtgttttgggagggggggtgcccaccacgataccaaagtcgctatttcgatgtcctggtaacgtgaaggctgcgttgggaagaatagctcctgcaagatgcaccgaccggatgtccctgatttccgtgtcgagagttacggcgtagtggttcggactggggtaggtcgaatggtcacgcgaccgactatcgatcaagatcttgcgttcgacacggtacggagacgacgacgcatagctgctccgatccattgtttattgcattgtatttaccacaaaagaataatcgtaaagaaacgcaacacaaatgcctgcgtcatcgcaaccactcactcctctacagtcggtggaacagtacaatgcggcaacttacattgatggtattgtaccagcggtcggtcccgactccgaaaccggtcgaaatcgaccgggcggcaggaacgccgcccatcatttgtaaaccatacagttttttctcaaataattttgggacactcagtataatttgaatgatatcccctgaaaccagatacaggtccgtggttcactacaaatattttttgaggaaggtttgtaatatatacaacgtgtccaagagctcactacatgctgatcaggtgggtacaagtaagcgtttaaaacgaaaaaggaaagaattgtccatgcttttacattccacgatatccaatttgcaagagttgtaatgtgagattacaaaccttcctcaaaaaatatttgtagtgaaccatggacctgtatctggtttcaggggatatcattcaaattatactgagtgtcccaaaattatttgagaaaaaactgtgcttagtattgtacacatcgacacatgtccctcttcaacgtcaattttgtaaaaaatcttaaattgacattcgcatgttgtcgtgatgagacagcgaaggaggtagaagaagatgtatgactcaaaaagccctcaccatctccctacaatcattcgacgacatccaacaacaacaacaatctttccatcattcccgtgtccgactcataccacatcgacaacctgtaccccctaacggaccacgtggagttctggaacatcttcgtcgtgggcaacgacaagacgtacatccttgcgaacgtgaaagacccgcacatatttctcccccaggtagaccaaatgaccaacgagcgggggaacaggattctgccccccgctctaatgaagatgttcgacaatatatggacgaagacgcatgcaggagtcaaactccagttctacatggtgtgggacggaaaactgttctttgtgaacacgtacccctttctcaacggaaatcagttggtcataggcgcgatcatgttcatgcgcgcattcgacaatgcgtacatcaaagatgcttccccctcgcaataagtactggacataatttgatttctacgtcctcctacggtttcttcatgcgccataggcggccgtcatactggtaaccgcgcatgcacaagaactcggggcgtctggctatgtcacgagaagacgcgccgccgacaacccagtcttcaggaggcacgctgttaacgtccgcatcaggacgtttgaacacgacggggtcaaacgtgtcccatcgtcgctcagccaagcggtccacgatgcgtccggactcacatacagtggttggaatggagcaaacgcgacccgtggatcgaccgtcatcaacgttacgctccatgaggtgggtgtcacagaacgtcgcaagggcgtcgtctatcgtgaacaacctcccggatcggcgaccgccgtagataccgtgaaatcgaaatagcgatgcatccccgccaccgcggcgcgtggtcatacacccctcttggtggcgctgcgcgcaaccggcgatgatcaaaggcgtcggttcgtgcgccccaatgtgcggcgcagcaacaaacgtccgaggcagcagtagtactaccgttcgcatcatcatcatcatcatcatcatcatcatcatcattccatccaggggaagggacgcaggcacccacgccgtacccgtcccacacgcgcaggttcgggaatcgcgaagtgacatcctcagggtcccgcattttatccgacgcgagagaacgcttcttctgctcaccagaccctggatcgcaacaatctccgtcactgtcactttcactttcactgtcactgtcaccgactagacactggttcctagatgtgttgttggccatatcgaagtgacgccgagtcaccaaaaggaacgtctcgtcatccgcattgtagtcgtcgtcagaattcctgttttttttgccattgttgctgggatcacattccttagtagtagtagtagcagcagcagcagcagcagttgcaccgtcgtctttctttccggtgatgtaatcgcgtatgcggctatcacaaacaatgttccgctgcctatcgcgcatacgcaggtccgtcagagtcatgtcggcaaggttgcgcttgtcagagtcgcgaagtgcctggaagcatcggtcgcttctcaaacggttggccgtgtcgtacaagggcattttgtagaaacgtacaaaaaattgtaggcgcgcagaactcccgtaaaaaaaatctatggtattattatacaaactcaataatctcacaaaatggctggaggactcatgcagctcgtcgctttcggtgcacaggatgtgtacctctcatccaacccccaggttaccttcttcaaggtcgtgcaccgcaggcacacatccttcgccatggagtccattgaacaggtcttcaacggaagcgcagacttcggacgcaaggtcaccgcaaacatctcccgaaatggagacctcatccacaaggcatacctaagggtcgagctgccagccatatccgtcccagagggaaccgcattcaggtggctcaactggatcggacacattctcatcaagaccgtcgacatcgacatcggaggacagcgcatcgatcgccactacggagactggatgcacatctggaacgagctcacccagacaccaggacatcaactaggatacgcgtccatgctaggaaacacacccgaactcacccagatatacgacaactgcttcggaacagcaggaaggggggccatgaccgtgccatccaagaccctatggatccccctggagttctggtggtgcaataaccca

SEQ ID NO: 188 - DNA, 21362 bp, unidentified
  source 1..21362: mol_type = other DNA
  misc_feature 1..21362: note = Fanzor polypeptide
gtgcacaccaccccctttcccttttctcctttcttttaacttgttccacgctgtgcagcaatagctaaattaaaacaacaactttccaatccctctcatctcacaccggttaaataactaataatgtcaactatcgtcccttttgtcgtgatcctcttcttttggataaagtatcgttgcaatcttgataatgctgatccccagacacatcacatagatccgtccctgattccatcttttttccaacacggaattagagcgtgttgttcaaatttcggagcacagtctatttttctttcccaggtcgatctccagtttgtgggtcattcagatctatggacttccccccctatcatggacacgtctgaatgcgctttgactccatattgtataggacaaaaggaacagacacaagttgtgtgcgctgaacgccttggtgggtccgaagaatcaaacattctaagcataatggagaaggatgtacacatcacccgacctggatccgttggacgcaacatcgaacttatttggctccgatacactgcgatctcttacttgatacaggaaatcaggaggcgtattcttcttcgagaacgatttttgcatgtgtgtggcgtctcgtaggccagttcgaggtgatagcagaggggtacctgcgaacactcccagaggagaaggaattcacatggtcagtcacgggacggggctagtgccctcttcatcgggcgaacgaaaccacgtttttgttccaaaacactagacgtggcacactttaaaaaacacgtgaaaatgagaaaccgttacgagggtgagggtggatatgaatgaatacggggggctctgctgtcaccaccattggtatcgacacagcgcttcgaagtgtagttatttttggaaggcaaatcgacactctttactctctcttgctttccttcaggcaaactactgtggaaaactccttccttctctccaagaatattgtattaagattttttcgggttaagacactacacaatgattttgatgcgtcatgctgcctgcagaatgaaacggatcatcccctttcctaaggatctgttttgtgtaatggcgcgcgagaaggcgatccaccttctctatcggagctttttggtgcactcctccacccgtctgtgcacacatccaggcgcgaacactcacagttccatcttataaggcggggtacggggggtatcgtgcaagccttgcatgggcaactggatataaagcagactggccaattgtacctgctcgctcacgtttgcatgctcgtctacttctcaccactgcaaggcacgatcaaacgtgcggtgttttgtccagcttaagtaacacgtcgtagcgcacaaactgaagtttggcagcgcgatttttctattcccgtgggggaggggggagctgaattgcggatgcttggtgtgggttagcgtgattgtgagggcgagatagatacatgccatggtgtgagaagccattgggccacccccgcgtatcatacacaattgtggtctcccgtggcgtttaaggttcgaaaagccagagctggttgtggcaccacggtgtttgttggggccaaagacccatggacagcaacttggtctccagcaatgtgcataacaataacgagccatcctgcggctgtgaacaacggcagccaaatttggccctggcagtgaggtgattgcagatctccattggcagcggggtgtaaaaggctctctgactgtctgtattgtcaaacgttgaagacatacggtgtggaaggatcctgctccatgcattaacatgctaaatgttcggtctctcatagttgattagatgaggacgaccgatgagggttttctattttgggctacggatgaggggtttctattgttccaggttcagtggaagctcaggtgaggttgaatgaggactcgtatcttatgtcgttcacttttttgccattccaaaatgacacagctggctgcatgattggacaaacaggattcttgtaccggcttacagttcgatgaggatcggtagtcgctcacatcaatggttttggtcgaatattttttttatcgatgttagtgttgccttttcgtctatgcatcgtttgcatacaacggattcaagggacaaggaacgcatgattaccttcatgctgcaggcgaatccaaagtttgcacaactgtggtacatgtgacaccttgcgcgtgcaaccacagccacattcacggtccccattgcctgcccttgcagcaattcatggttggtagctgctcagaacacttcgtttaagtttggtgtgtattacaaccattttacaagtgtgggggaccagttcgttatgccgccatcggccgatgttgtcctttagtgcgctaaagcaatttgtcatggcagccaacaaaaagaaagttaaatagcccattggtgatgcccccaagtcaaatgcattaagtcgtgcagaacctacccctcagtattcaacagcagcctatgcaataggggcaagggttccttgcgtgctgcccagtcgcccctgttggcatactcttttgggttaggaactccgtttggcgcaagctcgttggaatggctacctgcttgcagtgcacatgcgacagaatggtccatgcacctcgcaatgacagttctgttacggtccaaaaccgcaagctggattatattgcgcattgtagtacttcctagcagcattgcatgtcaaggattcaatacatacatgtagacccgcatatagatgatggccagctcgtgccacaacgaagcattgtctcgccaaaatgaatgaaaccacaccaattatataaaaagtttgcaaatttttttctattattctctcctcctcgcccgcgcaatggggacaaacactcggctgccactctttccaatgcagaaggattcaggcaggtgtgcgacccaacaggttggccatccacaccttctcactgcacctggccaaaacttcggcacatttcagacgcggaagctaccgaggttgcgaccactctcatcacggcggccctgttcggcacaggtgccgctatggccatccccatcaaaaaaataacgcaagtaacaaaacttccgggaaacatcatttacatcacggttgttctcatctcaaggcaaccaacctccttaaaacaactgcttgtcaatggatgagaacaaccgtaccgccttcaccaaagtggtcaagaagcacccgtttcatacttattccccacagcggagagcgacgggggcggacggaggggaagcactcaccaaaaaggatttggtagcgaggaacagaagcgcgtcacggccaccgtggagaccggagggggaggaggggagagccacaggggtcttgtaacataaacagcagacaccacacaaaaacacaaaacaccagcggggatgtagagcagaaatcgttgtgtagaagaaagaaatcgtgatagtcgggcgcggcgaaacaagcaacgccgaactccatcttgagggcatccgcagtcctgaaggcatcttcgaaaaggcaattcgaactaaaatcctgttgtaaaggacagcagccacggaggaagggagtcacccctgatggattgaacgggttttttacaaaatcggccccccccacccctctcataccaaaagcgcttgaaatgcgcatgaaaagagagtgcgagcaaaaattgacgtaagtacgtcggatgtcaggctgaggagagaacaagcagcagatcccgggtacctcagcccggcggcaggcagagtgttatcgatcgcatcatcagcttgaggggtgccgagcatcgccctggctcgatacggtctttgtttcattttgtattacaactgtttcaagatatttgatgttgcaatgcgtcatgtcaatatgctgattgtcaccggcattttataccgtttttggggatgtttcatttctactgtcccgcccgactgtggatatagagggtagcttaaattcaacggttttttttttttacaaagataacacggtatccaaacaatgagacttgaattaactggcaatggggaaaatgaaaagagagttgcgaagaaaaaattgcctgataagtaagtcggtggtaggctgaggaggcaaagcagcagatgccgcggccttgcctcggctttgcctcggcgcatcggtggttacctcagccggcgtggcaggagttcgaagaaagaaaaagaacacatcatcagctctcgatagcatcagcgagcatcatcgctacgagctcagattacacgacggtctttgtggtgtacactcctgtatggattacacaactatttatatctatttttaacgctatctatattaccgcctaataccgtttttggatgtgtcatttacgtccgatgccggaatgtagttctcaaataacgtggtggggacacagccgcataatatccagactgcatatcgttgcttttgggaaactctttgggggttttttggggtgcgaaggtgcagaaggttgagcttgaaagaggttctcgaagattattccgagtagtcctctttggttacaagccaagctccctctctctgcctgatgacgactgccggtgttgatatgttgaaacaaaggtacctccgccatcttttgttagcccccaccagatgcagacggatccgttgaacacacgcaggtgacagcgaatcggaccgtcctcaatcccagagtagtattaaacaagaacaaacaacatcccttcaggtatatccagattctgacgatcgctttcacaaaaatgcattcagtgttgcgagtttcaaagacaggtcatcggttgcaaagatgaacatgcaccgtcgaatttgttttgtaatatccaggacgctttgagagcagacatacgaattggcttgcggagttcaccaggttcactcgcgattctgagccgggatgatcgcggggaaaacgcattttaataggtggggtttgcatatgggagacgcgttttggaatcgttaaattctgatcccaagccaagaaagttaggggaagaaagttaaagaaagtaggggcactaaaaggcgaggtttggtggacttctttccattgcaattgctaagcgcagtatagattagcattcatctagcacgatcaatccccacgtctcgcgacaacatcgcggaccagagctcgtcaaaggaaggtggtgatagtctcgcgggggcggcccacttccgtcgggagagatctctgtctccttagcgggtggcggggttgggcggtctggatgggggtgtgcactcaggttgcggtggtggggacctgcacagcaagcttatagggtgctgcaatttgtggtcttggggtttccatgaatccacgaatatgatcccaatcaatctggtgtcaactcgaaagtcctcattttccgttttccatctcaggagttgccggttgtctgagaggcgcgttggccaggacagagaatcctgattctcaggcatgtcagttatgccagccaaattgtaaccgatgtctaagtcgtcatcgatatagccggctatttgtcccccattccccatgacatgccaaaatgagtcttccacagttcgaatactgaaaatgaaacctgatatcggactacgtcggcgtgtatactgaacgggggtgactgtgtacggttggtgggcatttgtttgtattgggctttatttgtaaataaagaacgcctatacctaaaaaaatggagatgttgatttttgggaaaacttgttgagtggtggttgtgtggtgtaaagtaccccatgtatcgtactcacctccttatattcaagcctggtgtgattttggcccggcatttggtcacgctcactctcagttaatccagcggacagtaaagtaaatatttccgtttgtttcgcaatacgcgtcagcggaacaggttgaaaggaaaaatagagcaaggtaatctaagcgagcctctttttacaggcgtccatgccagttccttctgcctccttcttgcttgagtcgcttttcgtttttcaaggtacaaagcatcatgactctgacccttgacggaccccacaaaacttcatgaatgttctgattattaaaaatttgacagatggaatcattcagcagcactctatgtctattattttatggtccactggtagtcgccggcgtttcctcacgcctcgcccacattccctgcgaagaaagagagtcaaccacacatgaagacgatgtgttgggactcacgatctcgtattgcaggtcgaaaatgcagaacgtctcaaacgcatcaacaccggccaccatgcagtcatgtttctctgaaaaagagcggcgtccagcggaagacagaaagtctgtgttgtataagattaattacgatgttgtgtttgttgaatgaagacgtttagcgacggtcaagacaagatctaacgaccttcattcccatctgtcggcaatcgaaggtaaacaaaggcattggacacgaaggtgaatttctcaaccggtctgtcggcccaaaggccccaaggaattgaatggaatggagccactgccaaggtctgcaggacggggatatgtatggacaaagggaggacgtcgccaattcaaggccgcattcgttcaattacagctcagaaagaagaaacacacgcccgctaaggcccggtcgctcaattacagcagaaaccactcgtaaggcctcgtctcaacaatggcagcagaaagaagaaaaccactcgctacggcgcggttctcacaattacagcataaacatcgatgtgggcctcttggtgtacggcgccaaacctggcttttgctacacttgtaacgatgtgttgtcaacacgtgcatacaaagcgaaaggatgggtctaacaatgagaatgattttgacacagcagtgcaggaaacaaggtataaaaacacttgttgtggggaccagtgtaaatgcaaggggatgaatcgcgaggactatatctatcggaatcttgcatcccaaaaaactctatcgtcttagatgagaggagcctgccttgtacaacataaactgtttcgggagttggtggtactttacagcggcggaacagtaaactgacaaaatcccactaaacggatgttacggtttaaggcccgtccccgacaagacaggaacccagctcagccctaacagagaaggtcccaccctcgccgctccagcaaaggagaagcaaagagaacacctcctttcatgacgcattgccaattcaacaaaatgatcaacgtgttcgtgtgggccacttggttaccgggggagagagtgtcgatcgcttagaagtgcaggtatggtcctttaatggacatctccgaaagtaccgacatcatcggagcaacggtccggcgtctgcaggatggaggctgtgtgactctcaaaaacgaacacgattgcgactcttctcggttaacatctcagacatttgtttgattccaccacctcgatcttggttgtccactccctgtgggttgtaacaaccttaggtttacaccgtagaaggtgatgtgccgtacacgaagcgggtttcattttagtattgtccgttggtgactgtatgctcctccattgtcaagttgtagcatccatagtggaaccgttgcaccaccaaaccatctagcttgctgctgcgctgcaaatcctttagaatttgaatgccgcagtaatcgatgacattatgaccgattattaattttcggattgtaggtgttctcacgcgcgggcgcagccttttcagcattaatggtagttgacatcgttgtatcatgcaacactcatctcaggtgtgaacaatgtgactgacatggcattctctgtccaaaagcggtccgttggtggtttgacaagctttgacgcttgatgactctgtctggcgccatgtactcggaaagccagcacgtggacggctttgcgcttcatttccttagcttctccactggggggaacactcttgctttcgatatgccacccggttgtcttaccccaccccccccccacctcgtcgcttatcttcatcctgcggcctcgcccccacccccccccccggccagcttgctgctcatggatcgcgtgggccggcgcccgctccgcatattggagcattcgaatgcagaaaaattaacaaatgcaacgaggaaagaagtatcggatggggtgacgcgttgacaaaacttcacagcccgtcatcctcacgcaaagcggcccgcggaaccactgtgtcgtccgtaccagcattacttaaaaaagtggcggaagaccccttttaccttccccccagcggatgcacggattcgccccgggggcggctaacggaggggagcccccacaaaggagtgccgcgaagggaaaaagagcgggtatctaatttctcggtgggcgatcggagtgcaacatcaaaccagcacgtgtaaccatcaaccagcagacacaacttacatcgtgaatcttctggctggcgtggcttttcactttagcgcaatctgaacccaccccccaacccgggaaacagtccgatacagccaggtctagtttactcgaaatcctggctggcgtagagatacgtgtttggcagtttttgttttattgtcaattaagagtttttaccaaacattgactttgaagtgtgcttgcgcgggccatagtgtcgatgtgtaaattactacagtcggcgggcacagtactggactgcccaagctatatcagatggaaataaatgtccggacaacatcgccgtgctttagaaatggcctgttatagaaagagttcgcgacagagggtgtgttttaaaccaactttctgtgtgatacgaacaacagtcgccctactctgttggactggatggtggaaaccgctttggtgtaggtggtaaatcgaaaacgacgtgaatttgtaagcaaacgtttttttggcgacgaaacaaaggttggttgataatgttgtcaactcaatgcaccaaccacagaggtgttgttgcatttttccaaaaagtactcacaatttacgatattcaacgaaaacagttgttgattgtcagttatgcgttcataaatgttcattggtttacagagaaaacggagcaaactcgtggacagttttgtaacgggggactgagtccctgtcatggattttgtagtagatacaaggataaaatccaatgtggggaaaattttagtatcgttgtatcagttgacgcatgtgggtttagtggcgtatcaagccacattaggcggtatttcccctgtaggcacaacctttatcttaaaactactgtggtgggtacaccctagtttgttgattggcagtttttttcaggtcagatggtaggaaaggaaggacgtgcgttctgtgaagaaggatctgttgaagaaaagacggacttcgcttgcatttattattgatcatgccagtgtggcaatttattcagtaagtaatcaatggaaaacgctagtatcataaggaactgggtctcagacgaaaaacgcccagttaaatatttgttaacatctcctacacagttctagagtcaatgctattgagccctgttctcgcttaaggtgaagaagggactttcgtcgatgaactaatataccaacgatacacattacaaagacgcacggttgtctgattatgattttccttagccttcagcaacctcactgataaaatcattatgggttgttttgaccacgtatggaacacgtatgtgatgtttgtataaagagttctgtgatgtataaattatgtaagatggcaacgaaacctccgacagtcgcgaaatttgaaggagctactaaaattggccgaagtagcatactcatcaaaggacaagaaggacgatattgtccgtttatgcgaagaccaatggtctcatcgccagaccccctccagagtacaagacggtggaaaagatgtgcgtcgtgaaatgcgccctgaagaaggcaatgagtcttgacgatggaagaattcggtaagttccagggggcatgtggatcagctcgtcaatgtggtgagccgcatgttgcggcgttccagtctggtgctgactttccatgtcacgaggctcatggagggcgacctgccgattcctaatatgtacgatatgaaggatacctactggaaggattggctaaggatcggagttgacggtgtctttccagatgaagagagtagaatatcatacgaatccgtgaaagacgtaatcggaaaggtgcttggtagcgatgaccctgactacatcaactcctaccctatctatttcgaccaggtcttgaactatgccggtcacacattgagcactgtcgtgtcgaacaacgcatgggttcctttggtacctcgtctgacccgcctcactaaggctactttgaatgcactgggagctccgaagaccatccgtgtgtacgacgtgatgagggttatccaacaagaaatacaggagatggaatcttggccagagtctgttcaggagtatgtccgtgaagttcgagtcaggctgaaagttccagatggaagtcgactttatgatgactatggcaaagacatggacttcccgaccatggtccggttcaattattggatgcagacacagttggaggctattggtgcacgtcgtatccggttgatgcccatctttaatgtccaacgggcgcatgtccgccttgacatgaagaccctcgtgaacctattcaggcacgtgttccccaaagacccaaacatcgtcgagctttcaaagtggaaaaatgtaaaggatcccgaccgcttcatgttgcctctgaagcctgcagttaagaagaaaaaatcatgtggtcctggtgaatgggaggcatacaagttggcccaacagaagtacgatgctgacgttaatgatatcaaggatactgacgagtacagacatgcaaagggtaggtatgacacgctcgtgaacgcccgaaaaacagtcgcaggttccttcttcaagaaaccacctgtcaagacggggtgggtgttcgattgtagcatctgtactgacggagtctcattgagcatgcagtacagcaagacagtacaggttcgtgtatccgatctgaagaagacaagtaagaggtcttgtgacgatgaaggtatgagcgtctcagaacagtatgaccataaactcaaaacgacattgcccgatatgggtatcgttgttctgggtgtggatcctggtaggagcaacatcgctacagtcacgtatctggcagacgacaaaagcaagacatggaagcttacacgcggagctttttaccacaagtctggtatcaagaaacagaaaaacagcaagaaaaacgtttctcagacatgattcctagatgggagtctcttcgtgaaaatggagcagcgttgagtacatccaggacggatgatatctcggcttacttgaaaaattacgctacgttttccgacgagtggtggaggatggcactccgtcgcagagaatcccgagacaaatttcagaggtacattggcaagcgcaaggctatggactcattttgggcagggatcaagcgcaacatgaagttggatcatcctgacctgagggttcgcgtagcatatggttctgcaatcacgactctgaaggctaccggaccaggagaggtagctgtgcctacgggatctatgttcgcttcctgcgagcgcctcttcaaagaggaggttcatgtgacagatgagttcaagacgactctcatgtcttgggaaaccggtgccaagaaggaatgtgtttacaaaattccaagtgtccaaataaccacggaagggcagattcgtctaggttacgagttgttgggtcacaccccattgaaggagactccaaaggtctcttatcgcgaccagttggcggtgagggtgtactgcacacgcaaacaaatccaagaaaaacacaggaggggtggcttagccccctctcttgtcgacaacaactcgatcaagcggtaccctgaggtacgaggactgcgattctctccagaaaccagcacttactcggaccgggaccgctcctctgctctcacaatcgcaaggctgcactgcatggaactgttgggtcaagggagaccgcttccattttgcagggatgcgtgttgttgatgggctacaaaaaacatgatgttgttccactgccccgtgggttgctacaccataaggttacaccataaggtgtaccgtacacaatgggcgttcctgcttccgaacggattttttattttactgaaatcttacgataaatattgtaagatcgttttcgcaaattaattggttttgcttttttggtgtattttacgaaaatatcttacaatttattttgtaagatcgttttcgcaaattgattgattttgcttttttggtgtattttacgaaaatatcttacaatttattatgtaagattgttttgttgcattccggagaaagagactattcccttcaatttcaattgtaacattgatttgctcgtttggagagagagaaagttccttcgaagtattccaatacaaaatcaattgtagaggacagtcaagaggaaggtgaaagctgtttacaaagtcttgaacgcattgctcataattatttatctcacaactcacaactcaacagttcgaaagtacaacttagtacttctgacaggctatcacgttgtagaaagagggccaatgctaacttgttgggtaacaacagcgcctgcacaatcgctgcactagaatctcctcctccatgcccccatccccatcttcctcctcctccatctcctcctccttagcaatgtctacattgtctccatccgattgcacagcctctgccttggtgtccttctcaatggattggcagcttgacccctttgcatgactccttgctgtgcattgattgccatgcccagcaccttctgtggcagcttgacccctttgcatgacctggcagcttgacccctttgcatgaccccttgatgtgcattgattgaccccccttgccgggcccccccttgctgcgcatgcatgaaagactgttttgataagtcggtaaggctttgcttcatgccttgcgctttcacctcttttcatgccttgcgctttcacctcctttcatgccttgcgcaaattgcctttcccatcctgcattgctttgctgcgcatccgcattagcaccgggtggccctgcatggtcccgagttgcacctaattctcgccccttttgcgcaattttttttttgggaattcacttcagctctgttctcatgatctgctgctttgcctttcgctttctgcatcgccttgctgcgcatctgcattagcaccgggtggttgtgaataacccccgagttgcttctaattctcgcaccctttgcgcaatgcatttcactgtcactgtcctgcctagcaccttctctggtggatgctgggcagatagccaggagcactggcgctcggagcactggataggtctgcctacctgcatggcggttacccgcctgcacctgccagaccagaccaggacacgcgccgggccagcacctgcgccggagtactggcgaacagctctgcacccgcctgcaccttcctgaggcctgcctacctgcatgatggttacccgcttgcacctgcgtcagagtaatggcggacagtactgcatacccatatggcatgcatccttagctaccgttccaagatttccatagcgtctggtttggttatgaattgcattgtagtggtagactgcaattgtagcccagacttagctgccttgtgcctgtgttgaccaagttactgcttgccaacaggttgccttgtttattggttaatctttgccgggagtgtggttgggtgtttatgttgtgattggtactttacatgacactgacatatggatcatgtacacctgcagttcttctattttactgtgttcttgcccacctcggccacctacctatttactaggtttgttttagtggcccagtactgcaataggtaaagcaaagatgtgtagttgaggcctgcttgacttgcatagcatgactgatgaaatgtcacagcccagaagaatttagcccttttgcctgttccctctaggcattcggtggatcaagttttctttgacaggttttaggattgatttttttatgatcgggaggactgtgtattccgagtttggttttctcaatcattcgcgcgttgggtttgacaatgctcccgattatgatcgggaggactgtgggtattccgagtttggtttttctcaatcattcgctcgttgggtttgacaatgctcccgattatgatcaagaggactgtgggtattctgagtttgatttttgtcaatcattcgttcgttgggtttgacaatgatcccgattatgatagggaggactatgggtatgccgagtacaaaaaaaaaaaaaaaaaaaaattccgagtacatgttttctcaatcattcgctcgttaggtttgtcagtgctcccgattatgatcgggaggactgtgtgtattccgaatttagttttgtcaatcattcgctcgttgggtttgacaatgctcccaattatgatcgggaggactgtgtgtattccgaatttggttttctcaatcattcgctcgttgggtttgtcaatgctcccgattatgatcaggaggactgtgggtattctgagtttggtttttctcaatcattcgctcgttgggtttgacaatgctcccgattacgatagggaagactttgggtatgccgagtcaaaaaaaaaaaaaaaaaatgacgagtacatgttttctgaatcattcgctcgttaggtttgtaagtgctcccgattatgatcgggaggactgtgtgtattccgaatttggttttctcaatcattcgctcgttgggtttgacaattctcccgattatgatcgggaggactctgtgtattccgaatttggttttctcaatcattcgctcgttgggtttgtcaatgctcccaattatgatcgggaggactctgtgtattccgaatttggttttgtcaatcattcgctcgttgggtttgtcaatgctcccgattatgatcgggaggactgtgggtattctgagtttggtttttctcaatcattcgttcgttgggtttgacaatgctcccgattatgatagggaggactatgggtatgccgagtcaaaaaaaaaaaaaaaaaaaaatgccaagtacatgttttatgaatcattcgctcgttaggtttgtaagtgctcccgattatgatcgggaggactgtgtgtattccgaatttggttttctcaatcattcgctcgttgggtttgacaatgctcccgattatgatcgggaggactctgtgtattccgaatttggttttctcaatcattcgctcgttgggtttgtcaatgctcccaattatgatcgggaggactgtggttattctgagtttggtttttctcaatcattcgctcgttaggaatgacaatgctcccgattatgatagggaggactatgggtatgccgagtacaaaaaaaaaaaaaaaaattccgagtacatgttttctcaatcattcgctcgttaggtttgtcagtgctcccgattatgatcgggaggactgtgtgtattccgaatttagttttctcaatcattcgctcgttgggtttgacaatgctcccaattatgatcgggaggactctgtgtattccgaatttggttttctcaatcattcgctcgttgggtttgtcaatgctcccgattatgatcaggaggactgtgggtattctgagtttggttttctcaatcattcgttcgttgggtttgacaatgctcccgattacgattgggaagactttgggtatgccgagtcaaaaaaaaaaaaaaaaaaaatgccaagtacatgttttctgaatcattcgctcgttaggtttgtaagtgctcccgattatgatcgggaggactgtgtgtattccgaatttggttttctcaatcattcgctcgttgggtttgacaatgctcccgattatgatcgggaggactctgtgtattccgaatttggttttctcaatcattcgctcgttgggtttgtcaatgctcccaattatgatcgggaggactctgtgtattccgaatttggttttgtcaatcattcgctcgttgggtttgtcaatgctcccgattatgatcgggaggactgtgggtattctgagtttggtttttctcaatcattcgttcgttgggtttgacaatgctcccgattatgatagggaggactatgggtatgccgagtcaaaaaaaaaaaaaaaaaaaatgccaagtacatgttttctgaatcattcgctcgttaggtttgtaagtgctcccgattatgatcgggaggactgtgggtattccgaatttggttttctcaatcatttgctcgttgggtttgacaatgctcccgattatgttcgggaggaccctgtgtattccgaatttggttttctcaatcattcgctcgttgggtttgacaatgctcccgattatgatcgggaggactgtggttattctgagtttggtttttctcaatcattcgctcgttaggaatgacaatgctcccgattatgatagggaggactatgggtatgccgagtacaaaaaaaaaaaaaaaaatgccgagtacatgttttctgaatcattcgctcgttgggtttgtcagtgctcccgattatgatcgggaggactgtgtatattccgaatttggttttctcaatcatttcctcgttgggtttgataatgctcccgattatgatcgggaggactatgggtatgccgagtacaaaaaaaaaaaaaaaaaaaaaaaatgccgtttatatgttttctgaatcattcactcgttgggtttgacaatgctcccgattatgatcgggaggactgtgggtattctgagtttggttattctcaatcattcgttccgttgggtctgacaatgctcccgattatgatcaggaggactatgggtatgccgagtaaaaaaaaaaaaaaaaaaggccgagtacatgtcttctgaatcattcgcacgttgggtttgtcagtgctcccgattatgatcgggaggactgtgggtattccgaatttggttttctcaatcattcgctcgttgggtttgacaatgctcccgattatgatcgggaggactatgggtatgccgagcacatgttgtctgaatcattcgctcgatgggtttgtcagtgctcccgattatgatcgggaggactgtgtgtattccgagttttgttctctcaatcgttcgctcgttgggtttgtcaatgctcccgattatgatcgggaggactgtgtgtattccgaatttggttttctcaatcatttgctcgttgggtttgacaatgctcccgattatgatcgggaggactatgggtattctgagtttggtttttctctatatctgaatctgattttgaatctgaatctgaatctcaatcatttgctttaccaacctatttgtcttccgcagggtctacaatgacagtacagtggaagttaaactccaatcggacgggaaggatttgggatgcggcgtcatggacgaatggaccaaggagcgccaagtgccaatgaacatcgaagtcgttgttggtggaccagacttctatgttacggctacgcacgctcactggttgaggtttcacggcgaatggagcattctggtcgacactcacccttgcggaagtcaagacagcccagttgcttgaagtcactagcattcggaggcccatgtcaggagctgggctataaggagataccaatttgaatacgatgaccttacaaagttgtcggcgatctgtcctcttcgttgattgtaggaagctgacctcgtcgcgcctttcctgacttcttcgcggaggctgtaggaaatgtaaagagtgcagaagttacgcaatatcctatcgaaattgaaagcggcaagtgcggtcagcacataatggttgtttcgaacggtgtacatcccaccgcgtacgtaacattcgaaatgtacctgtcagatttgaaaatttaacctgagccacggtgcagcagtacagtccgttcgattgctctcttaccggcgtcaggttttttttgtactcggcatacccatagtcctcccgatcataatcgggagcattgtcaaacccaacgaacgaatgattgagaaaaaccaaactcagaatacccacggtcctcccgatcataatcgggagcattgacaaacccaacgagcgaatgattgagaaaaccaaattcggaatacacagagtcctcccgatcataatcgggagcattgtcaacccaacgagcgaatgatgattgagaaaaccaaattcggaatacacacatttcctcccgatcataatcgggaagcagtgacaacccaacgagcgaatgattatcaaaaccaaatttggaatacacagagtcctcccgatcataattgggagcattgtcaaaccaacgagcgaatgattgagaaaaccaaattcggaatacacacagtcctcccgatcataatcgggagcactgacaaacccaacgagcgaatgaatcagaaaacatgtactcggcatttttttttttttttttgtactcggtatacccatagtcctcccgatcataatcgggagcatgtcaaacccaacgaacgaatgattgagaaaaaccaaactcagagagaccgacagtcctactgatcataatcgggagtgagcattgccaaaccccaacgagcgaatgattgagaaaccaaatcggaatacacagagtactctcttggttgttattttttttccgatcataacggagcattgtcaaccccaacgagcgaatgatttgagaaaaaccaacttcggggaaacacacagtccttccgtcataatcgggagcactgacaaaccttaacgagaaatgattcagaaaaacatgtacttagcatttttttttttttgttttgttttgttactcgggcataacccatagtcctccctatcataatcggggcattgtcaaaccaacgaacgcaatgagtgcagaaaaaacctaaactcagaatacactgctcttgatctatcgggagcattgtccaaaccaaaagagcgaaatgattgagaaaccaaactaagaatacccacagtcctccgataataatcgggagcatgttcaaaccaacggatgcgaagattgagaaaccaaactcggaataacaaatttctcccgatcataatcgggagcattgacaaaacccaacgaccctattcgcttgagtccacctaatacactgctagctggaggcagattgcctggcaccagctgctagcgtgggtgtcggaccaaagccccgcaccgtgactgtacagctataggctgtatcataacattccccccaatcccggttctggtaccagaattcctgggattccacaacccaaagtattaaggagtagccagacaaatattcccggtgagagaaaagtagggccgggaccccggaaaggcactcctaaaaccagctcaagggcgtaggtatgacatctgtgaaaaacttgtctgaaacagtacccaccaccccagaagctttcttgcactatcgctgatgcaatggacaacacgaagcctaatcgtcccagctaacgccacccatcaccattaaaagaaggactgcaggaggtgatctctaaaagacacgcatctgtgtgagtaaactaaagcggcacgtaggacatgtcctccagatataatggggagcaacaagtattgaaaacctttgcaatgattacttaacaaaataatgcaatttcgacttcattgtttcctttctaggttaactcaggattattctccccagggaagaggcttaattggttggggctttgcattctactcgcagtccatcaatgactatatcaagcttccaacatttcttcaaacgggtctattgaaaagaggggcagcttgccaccgtattgcttctttggcaatggacaaacgcggcaaaggacaacaagaacgcttccgttcgcatacgtgtacttgctggttgagaggaatggtttgaggaggtgtagtccatttcctccctcccggaccactccacatagcaatcgtgaccaaacgactctgtgatcgtgcaagggttttaaagaacatggagtgacaccggaccatctgatggcattgtttggtcacctttcaagagaatgggcccttaacaaggcaaagacgtcggtgaactctaaggggatttctccgctgtttcatcctagacaagttgtacacagttgttcggacatggcacgatgcaccgtaaaggaggttaatcgccgtgacacgcattcaagataaacgacaggtcccaacgggagagtcggtaagatctgttatatatgatagttacaaaattaaaggataccgtgggttgtgtggatgtaatcggtctgcacaatgccccgattatgctcgggagaatatgggtgtgccatgtctcatgtttactacagtcttaaagaaactaaatgatacaaaggaaaagttgtacctaggaccgagatgtaagggatgctcccgagtatagtcgggagaagaggggtggcctaaatgctcactaatataacaatacttttgcacaccaacattgcagggtcctattacaaggaagtatgacgagtcaggatcttggtgtgtacaagtgggacatgagcgctgaaccgatttacgacgtccttccaaggcttcccactgggggaacaccataacgtattgaaggaagcccccaatatccaagattgacgagctcgagaatatccgagggcaaactgggcgggctgttgaagactattcataacgagaagcccggaggtgacgtcttgcatgccacaagggacgatggtcctgtacaaaccgccggtgacgaccgtgcaggacccgtaactgatgtccccgtgtacgtcacgagcggaggaccttctggttctattcgaaccacagccatgaccagcagccgatggagaacccagccgatggcccatcccatgaccgtccttcaaacatattttgccattgccgagatacttcgtgaaacttgggaagccagcaaacaagtggtggactgattttcttcaagttgagaagagttagtggagcactcaaccagatgatactgttacctgtgaactgggagtacccggaagaccaactttttgtcgacttcccatcgagttgtcagcaaccggtcgtgttctgacacagtctgagaaatcaatggccaaggctatgatagcatcattggatgacttgtccatggaatgtgtcagacctttttaa

SEQ ID NO: 189 - DNA, 22439 bp, unidentified
  source 1..22439: mol_type = other DNA
  misc_feature 1..22439: note = Fanzor polypeptide
atgcacagaattttgtttgagttcgcaactcagcgtcgtgagatcactctcggtcaagcgatactcagacttggcattcgacacaccgatgcgtgcgtcgcgcatagccctcatttcggaacggaatttggcagacaggatgcacgctcgaggggtgcgagcgacaacttccgcctccatcagcctcctccacaatacggatttggaaccgtaaaccatcaggccacgatcgcgacacgccttcttgagaacatccgctttgcttgcctctgaaagaccctcgggaatacgcatcctctcgaactctgcatcgttcacaaggtgtccatcaggctccagcttctcttgcaccgcaagaccaagctcggagaaaaaaacgtttcccaccaacatgaggttcgcggcgtcctctgagacgtcgcataatcgatggtatttatcatcactggttgataaatgaaacgcgatgatgtggagtgggactgcagaaagaagttccatgatttgttacaatatgctacacttaaacattatgctacagtcagagatgtttgagagatgttggtcttacagttgttctcaaataaagtgggacactttataatcatccagactgcagatcgttgcttttgggcaacgttggggggtgcagaaggttgaagaggttctcgaagatattccgagtagcctctttggtaaaccgttcaaccgtctgtgtccccatatcagtatcagggggtgggggtggggttgtcgaggaacttctcggcgcgtctcggcgaaacgcgagaggacgctctctcccaaagacttggtgaagtgtaagcatcaggatgtttctggaagcgttcacatcgcggtcccaagtcttcccgcagtgaagcataccaccgctctgttggcgtggcgctccgctttgactgcttttgcagtggagaatcttatgaatccgcttgcgtccttctgtacattcccaacctgtaccgtcttgcttcttacgatgagtgagtgccaccatgttgcaaaggtggttctcacagcagctgcatcgttgagatgttctgaactcatcgatgtcctccatgatgacgttttctcggctacgaagctcgaaacgaatagcttggagagggccacaagtccgcctagagattggcgtcgcccccagacctttccaatcaccaaacccgacgagtaccttagcgctcttctttctcggagctacgaagtcagcaatctcaacaataagtttctgtttcttgcagtaccttcgaaagcggaggtttcggtaccccctggaagcacgatgggctagaaggattggggcggcacccatgtagaatctggcgtacgcaccaatctgttcagaactcgaagagtctctatccggaatgataccaccgacgatatcagccgtctcgaggttccaaacgtcagtttgacgctgagacttgaagatcagacccttgcgataatatttcgccgagctgtacgatctggtacctccgttgagtcctgttacagtcacgatatcagtaacacccgggtctaccgcagccacgaccacattgtcaaggaaggatacaatgccaccctcgtctgttgtcacgtactcatgcgcccgcgtagagaacgcgtctgcaggcatcgaacatgtcagacacgtaggcttattcatcaagatgctgactgcaaagccgtctgtcacaatgcggtaaccgaacttccgagaaactgtctccactttcttgaggtttgcgaagcgctcccatattccttgatggtttttggaagcaacgtctgccttgcatgaatcaaagtggcactcgttgaccatatagaaaaaggccattttcgaaatcggaatgtgcgacagagtgaatccagatttgtaaggcaacaacgagaatgtgcgatgtttttcgtttttagtttttcgtttttcttcgatggtctccgacaatatcttgtggtacagaggcagggtcatgtgagcccgagacgcaaaagtgtttccggatggtaaaggtagaacccccctgagacagaatgccacttcgcgtgcaaagaagcgtttcgcgttatctgcgtccaccctaaggttcttcgaggagagccaagcttcgctcaacttttcaagcctctcttgaagtttagtcaacctaacacgcaaaggggatccttctggttccttcctaccgaccctcttcttcgcaagagcaattgcactttttgccgatcgaagtctagatgttggaagcttggttggcagctttgttgtatgagggctcatcttgaagatgacgtcgagattctttgtagggcacttgatcaatgcagccacgatgtccgaccgccaggcgctttgcaatctgtgggtacttccacttcaagtaagtcgttatgcgtcgctcaaggttggtccaaagatggttagaggccattgtggccatgagaatagacaggtctgcaatgatctggttcttcacgctcccccgaatgtcaactttggattgccccggctctcttaacaagtcgaacagaagccgactactctcgaagtcttcgccaagagtcgaccccttacatttgttggtactgactgcaataaggcaccggtagaagaagttgcgatttacgggagggacagcgataccattctcaaaaagacgagcaatgtggaaatttgcgaaaatataaccctctccaagcaacttgttcatgtccagtaccagtgtgtctatcttgttacgaagccaatcatggggaataaaggtactcaatttcatcttgaccacacaaatcgctcgcccaggtgcacactccccgtcttcctccccttcataatcgacaagttctgcaacgtcatcatgttggtcagcctcatgtaccaacgatgatgactcgccgatcccattctccatcacaaattgtaccccgaaaacgttttgatgtaatctggatctgcagacaggctctctcgaacattcctaacccaatctctcgtattaatcatatattttgacaagccgaagcacttccttcagcgcgagcaatgtccaaggcaagcatcgtccgcgagtggacccgcacggatggctccaaatgcgtattaattgagcggattattttagagcttcagaacaatggtgccagaatcatgcaaatacgattctcagtacatgaagaagaattatcatattttgcccccgaggtcgtggtcgaaattcttgtttgatggggcagcagcactgtacttggacttggacaagttgtcccagtgtattactgtccaaagagttaatttgatacactcaaatgctgatgcggtgagttcagttgaaagcgttccattgaatgctcacagtgtctgggagttgtttccgcgtatcgcccaagcggctccgtgtaggttgtgggaggcgtgcattcatgatgggcgggagatcttatccgttgcgcagctcgttgaggccaaagaagtactggtggccgatgctttggactacgcgacgaatatgacagagttcaggagggtacaagaggtgttgcatgctgcccggacagaatcaggggcacatgtcagacgacggttccttcccgacttgcttcgcgctcttttcatgaagcatgcccatgtacatggtattcgtctcgccgacgcagtgaaactgtggctgccaaaactgcgtgagttgtacggggaatatgccatcgtgcatgtgcatgagcttttagaagttgcagaatgggagtgggagtgaaatctaagctcttggcgttccgttgaatctacaagctgctaactgacccaggtgggtcggttggttgagcgcccacatttgcctctccggaagctggggggttagggggggggggcgagggaacacagaattcacagttcacatcaagcatcagacacactaatggattgattcattgatcatgcaaacacacgtgaagaagagtgataggcggcgaacgcacacaagagacataataacgcatggcacacgcaaaacggaggagacgcgtccatcatgcatggaagaccaggggataagagtagaatacatggatcatactattaattactattccactgactgtaggctacaacatggatcccaaggtggagcaaatcgaacacccagaccccctcgtcgaattgatcgagtcggttggcccctggctcaaggagacgttcccgtactgggatatgccagacttcactccgaaagtcaacggcgaggccattgcgaatcgtcccacgtgtcctctgcaactggccgaaatggccgaagtcggcgaccacatcgcggtgaaggcaaagtcaggttactggcatcatggtatttttgtcggtcgtgtggaaaaaggcccttacatggtgatcgacgtctacggagatgacaaggcattatcgaccatctgtaatcggacgctgaccgcattcacgaacgggggtaccgactacgcaattataccgtatgacgagaccatctccaaggagcactcagctttgattgcgttgcatctgcagcagaccgcagaaaaacaacgctggcactacaatgccatcagcaacaactgcgagcactttgcgaccctctgccgatgtggcaggtgggtgggtgatttgttcttgaaagtgcagaaagagctggatgcattaccttctcccctgttgcgtccttgcaaatggaaaatttgtttcataatatgacgtccgttttgttctttatcgcaggaaactatcgctgcaagtcatggagctgtacatgtccatcttgaacgcgttggatctatcgaatctatcttcatattgttttgtcttctgtatgtcttctcctcttcttcttttatattattttccatgctaaaaaaaaattgacgcctttttccttcctttgaaacaacaacaataacaacaacaacaacaacaacaataacaacaacaacttgatatcatgtctaccaacaacatgtctaccgatttcacatcattcgtgaatgattccggtatatttacagttgtcctagtgaatgacaaaacgaagatcaacactaaactcagtgtccctcacttgaaggacatgtgcaacaagataatttcatttcccctcgttcctgcgtgcctcgcagaccctgtctgcgcaatgaaaaatgcgtacgctaagttgctcgaagagaaacccaaagcggagaaaaagcctttacaggacatgcttctccctattgccttagctgccaccgctgctaagtctgctgctgctgctcctgctccttccgccttgcttgccctcgccagtgcccttgccctcccagaggacgaatgcatgtcgaagagttccagcagtggcggtaaaaggcgccgcgccaatggttcaccctctgtggctcctactcctgctgctgctgctgctgcttctacttctactgctgctgctcctgctgttgcttttacgtttactgctactgctcctgctgctgctccttctgctgctgctgctcctgctcctgctcctgctcctgctcctgctcctgctcctgctcctgctggctcgtttgcaacgtgctccctgtcctcctcattggcctccggtcgtgttggtcgcgccgttctaaagaacgagcttcctgttggatctaacataggtgcatttaccatcgtggggtattcccccaccctgggctgcactgctgtcaccattaacggcaacccgtgtggtagaaaacagatgctcttaagcaaccccaatggtgggaccttcaccactggcaagtgcgcgcacatagcgtgcatgaaacagactcccgccaagcgtgaggcgtacctcgccaccaagcgagctacgcttgacgagctctcaattgagattagctccctgaccctcagccagctttagtcagtcagtaagttagttatttagttactcagttatttagatactaaaaactcttttttttgatacaattttttagagacgagacgggatagtctgcatcgccagcgtcacgccgactgcgccctgcatggactggcaggcgacaatcaatgtgtagagttccctatacagttgttctcaaataattttgggacactcatcacatcacatcacatggcgaccgacctctcgcattacatgacggcggaacctgtgtcgagtcgaggcaaagataacaaacaacacttggatgagaaccgtctcacattaacatataacaagcggcggagcccctttcacctccccacagcggagcgactgggggcgaccggaggggagcccccacaaagggtccgaggaaccgagcgggtgggcgaccggaggggtgcccacagttcacatcaagcttggaagaagcgagatcgtcagcggtatcggaggacacaagcaaacgtcggaacattgtcgaatgtatcggaggacacaagcaaacggcggaacactgtcgcatccacaccgtcagtccgtccgtccgtccagagctaatgcgattgaacaaatatttggaagcatgaagagagactacagggcatcatgtccattgacgtcaacctgtaatttcgattacttaatgcaaatatgttgtgttctagaaatgtggacaactgtatggtaggatggacaaatgctggcgtgaactccctaaggacatcattttttcccacatcattccaaaatgtgatattgatacgaggctggcatttaaaagccctccttcgaagatgtgctcgcaacgatacaaatcatctgacttcgtagagaccttgcgacacagatatgtgccagaccggatacaacaagttgtgggtgttcagtatgtattgatcccaatgcacacaattgccggttggtatgacaacatcgatgaagaaagcaggcatgcaatggttaatctaggcatctattatgattttgctgggtaccgtcggaacaagatatacaaggattccattcaaatcacggtgatctgtatagattacagagatgccaataaatatcccatatcagatacagttgctcaactatggattaagccccgttgcctctgatgtcgaaacattgtctgtgaaggtgcgcgttcccttgatccattcattcattcattatcgtgcccagggtcggctgagtcagcttcctcgtcggacatctctgcaaccacctccagctgacgcgtcccgtcgcccggcttgcgttcgaagacgtgcagcgtcgtcccgtgatccgtggattcgttctggcaggcacagatcaccgccatgaccgcctggtagtcgacgcagtgggggtcgactcccacgaatgacagggtatccaagccgtcggtgaagatgcggctcgtgttgccgcaggacttgccacaggacttgccacaggacttgccacaggacttgccacaggacttgccggggaacgcgtcgtcgatgccctcgtaccgcatgaccctgtcccagagcagcgggtggtggaggacctcgggcgagaagccggacatcaggttcgggtggatacggatgcggtagcgacggcccgggacgaggaccaccgacgtctccatgagaaaatccgaatatacatactggtacgacagggtctctttacacgaaatgggtagaggacacgaaaagcatggacaattcatttttacatgtaaatgatgcaattcttgcattctgagcatgtgtacatggattctgaaggacagcatttgatcactcttatctttgtaggttcgcattctccacagaatacgcgtaggtcagggtctactatttcgtattcatcgcctcccatgtattgctcgagacgcacacccatggctttcaatgtgtattgaattctgcgggcctttttcagccatttggacattgcagagtgcggatgctttccgttaatccagtatggcatcaagtagtccacgaacaattcttctccccgcttcactttccttgaggtgcataggtatacttcttccgtctcccccttcttcttctgtatgaattcgcagttgtttgagaatcccgtcacttctggatggatggcatcgtttgcgatatgtgccactcccttgctcagatcgaatgggtctggttggagcgtgagaacgtttggggtgcacgcgatctcaaatgcgtacgcatgtacacgtttactttttcgctttcccgatcgtgtacgcgaggacacattcgattcgttgatgacaggtcctgggtactctgtgagtggtgttccagtgggtagcgaacggatagcaaagaggcccctccctgctccgggtattttggatttactgatgcgtatataggatggtatctttcctgtatcgctgaatgctacgcgctcaaatgaaaatgggcgaacgtgttctcgcatgttgttacagttgttctcactgaaagatctattattccatttacaccataaaattgtaatgttgttacagttgttctcaaataaagtgggacacacccactaccgcatcaaggcggcacctgtcgagtcgagtcacagagcgaccgacctctcgcgtttcgccgataagttcatcgaaaaccccaccaccccctgatactgatatgagtgaacacggccgaatagttcgtataagaagatctttcttacaaacaggtatggaggattttaaacggagagtacgtgtgtggcacgaaaacattcggatattcgaggatcatgtccctcctcgtgcttctttgaaagtttcgtacgatccttccttcgagtttgatcgcacgaaatatacgatgcggaccgatatccgtgtcatagacatggacacattagatgcgaccctagaccttatagagcaaggtatgcacccgctcgtcttgaacatggcggacatacataatcctggggggtgcgtgtcttgtggaggtgggatgcaggaagagtcgttgttccggaggacgaactaccatcgtcatctctcgaggtcgttttacccgatcggagaaagggaagccgttgtatcgttcgacgtcgacatcatcagggagtgcgagagagacggattcgagttcctgaagttttctaaatcggcatccttcttggcatgtccgtgcatttccatgccacagctggtggacaacaggttctcagagaaagacagtcaattgtttcgcgaaaaggtgagactcgtattgagtgtagctcacaagtacggacatgacagcatcgtattaggagcttggggatgcggggcgttcgggtgtccacctaaacacgttgccgagataatgtttgccgagatcgaacaggtagaagggtgcttcaagaagatcgttttcgcgattctaggtaaaaatatcgatttctttcatctcgcagaaaatgaaaaaaaaagtaggaaactttcggagggtacatcaccaaagtagcacagatgtcgtgatagcatacacgtcaacagtttatccacatttttcccccatttttgctttatccattcaatgatattaatcttttgctgtttatgctaaggaaatcatatcagacacgtgcgtctttgtttcattcggtatgtagttcaaacgacgaaagtctctcttcaccttagcgaagcatagctcaatagcattgaattctggactgtaaggatgtgtgtaacaaatattgacggggtgactgaggaccaatttcttatggatactggcattgtccattattgctactgaattattgaacaaactcaatgattcaataaatgcaacgaagtccttcttcttcacagatcctttcttcacaacgaattgtacaggagcagctctacagttggcggaacagtaaaatgaaacatatatcagatggaaatgtacgatagaaaattggcgttaagaatggtcgctgacttgtgtgtgttcaaaacttctgtgtttacgaatgaatgaatcgatacaaagacgcacgtgtctgatatgatttccttagcattcagcaacctcactgataaaatcattatgggttgttttgaccacgtatggaacacgtatgtgatgtttgtataaagagttctgtgatgtataaattatgtaagatggcaacgaaacctccgacagtcgctaaattgaaggagctactaaaattggccgaagtagcatactcatcaaaggacaagaaggacgatattgtccgtttatgcgaagacaatggtctcatcgccagaccccctccagaatacaagacggtggaaaagatgtgtgtcgtgaaatgcgccctgaagaaggcaatgagtcttgacgatgaagaattcggtaagtttagggagcatgtggaccagctcgtcaatgtggtgagccgcatgttacggcggtccagtcttgtgctgactttccacatcacgagtctattagagaaaggtctggatattccagacctgtacaacatgaaagatacctactggaaggattggctccgtatcggggtagacggaatcttccctgatgaggaaagcaagatatcgtacgaagctgtgaaggactccatcggcgatgtaattggtaatgacgacgctgactacatcaagtcttatccgatctatttcgatcaggtattgaactatgcaggtcacacattgagcactgtcgtgtcaaacaacgcatgggttcctttgataccacgtctggccagactcacttccaccactttaaataaattaaatgccccgaagacgctggacacatcgaagatcattcggggatacgacgtgatgcaggctattcagcaagaagtccaaaacatggagggatggccagagtctgttcaagagtacgtcaatgaagttagggagatgctgagtgttccagatggaagtcgagtttatgataactatggcaaagacatggactttccgaccatggtccggtttaattattggatacagacacggttggaggatatggatgcacgtcgtatccgattgatgcccatcttcaatgtccaacgggtgcatgttcgccttgacctgaagaccctcgtgaacctgttcaggcacatgttccccaatgaccagaacatcgttgagctttccaagtgggaacatgtaaagaatcccgaaagcttcatgttgccccagaggcctgcacagaagaagaaaaaatcatgtggtcctggtgaatgggatgcatacaagtcggtcctgaagcagtacgatgatgatgttaaggatatcaaggctactgacgagtacagacatgcaaagggtttgtatgacacgcttgtgaacgcccgaaaaacagtcgcaggttccttcttcagaaaaccacctgtcaagaatgggtgggttttcgactgcagcatctgtactgacggagtctctttgagcatgcagtacagcaagacagtacaggtccttgtctcagatttgaagaagacctgtaagaagcctcgtaaagaagaaggtatcaagatcgcagaaaaatacgacggctcacttaaaacgatattgcccgatatgggtattgtcgtcctgggtgtggacccaggacggagcaacatcgctacggtaacgtatttggcagacgataaaaataagacatggaagctgacacgtggtgcattttaccacaagtcgggtatcaagaagcagacaaggcagaaggaactgcgttttgctgacatgattcctatgtgggagtctctgcgtgaaaatggagcagctttgagtacatcgaggacggataagatctccgcgtacttgtcaaattacgctaagttttctgacgagtggtggagattggctttgcgacgccgagaatcccgtgacaacttgcagcgttacatcggaaaacgaaaggtcaaagactctttctgggcgggtatcaagcggtgcatgatgaaagaacttcctggtatgaaggtttgcgtggcctacggatctgccatcacgaaactgaagcctactggacctggagaagttgcagttcccactggggccatgttcgcatcgtgtaaaagaattttcaaagaggacgtttctgtgacagatgagttcaaaacgactcttatgtcgtgggagacgggtaaagaaaaagaacgtgtttacaagatcccaagtgtttgttcagcagacgtgaatcttaggttgggtggtgaacgttttggtcacactaaatcgaaaacgatgccaaaggtcgctgattgcgaccacttaggggtaaggttgtacaataaacgtaaaggcgcacaagagaagcacaggaggggtggcttcgccacttcccttgtcgattctcaaaaatcgatcgagcggtacccagaggtacgaggactgcgattctctccagaaacatgcatttactcggaccgggatcgctcttctgctctcacaatcgcaaggctgcactgcatggaattgatgggtctaggacgacctcttccatttgcccacagcagctctgttgttgttgatgaataaaaactcgtattgttgtagacaccactcggtccccctccggtggtcgcgacaacattaggttacaccgcaaggtgtaccgtacactccggtttcattttagtattccgtcgagtgtacagagatcatggtgcacaagttggtcgtgtacgcgttggttgagaacaagttcattcagaaaaatgagatcgtcgtcaaggttggctggacgtcgaagccctttggtaagcgactttctcagtacccgaagaactcaaagatgatcttcgaaatccacgtacttaatccgcttgcttgtgtggagtctgagactgtcctgatccggtaccttcgaggagaccctagagtcaagccccgtcgcgacgttgggtacgagtactaccaacttgacgcaggtgattcaggtgccgtctttcaggagatggccgatgtcgtattacagtacgtggggacaggtggcgtcgacatgtctatcaagtctgtctcagaatacgacagccttgattgcggcaccgaggacgtgcctccagacccccccagctttgccgttgttgagcgagagaaggaacgcgagaatgagcgagagaaggaatatctattatgtgccctgagctgcttcttccccattcgacactacgaccatcatcccaaatctgatgacggtgttcgacgaaaagctcaagggaacacagatgttctgcggctacaacatgatgtgaacaacaccgctaggctgttcagccatgcatcgtgcggcgttcgcgacgggtgggacctgcgaaaggtgtccaaggctgtgaagatgatcctgaacgccgtgggtctggatatggtgagcgtgaacaagcgggtgcaggtcaagggaaagagaacttaggaggagaggaactacctcctgtgccctgagagtgtctgccgtatgctcgagctcgtgaaacttcgtcttctgagcactgacctcacgccgcagctgccctttcgtgacaagagatgtccatgtacagtctcccggccgatttttttaaatttctaatcaggatttagagcctccggaaagactagctagcttgagacataagcaccatggaatcacaattccgctcccaagtcagcgaccattcttaacgccaattttataaaggcgatgtcgtacatttatttccatctgatatatgtttcattttactgttccgccgactgtagaagagaactgttggaactgagtttattataacttttccaatttcttagctttattaaaagtcatggtcatacaaatgatcctcgcgtgcaacgggagtcataacgagatcgcgcgcatcgcgaaaaaaataattggaaaccgcatcgctgccgccaagagcacgaacggaaagctattatggtacgtattcgacgggcgatggaagacggacgtcgacgcgatccacgtcaagcacgagctgtccaccgttgttctagagcacttcattatcgctatgaacagggagagagcgtcccaaagcgattacgacatgcagagaaacgatgagagcacaaaggacgactccgccgacctagcgcacatcaccacgcgcctccaggacgcgaccttcaagaataacgtactgcaagagatgctcgagtgcttttacgaaccggaatttattaagaaactcgacgccgaccggctagcgcacataaccgcgcgactccaggacgcgaccttcaagaataacgtactgcaagagatgctcgagtacttttacgacccggacttcatgaagaaactcgacgccgacccaaacctcttagggttcaacaacggcgtgtgggacctcaaaaacggcgtcttccgtcaagggcatccggaggacatggtctccatgtccgtgggattcgattacaatggcgcagtgtgcgcggaatcagcagaccgcgtgaggaaatactgggacacgatgcacccagatatataccaacgagaatacctcatccacacatttgctagacagctgtacggagacagcggacaagagctctttcacatacacgccggcgccaacgcgtccgcctctaacgggaagaccaagttcttcgaagtcatggagatcgcattgggcgactacatccgaaaattcggcgtggaaatgctgacaagcaagcaacgcaacgatccaggtcgcccgatgccagagtttgcgacgtggaagggggtccgcattatgtattgcacagagccaaaccacgacgaagtcttaaattccggagtcctcaaggatatgacgaccggtggggaagccatcaccaccggtgcatttcactccagcgacatcgtaagcttcatccgctcgcaacacaagaccggtggggaaggcatcacccaccgcctcttgcactccaccgacatcgtacacttccgcccgcaacacaatatacacatcatgtgcaacgccccgccgatggtcgacggttctgacaagggagtccaacgacggatacgaaaactcgactacatcagtaggtttgtggacgcggatgaggcggacgccgcaaaattcctcttcccacgagacgcagggcttgtagaggcattcaaggcagacgacggagcgatgcgcatggagttcctacgcacccttctacacgcgtttgtatacgagtacaagttcgatatgcccgattcgttaaagaagaccagtgcgatgtacttgaacgcgaacgacgacgccttggctatgttcgtcgaagagcacgtctctgcggccatcccggccacgggaatggacctggaacgtcacctaagagaagagacggacacggacctggtccttctcctacagcaagagacggacctggaacgtcacctgattaaacgaaaaactttgagagggatggtgtaatcgataggggggatctctgccctcgcggagtgggtcaggagaatttagttgcagaaacctgtcaagtcatcatacagctagggacatttgattgtgggacaccttttattttgaaaagttgattatgggtataaggaaatgtgagtgcaataaaaaacccacctggtcagttagcagcttacaattgttattctctgggccagcttaaatgctgaaatacgggatgaaggacacgaaggattgggaccttgatacaaaacctttagctgacctacccaatcaattaggttcaagggtcaccgttaagggtgtcccacaaattctgtctctgactgtacacgtacaaactgtcgcatccacaccgtccgtccattaatgacacacggatgcggtggcggattatcgtcctcgaatgaagtgtaaacaaccattcttcagtataaacaaccatcagcacagcacacttcacaaacaaatgagttcctttgacgaaatcaatgaagatgtattggagatcattatagccaatgcgatttcgaacgaatcccacctcaaacaagtgcctctcgtttgcaaacagtggagatgcgccgcaccccggtgtgtcacaaggatccacttaagacattataacagtttggaatacgcattatcacgcatttgcaggctcaaagagttgaaaatcggtatcaatcgggggaaagacgtaccctaccaatcaatgtcggctatcgaagacaagatccaagacatatcgccgctgtccggcctcacttcgttggttcacctggacatatcgaacacctacgtgaccgacatatcgccactgtacggactcacttcgttgacgcacctgaacatggcgcacacctacgtggacgaagacctattatcaccgctttccggactcacttcgttgacgcacctagacatttcgcacacacttgtgaccgacatatcatcgctgtccggtctcacttcgttgattcacctagatatttcgcacctcacgtacgtggacgaacacccattatcatcgatttcaggactcaatgcgttggttcacctcaacatttcgcatatcggaaacagactagaagacatatcaacgctttccggactcaccgagttggttcatctgaacatggcgtacacacgggtgggcgaacaggacctatcaccgctggcaggactcacttcgttgattcacctcaacatggagggcaccgaagtggaatacctatcatctctgtccgccctcaattcgttgattcacctcgacatttcgcatctcaaatacaagctcgaagacatctcaccggtgtccggtatcactgcgttgcttcacctgaacatggagggcacacgtgtaccctctatatcagtactgtccggcctcacttcgttggttcatctgaacatggcgtacacatgtgtggtcgaagaccgagtaccgatgtccggctccatttcgtcttgtcgccggagcaaggtgctcgacatatcgccgctggcaggactcgcttcgttgattcacctgaacatgaagggcacacgtgtgaaagacatatcaaccactggcaggactcgctttgttgattcacctggacatgaagggcaccgacgtggaagacatatcaccactggcaggactcgcttcgttgattcacctgaactgaagggcaccgacgtggaagacatatcaccactggcaggactcaattcattggtgcacctggacatttcgaaaaccgacgtggacgacatatcaccgctggcaggactcacttcgttggttcatctgaacatggagggaaccgacgtggacgacatatcacctctggaaggactcacttcgttgacgtacaatggatggaatgatgtgtaaaattgtttcaacggggggtgtcatgatacagtccagccaaagcaggaccaaatgcaatgggatgattctccccacaccctatcagcatcccttttggtctggttgatattgcccagctgctaacagaaacctcggcagggagtcgaacattacataatatcgatcccaaaaatttccctcttgtatgtgttgtcttctgctacaggcattcgctcgacacgtactgctagcaggcgggcgaagcgggtacgcttgagggggagtgcgcgtgcggtgattgaagtcaactatcgagcttggaaccatttgcgtcctaggccacaacctggaatccagttttgtcaatatgctttggccgacttgaagcgcaagaattcggggagtggcgggttggggacatgtaaacaatgtggattttgatagtagctgcatttaggtcacggtttacaaacagacttgcggcgtgttgctgcctggtggaatgcaccatatcaatcgcgaagccgtgcgcccttagttttcgggttgatgcacctctggagacggttctgtccgtgtggccagatctttgtacggaattcgtcaatgacggcacactcgccccttgaggcgaacgggtctctaacgctttgaaccgcttcgttgtaggggacagaaatcagatatatagtttcacagacaggcccgctgggaggactgacgtgctttattttctgggttgctggcccaagcctgttctatgctacacgcaacgtgaatcattctttgatacctcaaatccgaagcagctttaccttatgacgaagaacagcaaggctgcatggagtggggacgtctatttttaatagtcggagggagcggcggcgtaagaaactcttgaaccctacatccgatgtggtaggtttatgccgttgtccaacttgtttttagtggtgtttatgagacaacagggcgtcgagagcgttgtcattggcttactgaccggcagtagtccacgtctacgctgcgagcggggcttgtggggccaagtgttagcatgtgctactccccggcacgacaatcgaccgtcggtgtccaagttgtacatagagattgtattgtgattcttatactgtacagattgactggcgcggggggtctttgtgtacgggctgctggtgctcgtgcgtctgatgccacaactgccagtgtcgatgagctgggatatctcttcgttggtggcgcgttgtcggcagggggtcgggtggcggtgggacaggcttcaacgtgggcaggtgccacgctaacctacggttcactccttcaggtggaaaatagtatatggtgagggaaaatggctttattacagctaagcgaaatcaagaactatttgaagaacatagaaagtggcgacgcatcacaagagcacacgcttgatggacttatctcacagcaacatgggtattggaatcaggtgcgtggaagatgcactggtgagggcaatacaaagagtcggaacaaaaggggatcctggttcaacattcagatgcatggtgggggactgaccgattccatgaaagctctcgaaaacttgctagaccgaactgatgcaaaggagctgaatacaccctgtcacaaatgtggacgatagtttacatccgtactacacaccatggcgtacatgtgtgttttgaaaaagacgttccgctcgggaagtggtcttcaagttttgccattaaactggcggagtgtggggcagtgacagatatccctaattggtggagtactgacatgaaaagagttgcgcatacctgtcaggaaccaggtacacaatagatgcggtggtcctgtcaaataattgagtgcgagtcacatggcgaccgacctctcgcatcacggcggaacatgtcggagtcgactcacagagagagaccattacagtcggcggaacgatgtcgacttacgggggacgatcgctcgctcgcatcgcaaagaagtcgatactctatccgattttataaaatttctaatcaggatttagagtctcctgaaagactcgctagctcggagacatcagcacatgaagttcatttgtagttcagagaactcgcggacgaggcgccttcggcacaacacatacgtgggatcgtagatgcttttttccgaaattgggttggatgagttggatagcgtttttacgcctaatatggtgggcacgccacgcttgtttggatctttttagcatatttcgtaagtgtgacattctcaacgatataatttatttgtaattgttggtggtatgtctcgcttgtgcgtatacacttctacaccggtcagatagccttgctggcacaatccagaagctccacatgtaatcatggcttccttcatattgctgaagatgacgatgaggttggatctcatatgtgtcgcatatgaatccgtccagtatcattaaacacggttttgtggatatccaactggggtcgattgtggactgttctcaaaatatttgtgtttactccagaacttcacgcaggtgtcgtctaggtctgaaaagacaaaattctcccagccatgcatttatgaaacatttgtttcatggtcgagttgttttcttatacagtcgagctccatctacagttgttctcaaataaagtgggacaccttataatccagactgcagatcgttgcttttgggtaacgttggggggtgcagcaggttgagaggttctcgaagatattccgagtagcctctttggtaaaccgttcaaccgtcgaatgtcgacaatggatccactttcatcgaagactcgttcaaatacagtcgacggaatgtacatgtgactgtcatgtattcaaagcggtatttttaatgataactgactcctgcctgcaacacgtcatgcctcaaagttggcagcggacgacccgcatcctcacacacgcacggcggcgggtcttacgcaaccgcatgtactcaaacgaaagccgtgtgtataagcaggcttggaaatggaaaaacgttgggtgcatgagctcacctacgtgcgatgagatttagcttcgtaactagcatggatcgatacagaatactatacaactgcacgaaaaacataacagcaagcagctccagaatgcccttttcctgagcggaagatacccgaatacccttacgtaatcgtccataatcaatattggatccatgtattcccacgcgtttgccgtgtacgtcttttctatctctacaatcttcttcaatcgagcagcattctggtcgtactcaattttggcaccagataataggtggattgtcgtgccgtcaaacgtgaacatagtcttattcatcacgttcgatgtacgcctgaagtagaatgtctctttgtacaggtcgagtatttctaaacatttattggcgtcgtcctcattatcgaataccaccgttccatgtaaaatattttttttgccattccacgtactgcctgaaactgtgaaacacgcatacatgcttgtatccaacttcttgaagttatccattgaagtttagggtttaggatcaaacaagaatgaaagacaagccatttgcccaccgtgcagctgcatgaagggcgacacactcacacacgcgtcgcggcggctgctgtcgagatgatgttgttgcccaccaaccactcactcactcactctcactcattacactcgacggaatactaaaatgaaaccgtttctggagtgtacggcacaccttacggtgtaccaaatggtgtagcaacccacggggcagtggaacaccaatacgattttgaatcaacaaattgcaggatgttaacgagaatatcgtggttctttttagatcacggctctccatcctgcagactccgtatcgttcttattgtcggtactttcgagagtgtccattgaaggaccagccgcacttaagcgatcgactcttccccggtaccgtggcccaaaagaacacggggtcttttgttgatgtgcaattgcgtcatgaaaggagggtttctttgctggacgggccattttgtaggaccatccactcgtacactataatgtctgtcgacgcattataccgtttattgggatgtttcattttactgttccgccgactgtaggttacaccgcaaggtgtgccgtacacgaagactgtatgttgattagcttgtgcagtacacgaagactgtatgtttattatcttgtgccgtacacgaagactgtatgttgattatctttgcttgctggctttcgtagtaggacattggttgctgccacgaaaccggtgcgcaacaataagctaaagccaaagacacaacaacaatggacagcgctgtacacaccaatgctctggaatacctcagcgaggtcatcttgtttatacattatcagctattaagcacttctaagaggtggacaggagatgtatgcagcggagacagacgcgccaatctatacaattgttctcaaataattttgggacactcagtataatttgaatgatatcccctgaaaccaggtacaggtccgtggttcactacaaatattttttgaggagtctcaggaaggtttgtaatatataatgggcgttcctgcctcccggccgatttttttaaatttctaatcaggatttagagcctcctgaacgactcgttagcttgagacatcagcacaaaggaatcacaaatccgctccatacaatgtttcgcaaccagtcaaaatcggccgggaggcaggaacgcccattatatacaacgtgtccaagagctcactacatagatgggtcaatgctgatcaggtgggtaaaagtaagcgtttaaaacgaaaaaggaaagaattgtccatgcttttacgttccacgatatccaataatattgcagagaaccccttcataacatgcaaggatttggtcggtataatttgcaagagttgtaatgtgagattatcgatcagtactgcatcgagacacataaaaaaatgtggattttctaggaagaaggcgtttccacagttctctacggacattcaaaagaaaatgtagaaatgttttgtgacaagtacagagaaagctctaacgttgtttgtatcgacgaagcaggattttacgctggagaacacatgctgtcaccagattttcgattatatgccctggttgctgtatcatatgccctggttgcacgaaactatagctatatcggatacagataagggtgttggatttgtccttgttaatctctttg

SEQ ID NO: 190 - DNA, 22439 bp, unidentified
  misc_feature 1..22439: note = Fanzor polypeptide
  source 1..22439: mol_type = other DNA
tttaaagattctcagaccacgcgatcgaggactcggggatgataccggcactcacctgccatagctggtacttagccaactgcttcaccaacttaattccgttcttgcgggtctcatatgaagtctcaatcgtgtctacgaaacggtcaacaagaacgtcacttgtaaaagcacactgacgcaggcaactgaacttttcgaaagaaagaatatcctcgatgttcttgctactacacaactgagctagggcaatggacaaattacccttcgtagtgctcataaccacttgaaacccctcgcgactgatgttcatatgcaaaagggggatgatacccttcacataatcactcgagtgaaagaagccctccttctcggaaaaatgaatgtcgtgtgattgagcattcaacatgaacacagccagcttagctgcaaaagtcgcatctccagaattcttcttacgttttgaagtagaagaggaattgcggggtgttgaagacattttacatacacatgtatacatgtataaaaaaataggaacgactcgctacagtcggcggaacagtaaagttgtatacaggatggacacaaagaccgtatcgtagtacgcgccttttcatgcgctccggcgtgatccagagtttgtgatcaactcgttcactaccgccgtgatgcattcgcattcgaacaccaagctgtgatatgaatcgtcagcatggcaaaccgtatgtttgccgaaactacgcagtgtggcatacaatccgatgcggtctccgacatgcaacggcgtgtccccagtggtgcatgacaggctgcatgtgccctcgccagcatcactcgtgtcatagatggtggtgtaacgaggcacggacactgtgatggtccgtggtggcaggaacaccgcctcgtccacatcaaaccatttcttgatcatgtcccttcgtagggcgtctaccgcatgccatgtgtgttcgtcacctattttgagttgcagggtggcaccggtcttgaatgtgccgttgcctgacggactgaatatctcaacgatttctcccataggaatggtgacaaaggcgcacgggacatgactggggaacttctcacaggcaccggtggcatctgccccgatcacgatcatattggtaaacccttacagttgttctcaaataaagtgggacacaccttatactcatccagactgcagatcgttgcttttgggcaacgttggggggtgcagcaggttgaagaggttctcgaagatgatattccgtgtagactctttggtaaaaaccgttcaaacgtctgtgtccccatatcagtatcagggggcgggggtgggggtggggttgtcgaggaacttctcggcgcgtctcggagaaacgcgagaggacgctctctctcaaagacttggtgaagtgtaagcatcaggatgttcctggaagcgttcacatcgcggtcccaagtcttccagcagtgaagcataccaccgctctgttggcgtggcgctccgctttgactgcttttgcagtggagaatcttatgaatccgcttgcgtcattctgtacattcccaacctgtaccgtcttgtttcttacgatgagtgagtgccaccgtgttgcaaaggtggtccactcatcgtaagaaacagaatcgagcctcgagtgcaatttgtggctcacgcccgactgcaggtcaagctgttgcagctgtcgcgcacacgcagtataccagcagacgtatgtgtacgaacgcgggtgtcagtgccatctcttggagcatcacgacatcatcgcatgcacagctcagagaaattccatgcagcaagaaagccgccgtgtcgtgggtgagaatgaatggacggatggggggcatgcgaaagccgcatgtgacaaaaaaattgactgaattgtcataaaagaaaccgataaccaccacaaacacccacaaacacaatggcaaactttactgaattatacaacgatgttgccaatgacacttcgggcgttccgtcggatccattttgcgatcgcgcaagagaactcattccgcccatggcgcgcgtttgggaggtacttgcaaagctcgccgttcaatcgtgggacaacgaaatacaaaaggtctgctacggagaatttttgactgccaacgactacacaaacggaaaccacgccaagctgtttatcctcaatctgatgacagtctcgccggataatatcatatgcgatccccgcttccaaggcatgcttcttggtttggaagccgtcttccagtacaatcctttttgttccgatcaccctcacatcacacgcaagattgtaagcagtctgttcattgagatggatgacgagatgatcgattgggtgtcatctgatggattcgtcaatatggattgggactttgtacagaacatagcgtcccagtggttgcgagcgtggtgctcggcgcgcaagatccagcgcatgtaccgcaagtacatcgagcacaaaaagatccagcgccaaaagcgcctcctcatcacaatccccaggatcgtgacattgctcaaggattgcaagggtcgcgaataagtaattattcgagaacaactttttttttacctttttcctcaaagtccagacactgcatcacccggctcggatgccaggtccgccgaatgagctcctccctgatgacgtccagtgacgctttcttcatccggaccatgacgcgccagtctgtattccgatgagcaaactccagtgttgccaagttgctgcagctctgcaattgtcaggttgcatttcatgcatcggtatggttgtaattctgccatttctagcagaccacatttccaaatgtgtttgcccctattgcggtttagaaggtcttcgctgagtttgaactcgggatgttgcattcttgtcctcccacgcgggtgttgcattctggggatgatatccatttagttgtagagattcttatattatttatcaattctgagatgattcgcattcggaagagaattttttacctcaagaaagagtttagggaccagacaacaaatttcttggccgcttgctacgatgtgttgttggtaactcaattggagacggcaaagatgacaatcagtgctgaacgggagctgacaaccaaggttgcccgtcagatgctgactttgagccactctgtgctgttcaatcggctgaaggagaagtaatgggcgttcctgcctcccggccgattttgactggttgcgaaacatggtatggagcggaattgtgattccttgcttatgtctcaagctagcgagtcgttcaagaggctctaaatcctgattataaatttaaaaaaatcggccgggaggcaggaacgcccattacatgcaagaacactgtcccgtactcttcacacttaatgggcgttcctgcctcccggccgatttttttaaatttataatcaggatttagagcctcctgaacgactcgctagcttgagacatcagcacaaaggaatcacaaatccgctccataccatgtttcgcaaccagtcagaatcggccgggaggcaggaacgcccattatgtgcttgagcattacctatgtgcggtttcttaaacaagtggagagacatacacctgtcaattcacctgcgacagagacattttggggggagctggcatcttcctgaagtcagttcgaacagaaaatccctgttcgtaaaggacagcatcccagggggagttgacccctatgatacccctatggagaattcattgtctttcttaccctggacccccggatgggtaataagaaattcataggttagaggatatacgggtagattaaattcaacggaacagaaacaatgcactcgatcaatgcgtgtgtccatcgagagagtgtatgttgacctcagcatcatgcagttcgccgtcccaacaggagcagttctgcgcttgtatctgttatgatggccttggccagctcccaccagggactctggtagcaccacagcccggtgcccagatgcaccgaccggcccggaaccctccagtggttggcgtcccccatgaaattcatgtactgctggtgcatagcgccacctgccgcccattccgcgcactggcacaggaaccggtgacattcgtacagctcctccgagctgttcatggtcatccccgcgttgatgccgagcactatgaactgctccgcaggccgcagcgcatgctgtcgctgcaagaatgttgtcaggtccttgaatgaaaacaacaacgctggtcggggctgctgatcactcagcccgtccgcatagcacttcacattctgtaacgaccgcgtggtaaagcatgtgtccagaaaagctacctgttgcttccgcaccccgtcagtgcataaacacccgcccacattccccatagcgtgcagcagcgccacctcgttctctgcgctcccagcccctatgaacgctatacatgacaccgccttgccgggcactagagcacccctaacctctctcgccaccgcatcccagtctagtgcaggacagatcacctcgcgctgaccctccgacagcactagcactttgttctcccactgcattcttccgatccattatctcattcagctcccccttaacctcgtttgacctgaatcttgaattggtcaactatggaagcttcgagagcagaccaactacgacttggcttgtgagtttcgcacagttcactcgcgattctgagaccggagatcgcggaaacacattcaataggtgagtttgcatcggggatctcaaagtttgtttggtgtgactttctttccatttgatgcgcagacattctcattcattcgcacgcatccccccctcgcaactaaatcgaggacaactaaacagcaatctggtccagaacgacgaacatcttcctaatcttcgtcggcacatactgagcgtcgattgtaggagatgctgcgcgtagcgcattcgcgtctggctcccctaccatacttattatgttctctatcacgtcaggtggaattgatgacaatagggttgggtccaactgtctggcaagacaagtggtttcgtttgggcagaagcggattacggaatcgcccacaacagcgtcggatgcaatgatgcgggttagtctcctttctaatacattccactccacataaatctcaacaatgcatgccctccgtctaggtccatccttattgttctcccatgctcgcatgtgctccaacggtgtcagtctcctcataagcgcacagacgagtccgttgagattgcatttgcggatatgaatattctcatgccacattttttgagggtctaagggtatgctatcgtccttgacgtacgcctcgaacgcattgcgttgtagaaacaaaacctgcaaacggtcaggaaatccaaacaattgacgcacatcggcataccttgcacattgcactccaatgttcaacgatttaaaacccaccttgaaaggcatacttgattatacatgcacagctttttactccttatgttgagcagtcgtcagtaccaacatccaggagtcattcctcgaatccgcgattcacctttcattaaataccgtctcaagcaggcgtctgcttaacaaactattccggtatcatgaaagggaatcgcgggacccacggagtggggcaggggaattcagctgcggactcgcggaaacacgtgtcctaggatctgacttgtccatcggaggaggacacatgcaaacggcggaacactgccgaatgtatcggaggacgcacgcaaacggcagatggacaatatactgtaacattattcaccggtctgagtgtaacagtgtcaaaaagtgcccggttaaaatctcgaatttagcgcaaccgccgcacaggtcaatgtcctaacaccgcacctgtgctccagcgcccgcactgcgtcgcgcacgtcgttgatctgttgttgcatgtgcatgttggctgcgatgagctcagcgcgcatatcattaatgtcgttcaaatgttgctgcatgcgttgcatgatgcggagctcgcatgcaacgaactgctcttgggtgacgtagaagggtagttggttttgcagggggggcggctccatgttcatgtccctaaaggcgcagcagacaagaaaacgctatatataaacgtacagagacaaagtgctgacgattgaatgcaatctcatgcatctcacctcaatgcatatcatctcaatgtcaaagcaatccaaagaatccatgcacgccggcggatcctcgtccagactcatcacgcacacgcacggaactgatgcggcggcggcggcttatcgcccagccccatcatgcacggcagagtcagcgtctcgtccatccttatcacacatcatgccacgcggcggcttgagaaggacacactggaaatcgatcgtcattgattgcagcataacaacaacacggcgttaaaaaggaaattacagcgtgtcccactttatttgagagtaggagcacatgatggcgtccgtgaagactcgtcgcgccttgttcatttttccaagttactagacggtttgggacccgtgcttatgcacacattgcaagagtgtggtacgctgccaagggacttgaaggggtacagatgtggcggagccatgaaggaccatgatgtttttgtcaacaaggttttgggttctggtatggagatcaatgttctcgaaggcaccgtgtgccggaggaccgtcatggaccaattggcttggttgttggagccctcagtggacgttgctcttttgttattctgtgggcatggcatgaatgaggggtcgccacgtcacggtacattggtatgttcttacaaacagctggtgtcagctgaggccatcgatgcggtggtggcagctcaacgtttttgcggcacactcatccgcgtgctcaacatgtgcgaagaaaatgccattgcccccggccctggtctgccgttccagcacggaagatctctgcttgacgcatcaagagcagatcatgatgcacagttccatctcgttgcacacaaggacgtgatgttgttggcaactgggacttttgaagaaacggcaggtggcaaggcaggcacacccttcatcgctgccctgggcagaatgtttgacgcagagtcgatcttaacctacgagcgccttgatgagctcttgcagaggcactggcctggtggcagtgggagggcactgctgtatcctgcaaggttgaaagggatcttcggatggccggctaatggttcacaggtgagtggcgattctgcttgacaatatgtgggtatttacatggaatcgttttcaccccataatatagggaccctatcccagacaaggccctttgttaaaggggaactaaaaaaggtttagtagatttgtgtgtttttgtgtttccgtgttttgaatgagccaccgcatcttacgcaatcgcatttacggtaggtccgtaggactgtcatccaaagaaaaccgaatggtcccaagcaggcttctgcttgacaataagtgtatttacatggaatcgttttcaccccataacacatatacactaatacacaatttttaaggatattagaatagtaatatagggacccagtcctagacaaggccctttgttaacggggaactaaaaaaggtttagtagatttgtgtgtttttgtgtttccgtgttttgaatgagccaccgcatcttacgcaatcgcatttacggtaggtccgtaggactgtcacccaaagaaaaccgaatggtcccaagcaggcttctgcttgacaataagtgtatttacatggaatcgttttcaccccataaaacatatacactaatacacaatttttaaggatattagaatagtaatatagggacccagtcctagacaaggccctttgttaaaggggaactaaaaaaggtttagtagatttgtgtgtttttgtgtttccatgttttgaatgagccaccgcatcttacgcaatcgcatttacggtaggtccgtaggactgtcatccaaagaaaaccgaatggtcccaagcaggcttctgcttgacaataagtgtatttacatggaatcgttttcaccccataacacatatacactaatacacaatttttaaggatattagaatagtaatatagggacccagtcctagacaaggccctttgttaaaggggaactaaaaaaggtttagtagatttgtgtgtttttgtgtttccgtgttttgaatgagccaccgcatcttacgcaatcgcatttacggtaggtccgtaggactgtcatccaaagaaaaccgaatggtcccaagcaggcttctgcttgacaataagtgtatttacatggaatcgttttcaccccataacacatatacactaatacactatttttaaggatattagaatagtaatatagggacccagtcctagacaaggccctttgttaaaggggaactaaaaaaggtttagtagatttgtgtgtttttgtgtttccgtgttttgaatgagccaccgcatcttacgcaatcgcatttacggtaggtccgtaggactgtcatccaaagaaaaccgaatggtcccaagcaggcttctgcttgacaataagtgtatttacatggaatcgttttcaccccataacacatatacactaatacacaatttttaaggatattagaatagtaatatagggacccagtcctagacaaggccctttgttaaaggggaactaaaaaaggtttagtagatttgtgtgtttttgtgtttccgtgtttgaatgagccaccgcatcttacgcaatcgcatttacggtaggtccgtaggactgtcatccaaagaaaaccgaatggtcccaagcaggcttctgcttgacaataagtgtatttacatggaatcgttttcaccccataacacatatacactaatacacaatttttaaggatattagaatagtaatatagggacccagtcctagacaaggccctttgttaaaggggaactaaaaaaggtttagtagatttgtgtgtttttgtgtttccgtgttttgaatgagccaccgcatcttacgcaatcgcatttacggtaggtccgtaggactgtcatccaaagaaaaccgaatggtcccaagcaggcttctgcttgacaataagtgtatttacatggaatcgttttcaccccataacacatatacactaatacactatttttaaggatattagaatagtaatatagggacccagtcctagacaaggccctttgttaaaggggaactaaaaaaggtttagtagatttgtgtgtttttgtgtttccatgttttgaatgagccaccgcatcttacgcaatcgcatttacggtaggtccgtaggactgtcatccaaagaaaaccgaatggtcccaagcaggcttctgcttgacaataagtgtatttacatggaatcgttttcaccccataacacatatacactaatacacaatttttaaggatattagaatagtaatatagggacccagtcctagacaaggccctttgttaaaggggaactaaaaaaggtttagtagatttgtgtgtttttgtgtttccgtgttttgaatgagccaccgcatcttacgcaatcgcatttacggtaggtccgtaggactgtcatccaaagaaaaccgaatggtcccaagcaggcttctgcttgacaataagtgtatttacagttcgttgtgaagaaaggatctgtgaagaagacggacttcgctgcatttattgactctttgagtttgtgcaataattcagtagtaataatggacaacgccagtatccataagaacttggtcctcagaagccccgtaaatatttgttacactcctccttacagtccagaattcaatgctattgagctatgcttcgctaaagtgaagaaggactttcgtcgattgaactatataccaaacgatacaaagacgcacgtgtctgatatgatttccttagcattcagcaacctcactgataaaatcattatgggttgttttgaccacgtatggaacacgtatgtgatgtttgtataaagagttctgtgatgtataaattatgtaagatggcaacgaaacctccgacagtcgcgaaattgaaggagctactaaaattggccgaagtagcatactcatcaaaggacaagaaggacgatattgtccgtttatgcgaagacaatggtctcatcgccagaccccctccagaatacaagacggtggaaaagatgtgtgtcgtgaaatgcgccctgaagaaggcaatgagtcttgacgatgaagaattcggtaagtttagggagcatgtggaccagctcgtcaatgtggtgagccgcatgttacggcggtccagtcttgtgctgactttccacatcacgagtctattagagaaaggtctggatattccagacctgtacaacatgaaagatacctactggaaggattggctccgtatcggggtagacggaatcttctctgatgaggaaagcaagatatcgtacgaagctgtgaaggactccatcggcgatgtaattggtaatgacgacgctgactacatcaagtcttatccgatctatttcgatcaggtattgaactatgcaggtcacacattgagcactgtcgtgtcaaacaacgcatgggttcctttgataccacgtctggccagactcacttccaccactttaaataaattaaatgccccgaagacgctggacacatcgaagatcattcggggatacgacgtgatgcaggctattcagcaagaagtccaaaacatggagggatggccagagtctgttcaagagtacgtcaatgaagttagggagatgctgagtgttccagatggaagtcgagtttatgataactatggcaaagacatggactttccgaccatggtccggtttaattattggatacagacacggttggaggatatggatgcacgtcgtatccgattgatgcccatcttcaatgtccaacgggtgcatgttcgccttgacctgaagaccctcgtgaacctgttcaggcacatgttccccaatgaccagaacatcgttgagctttccaagtgggaacatgtaaagaatcccgacagcttcatgttgtcccagaggcctgcacagaagaagaaaaaatcatgtggtcctggtgaatgggaggcatacaagtcggtcatgaagcagtacgatgatgatgttaaggatatcaaggctactgacgagtacagacatgcaaagggtttgtatgacacgcttgtgaacgcccgaaaaacagtcgcaggttccttcttcagaaaaccacctgtcaagaatgggtgggttttcgagtgcagcatctgtactgacggagtctccttgagcatgcagtacagcaagacagtacaggtccttgtctcagatctgaagaagacctgtaagaaccctcgtaaagaagaaggtatcaagatcgcagaaaaatacgacggctcacttaaaacgatatttcccgatatgggtatcgtcgtcctgggtgtggacccaggacggagcaacatcgctacggtaacgtatttggcagacgataaaaataagacatggaagctgacacgtggtgcattttaccacaagtcgggtatcaagaagcagacaaggcagaaggaactgcgttttgctgacatgattcctatgtgggagtctctgcgtgaaaatggagcagctttgagtacatcgaggacggataatatctcggcgtacttgtcaaattacgctaagttttctgacgagtggtggagattggctttgcgacgccgagaatcccgtgacaacttgcagcgttacatcggaaaacgaaaggtcaaagactctttctgggcgggtatcaagcggtgcatgatgaaagaacttcctgatatgaaggtttgcgtggcctacggatctgccatcacgaaactgaagcctactggaccgggagaagttgcagttcccactggggccatgttcgcatcgtgtaaaagaattttcaaagaggacgtttctgtgacagatgagttcaaaacgactcttatgtcgtgggagacgggtaaagaaaaagaacgtgtttacaagatcccaagtgtttgttcagcagacgtgaagcttaggttgggtggtgaacgttttggtcacacgaaatcgaaaacgatgccaaaggtcgctgattgcgaccacttaggggtaaggttgtacaataaacgtaaaggcgcacaagagaagcacaggaggggtggcttcgccacttcccttgtcgattctcaaaaatcgatcgagcggtacccagaggtacgaggactgcgattctctccagaaacatgcatttactcggaccgggatcgctcttctgctctcacaatcgcaaggctgcactgcatggaattgatgggtctaggacgacctcttccatttgcccacagcagctctgttgttgttgatgaataaaaactcgtattgttgtagacaccactcggtccccctccggtggtcgcgacaacattaggttacaccgcaaggtgtaccgtacactcccaaaagcggtttcattttagtattccgtcgagtgtaaaggtaacgcttttgcttttatggttcggaatcgggggtgaagaagacaaggttcttgaaacctcgaccacccctcacaccggcgacgctgcagttagtgtcaggaatagcccccattttcttgagtcttgtttgcagagtctttttgttcattttgaaatcccgggcaaatgcattgatatccttcagaagaacgatgtctgtggcggagtctgtgactgaaaagtactgattgacgagcacaagctcgtcgccctcatctactcggagtctgtaggtttcacgctgcacgtcagaagacatttgcacgggagaggagcggtgagcgtcgagaacgagccacgtgaaggcatcgatcacgtcagctcgaccgcagtataccttcatgcttggatcgctctctctgtagaatggaagccaagggatgctaccgccctgccccggagtcacgaacttgaacgggaattcgaaaacgatcgcctgttcgagaacgtccactgcagaaatttgaggcatctcgttcagattcatgaacagacgtgatgcagtacggacttctctttcgttttcgtagtttcgtctagccttgatgacgtccccaccagactgaaacttttttatcagacccccgtcgagcttgactcgagagttacccgcgtcgatcttgacttcgttagtgtaagtctgacgggagaactcacagtcgatcacccatgactgagctttgacgtccgttgcactggcgttcagcatgagctgagaagaatcgatagtgttcacatacggaccgaatgcgttctggttgatcgtctgaagcagacccttaccagagttcctctcaccgatcatgacagcccagttcttgtccttgtactcaccggccatcgcgcgggcgatcatctgaaggtacgtgtcaaccttgccggcagtgcccaacgtgctattcagaagcttatccatgacgtcctgtaaaacgtcgggggaggggcgacaggaggggaagtcacggttcacacagagctcctggagggggatcacatctggtttgccttcatatggggtgaacgatttgtcaaggaagtcgtacacaccgttgttgaagcagagcacgccgatgttcgactcccatatcttgtctctgaacgagttgtccttaggggagaagtgacggatgttcttagcgatcgcagtggacttggatatgatgcagctgtattttctagcgttgccaccgtcgtcgatgaacttgatgttcgagctcatgcaagcttggaaaacaaaagattcaacgtcatccttgttgctcgtccacttaccgtactctttcacgaacaacgtgttgttgcatttaaggatggtaccctccaggtcctgcaacacaagatgaatggcagaatcctcgcctccaacgtgcctgagaggttttaagatagaattgtactccgcgagggggacgtccagcatttcgcaagtcatgtctttaatcttcacgagtatacgataaccagttcgatcaaagatgtaatgcgatatgtcttagcagcatctccgccgttattccaccggactctatgtcaaccttcttctcaaccattgctccgtcaaacatcagtacgcccaccacaaagtggtgctggtgcaggtaatccttcatggacatcaagcactcgttctctatatcacacaacatgatgtttagagcagacgcacgcgtgttaccatcttttttagcgatatccatgtacgcgttcgaggggcccgtaggacccaacaggtcggcggatattgtttttatctcattgtagaacttgcccagccactgggaagagtaattttcgacgacggccttatgcccaccgttgaggacagacaacacggccaacttactgcatgcataatcaccagaaatggtctgcaacacatcggctcggtggtcgcagtaatgctgcaacagggggcatgggataccgacgcgatggcacttctgagacagcaacgaagggtggcagttcacgaaatccaggtccacgtaaaaggggtgagcgatggcgttcctgatctctctggcgatatactgcatggacacaccacgtttggcaaacagccggccatgtccatggggctgcttagaatacttcacagtcacaacctcgccatcggccgcagcaatgtaacgctcaagccagattgtacatgcaagacttgtctgtgtcggggcggaaattccaagagtcccagtgggacaagatgtacttcagagccccaacagaaaacttctcgctcaaaacaatgtcggacattagtatgtgagtctgtgatgatacagtcaaacagcatgttctcattatacttgttgtaaattgttcttcgaaccaaaccaagtttagtaaattggcgtgtttttgtgtttccgtgttttgcattagccaccgcatcttacgcaaccgcattcactgtggtactggggtcatccaaagaaaccgcacgatcacaagcaggctctatttgtttctgaagggggagcgccggcagattggattcattttgatgactcgcgtacaccattcactgtaacgcttgggcttctcactgtaacacttgggcttctcaccttacatcaggcagaggcctcaatcaagcaccctttgttcatgcttcaagtacttggctgcagtctgagttggacaattatttttacatggcagaccacaagacgaggactgactgaccaagacgtcttcagacgatccaccgcgcacaaaatcatcttatatcaaacggcggaacgatgtcgatactcttgggggagcacttattggatgtgattcggtgatgattggtgtctccttggtggattggatgtgacggcctcgtccatcattataaagggtgtcccgctttatttgagaataactatagaatgacagattacgcttcggacatcactgtgtcgggtacgtccgacttgatttgcactggggtccaagatgttaatcttgatacaattgaaaagcaaaaaacattggaattggcccgcctcatgagaggcctcgtgcctgaatggggtagtgattacatcgaacgatacattcctaacgagctcctgtgccagttgcacaacaagagaacatggatggatgaagatggattttggtggggatttgacaaagtttgtgccaggaagtataagcagattgacgtcattattcttgctacgaagtatcacggaattgggacatatgaacataaagtactggtcactctaaataattcggtacaagtggtgtgggaagacgatttatggtgattctgatgctctttgaatcatacggaacatcgcatgttttgcatggcagccaatggccccaaatagcaatggggtactcaaagaacagcagtagaaaccacagtgaatgcggttgcgtaagactcaatgcggctttaatcgacgacaagtgtttcgtgtgcgtttctaaaaaacgagtctaaacaactcaacatacatacctgataaaaaccgttgagcgattgcgcgaagaaaaagagtattcatcgacgcgatgccgaccgatatatatatcccaccttgtcagcccatttcaaaaccagtccgcaaactaggaaaggcgttgtcgctggacatggacattctcggcacaaccaagtttcttgatcgcctccactgccagaatgtcagacgtctccatgcactgcgggcgtcatcggctgtttccggtgatccacgcatcttgaagtatgacgcattgcttcaccttattaaacaaagacaccacacatccccaccgtcacgtttgttcctcgtcgctgtggagtacttcttcgatgacggctgctacaagatctccaacggaagcgcccttgtattctcacatgctatcaacacccttttcgttgtggagccgaaaatcctcaaacccccccctgcccagtatggacatgccaaggtgtcgaaagccatacagcaggccactatgggcgcgactagacttttgtcctggctaccgcatctcataaacatggacctgaaagacggaacctcacttggatatgtgaaaatttctcgtatgatcgtgaccgctgtgaatcgcggtggacgcgtcttctgtcaagatatccacagccaggaaatttactaagaattggaggaggaagacccatacagctagggacatttgatattgggacaccttatatttggggattctgaaaagttgaccaattcaagatttgtaaccgagtacagtgatcagttccaagtaccagtctgagtcattgatgttcaagcctcctcatgtgattgtgttcagcaacaggacttgagttcctttagttgagcggatttgtgattccttggtgctgatgtctcaagctaacgagtcgttcaggaagctctaaatcctgattagaaatttaaaaaaaatcggccgggaggcaggaacgcccattatgttcaaagtaccctgaaaagtcaaactgatggctaacatcgtgcgcatcaataatcctttagcagaaacggcagcaattagtgtcaatttggacattcgcaatgtcctagaaatttggatatttaaggaggacacgcaaacggcggaacactgtcgaatgtataggatgagtgtacacaagaggccgaacacggtcgaatggcacacgcaggccctcattgacacacgcaaacgtacattcatgacacacggatgcggtggcggattctcgtcctctactgaagtgtaaacaaccattcttcagtataaacaaccatcagcaagcacagcacagcacagcacagcacagcacagcacagcacagcacagcacagcacagcacagcacagcacagcacagcacagcacagcacagcacagcacagcacagcacagcacagcacagcacagcacagcacagcacagcacagcacagcacagcacagcacagcacagcacagcacagcacagcacagcacagcacagcacagcacagcacagcacagcacagcacagcacagcacagcacacttcacaaactaatgagttcctttgacgaaatcaatgaagatgtattggagatcattctatccaatgcgatttcgaacgaatcccacctcaaacaagtgcctctcgtttgcaaacagtggagatgcgtcgcaccccggtgtgtcaaaagtatccacttaagacattataacagtttggaatacgcattatcacgcatttgcaggctcgaagagttgaaaatcggtatcaatcgggggaaagacgtaccctaccaatcaatgtcggatatcgaaggcaagatccaagacatatcgccgctgtccggcctcacttcgttggttcacctggacatatcgaacacctacgtgaccgacatatcgccactgtacggactcacttcgttgacgcagctgaacatgtcgcacacacctctgtacaacatgcaagctctgtacggactcacttcgttgattcacctgaacatggcgcacacacttgttaccgacatatcaccactggccgccctcacttctttgattcacctagacatttcgctatcacagctttccggactcaccgctttggttcatctgaacatggcgtacacacgggacctattatcaccgctttccggcctcacttcgttgattcacctgaacatggcgtccacacgtgtggacgaaatatcaccactggcaggactcacttcattggtgcacctcgacatttcgaacaccgacgtggacgacatatcaccactggcaggactcacttcattggtgcacctcgacatttcgaacaccgacgtggacgacatatcaccactggaaggactcacttcattggtgcacctcgacatttcgaacaccgacgtggacgacatatcaccactggcaggactcacttcattggtgcacctcgacatttcgaacaccgacgtggacgacatatcaccgctttccggcctcacttcgttgacgtacttgaaaaatggatggaatgatgtgtaaaattgttcaacgggtccttagtaatattattgttcattttccgtttaaaatagggattgatttgagcctccggcattcaatgggcgttcctgcctcccggccgattttgactggttgcgaaacatggtatggagcggaattgtgattccttggtgcttatgtctcaaatgattattgttccagagatggagagtctttttagaggtgttcatgtggtaagggccataaactgagccgtctactgcgattcttaggccaaacggttatgggattgttaatgattgttgatgattcattcagatacctacaaaaccgcggggaggcagatgtgatgcagggaatgtattcagttcagcaaactgtgcgtcaatgatgagatggcatgccttccatgcatacctgaggcagcgacacattgttgcaaagtgctcgcagttgttaaatgcggcgttgtagacaaatggggttttctcagcatctttgaccagagcgagggcaaggcttgccgagagggtctgatccagagcagccccttcggggtacaaagcctccgcaaagatagagccgttggcaacgaagtcttcgtaggatcgcaatgagacgttggcctgctccttagaaattccccacacatcaacgactgtcgggacttcgatatcccctggtgccaccacttgctgcccgacaaagatgccatggtgcctgtaaccggatgcgtctttgaccatgatctgggcgccaggcttaagcttgccgaacatagcatagccgctcttgtacggcgtcagggcagcatatgggtgcccgaggtctggggttgaccaatctggaagcattcgcttgatgtgggcgattgccgatgtgaggatgtcggtaaggggatcttcccgagatgccatgtttgtctcaaattgagctgctgactcgtgttaagcttcgagatagataattatatagggatcttttttatgcgaacgtcattttctcattgcaacaccgggggggacatgggttttaattcagtacttttattgattgggtacaaggatacctggtacagatgggatttgtaaatgaggaatccgtattgtcgaagccgacagtgtgtgtgcttacagggttcaatactgtccaagacgcatttaagattgtccctcacaaacacattccatttgtcatacctctgaaaagactctccatcttgggaacaacaactatttcaacaaaaaataagaatcatccatcaatcaatccctatttttaacgtgttcacatgaacacctctgaaaagactctccatcttgggaacaacaactatttcgacaaaaaataagaatcatccatcaatcaatccctattttaaacgtgttcacatgaacacctctgaaaagactctccatcttgggaagaagaattatttcaacaaaaaataagaatcatcaatccatcaatcaatcaatcaatcatccctattttaaacgtgttcacatgaacacctctgaaaagaatatgttttagaggttgtttgtgtgtgaaattattctctctatttgaaaggcattttgaagagtccgcacatgcagacagccattaacatccacaattgctttacaatgtaccccacccgccccggaattcttgcgaggcccgagcaatattgcaaactggaagttaaggtaggccgcatgattgattacatgctgacaggttctttacagaacgcagtgtcgagcgaagtgtagaagataaacacatacaagaggacattgggaggacttgggattatgatgtaacataattcacttgtctgagtgtataagagaactgtgggaaacgccttcttcctagaaaatccacattgttttatgtgtcttcgatgccgtactgatcataatctcacattacaactcttgcaaattataccgaccgaatccttgcatgttatgaaggggttcctgtttgcgatcatgcaaagacctgtgttctcgtgcattgtacacatccccttcaatccaacgatgaagactgtgtccctacacgaccgatgcgggctccagaaaacgcccagaatacaaattgttacccatgcatatggtaggtggaccacgccacttccccaggctctggcgcggatcgcgcgtctccacccacaactcatccgagcgttgctgtaactctacgtacgtcggacgctcagaaaatagcctgcctaacaaacgcgcaaagtgcgtggcatgggacacattctgaacttcctgcggcccgctggagtaaataagcacccaggggaacggcgaacacgcgttccaaccatgggccactgctgatggctcgctcgcagacggctccgcgttgcagacgttgatggtgcataccacagtgcctttgtagcgcgcggcatgcaatgcagcagcgatgtctgacagcgcgatgcaactgccatcagccagaatcaactcagctcccttaccaccgtgaccacacagctgaatgagcaacaccgatgcttgctgtgatgcacgtgcctcgatctcctgcatgatgtactgccgtgtgaggctgctgcctgtgagcgtgtgtacgctgttgatctggtctgcgcctagcaccttgaggtgctctgtgcacattccagcctgtaggggccgtggcaaccgccccagacgctgcaagtatgcatgcactgcctgctccatcgcagctgttgtgccttcggcatccgtattgtttcccgagggcttcacccactcgtagttagggtacacagcaagcagctctagcgacagccccatgtctgtcacggaaacctcttcttcggtgcatgcgtcgcaaaaacacggtggatcaggccccatgccccttgccacatgatgcgacattgcttttaagcattgtgatgaacgcaacatcactgcacgccacaatgcatcttgcacgtgattagagaggttgagctcctttgcaaaacaaaagcggcaaaacgacgcccttgatggtgttggcacatcagaggggcaagcaagttcatccaatacaaagccgcgccaggcccaagacaccgccatgccacgccaggcatgtccctgtacccttttccctttatattgacaaggggtcctgtttaggcaatgcatgtgcagtgactgatcatggccgaaatgtacacgaaagcccaactcgatgatgccgtggctgcagagcgcgtgcgtactgacgttgttcagcgagcttacaaaacgctactggctcagacgcatgagcaacatcgtctactgaaccaggcgctgagcttggtttccaagcaggacgaggagatcgagaacctcaagtgcgtgattcttgctcgtgcactcatgaatagacgcggtgcgcgttgtgccccacaatgcatgcaatacaattttagcagtttcacatccattcagtatcccatctgatggcgatgggataattatacaacttagtgaatacaaagactcatgtggattgcaatgcctaaacaatttaaaatccaagtatgaattccgggtatgaatgactgtgtaagaatgctttgtttttgacaaaactcttgaaaaatcacatgcaagggtggacatgctgcatgctcgcggtgtgcatccacatgagaatgaatgaatgtacgtacaggggggggatgcgcaagccgcatccttggcatgtgtgaggatgaatggatgactcaacatgataaggaactctaaagaaaaacgttacaccgcaaccaacaagtcttacatcatttttttatttaaactatatacactttcattcattcattgaatgccaaaactacctaaagcgaaaaaagaaacgaagagtcgatc

SEQ ID NO: 191 - DNA, 20220 bp, unidentified
  source 1..20220: mol_type = other DNA
  misc_feature 1..20220: note = Fanzor polypeptide
ccaatccttccagtaggtatccttcatatcgtacatattaggaatcggcaggtcgccctccatgagcctcgtgacatggaaagtcagcaccagactggaacgccgcaacatgcggctcaccacattgacgagctgatccacatgctccctaaacttaccgaattcttcatcgtcaagactcattgccttcttcagggcgcatttcacgacacacatcttttccaccgtcttgtattctggagggggtctggcgatgagaccattgtcttcgcataaacggacaatatcgtccttcttgtcctttgatgagtatgctacttcggccaattttagtagccccttcaatttcgcgactgtcggaggtttcgttgccatcttacataatttatacatcacagaactctttatatcaacccccaaccccatgcctgccttccaatccagagcggcatggccacttggttgaagtttttatctgcataccgtttgcaattatatgtttcataatgtcgccagtcaaatcgagactgtcatgtggcttacattcgcaagtatagccactctcctcaaactttgcagcaatgtgtacatgtgtaccacaatcgaccgtctgtccaagttgtacatagagaattgtaattgattcaatatactgtaacattattgaccggtctgagtgtaacaaagggtttttgaggccattggaagtctgatcaaaaagacacagacgttggttgtctcaactcagctgtactcggtgccagccgcatctgaatccatgagcagcttgcagacatctgcgtgacctgccttggcagcctcacgcaaggcccagctgtctctagagttcgcccgggccctgaactcaattccagcaaccttcggatccatcagcagcttgcagacatctgagtgacctgccttggcagccgcccacaatgctctgctgtcgaaagtgtacgccctggccctgaactcaattccagccaccgctggatccatcagcagcttgcagagatctgcgtgacctaccttcgcagccagccgcaatgcccagctgttgacagagttcgcgcgggccctgaactcaagtccagccacctctggatccatgagcagcttgcagacatctgcgtgacctgccttggcagcctcacgcaaggccctgctgtcggtagagttcgccctagccctgaactcaattccagccacctctggatccatcagcagcttgcagacatctgcgtgacctgccttggcagcctcacgcaaggccctgctgtcggtagagttcgccctagccctgaactcaattccagccacctctggatccatcagcagcttgcagacatctgcgtgacctgccttggcagcctcacgcaaggccctgctgtcggtagagttcgccctagccctgaactcaattccagccaccactggatccatcagcagattgcagacatctgcgtgaccgtccttagcagcggcccacaatgccatgctatcgctagagttagcaagtgccctgaactcaattccagccacctctggatccatcagcagcttgcagacatctgcgtgaccagccatggcagccgcccacaaggccatgctgttgctagagttcgccctggccctgtactcaagtccagccacctctggatccatcagcatcttgcagacatctgtgtgacctgccttggcagccgcccacaaggcactgctggcggtagagttcgcccgggccctgaactcaagtccagccaccgctggatccatgagcagcttgcagacatctgcgtgaccttctctagcagcggcccacaatgccaagctgtcgctgttgttcgccctggccctgaactcaattccagccacctctggatccatcagcagcttgcagacatctgtgtgacctgccttggcagccgcccacaaggcactgctgtcgctagagttcgcccgggccctgaactcaagtccagccaccgctggatccatgagaagcttgcagacatctgcgtgaccttcatcggcagcctcacgcaatgccaagctgttgacagagttagcccgggccctgaactcaattccagccaccgctggatccatgagcagcttgcagacatctgcgtgaccggccttggcagccacatagagaagcttgttttcattttggttcgccctcaattgtagggccccctttacctgtacaagaggattggacaccaagcatactgctagaaggtcggcgcgcccccctttcgccatcatctctccaactcgctgtggtggttggatcagtccggtaaggggccatccagaaaatcttttgcacagagttttacacactaatacaatcttggggttggaagataatagggcaatacgatcaagaatgtcatggggaagcgttaggattaacgatgatcgcgtgtgcgaatgcatgttctataaacatgtgtgtacaatgcatgcaagcgcacaggatggtttatagttattataattttattataaaatggtctatagccttttataaaatcccaactcattatttatttatactaccgaggcccatgcacctcccttgtgacgcttgcgcaagtatttattcccccacttattgcagttcctagacctcggtgttgtcctcctgctccatcattttagtacgcacatggctggcggcttctactaagatgcccgcgccatcccaattgcaatgatccctacaatactgaccaccaggccgaaactggtgcctatgacgccgtacttgaacacctctctagaaaaagccgcaccctcatagcaccagctaccgaagtgctgacagttccttcccaacacattgtaatccgccctgccgagctgcgagcgtgcccttttgaccacctccaacggtgagaaacgacacctcgcattcacaacccgtgcagagctgccaactaccaggaactctgccagagtagtctcgctgatcaatcgctttccatggggctctgaccccgcatagtggatgaccttgatgtctgctgcagaggaataccattccgggggggcgctcacaatgccatcgtgctcgaacttgatgccgatggggttgacgcaatccacatgcatccacatgccagcctcgatgctcgccattttcttagtacccatggcagactttttctgcgaggggtgacatacgcaaccaggggaaacatgtcagcatatctgacacgtgtgttcgcgcgcccatgaaaatacgagtgtaaacgtggcatttctgccacgtttttcgcgctcctcgaagtcagcgaaagccgccttggtgtgtgtgaggatggtacgggtctgcgaaatcacagtgtgctgtgactcgactcgacagtttccgccgtgatgcgagaggtcgccatgtgatgtgatgtgactcgactcgacagatgccgccgtccttgatgagagtggtctgtcggtctccgatcctcgaaacacgagtgtaaacgttgttgtgaaacatgtacgtaattcccttgtccgattgtacaaaaagcaaccatgcaggagtcggaaccatccgagcaagtgaagaactactacatcgatttaaaacgcgaagatgcaattgctggattgaatggcctgttcggagtgtcacgcgaggactcaggtgcacgcctggtagagtacatgccatcccatgaccaaccaggtcccccgcatgcaaaacacaaatacacaaaaacaaaaaaaatggcgaaactttgactggttctcttttcacagagtgagtgtgtggacgagaaagaggctataggtttccgccgttgcgtttgcatgtgaactgtcaaggatctctcggaagtacagtcggagacgcaatttgtgaatgcaacgtgagcgagcagtcaacattgccagtctgcttatccagttgccccatgcaagcttgcacgagtaccgccttatcagatggaaatgtgagtggatcgccatgcttacggatcgtcagaaagacactctcacgattctatcttttggtattgtaagcatcatattaattgtcaatataggaaatgctctgttttatcgcacgaattggagcaatcacacacgaagaaataaaaacataacaaataatcaacctaaccacacttgccaagccatagatcccgtaagtgaaccagaatacaacatgagggaaatagcaaaacagtcaattctgcttgaggaacatctactcgtcagagacaaatactgcgcagactgtatcaagaaacatttcctacactgcattggtcttgctgaagaagcggcgatgctggtgtgtgggaaaaagcaagggaaccatttaccatacttaaacgaagcaggaccgttttacaaagccaaattcaatgaatggctaaacaaatgccccatgtggactcaggaaagcgcgaacacgagagtgaagattgcaggagaaataagggatttcaggaaagctatagtgaacgtgtacgcatcatgagcgtgattttttcaagaacctgtccaactcgaagcggtttcattttagtatttcgatgtctgatcgcacactcgaggttggcttacctctcgaatcgatgacatgacattggagtgagatgcgagatggtctatcttggctgcatcctgtacagcttgggctgacatgacattggagtgagatccgagatggtctatcctggctgcatcctgtacagcttgggctgacatgacattggagtgagatgcgagatggtctatcctggctgcatcctgtacagcttgggctgacatgacattggagtgagatgccagatggtctatcctggctgcatcctgtacagcttgggctgacatgacaacgacctgggcctccacttcttttttcgccttatccagtctttccaagtaagcgatgctgtcacctgcacaggttggaatgtgagcaagatggcggggacatttattggaatatggttggcaagggattccgtatttacgtcgagtgcagtccatgtaattcgctcacaatttatgtacactcaatcacaactatgactgtagaagtcgccagtatacagttgcgacccttcaacccattgcattgtactcacctacgggagtgtaatgaattctttcaggagtctgcgtcggcacacaacataactcgggtttgtattcacgtgtctccatgtttcctgaatagtcgctgcggctctgcgtcttcgcactaaacggcacgcgtcttggacggataccaacatgttgcggtttctactcaatacatgccagtcccatggtttgtccgggttactcgagacagtgtcccaagtggctactccgggattcgcactcaatccacaccaatcccacggcttgtccgggttactcgagacaatgtcctaagtggctactccgggattctcactcaatccacaccaatcccacggcttgtccgggttactcgagacaatgtcccaagtggctactccgggattcgcactcaaataataccaatcccacggcttgtccgggttactcgagacaatatcccaggtggctacactggggtttgtgctcaacaaataccaatcccatggtttgtccatgttactcgagacaatgtcccatgtggctacactggggtttgtgctcaaccaataccaatcccatggtttgtccgggttactcgagacaatatcccatgtggctaccccgggattcacactcaatccacaccaatcccacggcttgtccgggttactcgagacaatgtcccacgaggctacactggggtttttgctcaaacaataccaatcccatggtttgtccgggttactggagaaaatgtcccaggtggctactccgggattcgcactcaatccacgccagttccacggcttgtccaggttactgaacacgatgtcccatgtgacattggggtttgtgctcaaccaattccaatcccatggtttgtccaggttactcgacacgatttccattgtggctacacaggtgtttgtgctcaaataataccaattccatggtttgtccaggctagtcgacacgatgtcccaattggctactccgggattcgcacttaatccccgccaatcccatggtttgtccatgttactcgagacaatgtcccaggtggctacactggggtttgtgctcaatccacaccagtcccatggtttgtccgggttactcgagacaatgtcccatgaggctacactggtgtttgtgctcaaccaataccaatcccatggtttgtccgggttactcgagacaatgtcccacgtgacgacactggggtttaagcacaatttaccccaatcccacggtttgtctgggttactcgacacgacgtcccatgtcaggtatggattatcactcaattgaccccaatcccatttgcattctccggatttgactcgatccagtatgtgactcttaatttcgatgtcgagcattatataaattctcacggttgtgttgttctcaaataaagtaaagtgggaccattcttttacattacataaaggagtttcttcatttatctaataataattttgacgtgaactgtcaaaatgttgcaagaagaatatgaaagagaattacgtgtgttggtggaaaaaacatcgacccccgtccgaagcctggtaggttccatcaccaatgacttaactgtaacatggtttagcttgaaatggaaaatactcgaaattcttgggtatgacgtccaggtcattcatgcatgcgagtatggttgcggtagagtttcccctgcccactttcgtcaatcacccgcccctctctccccatccgtgttcatgtggttcagcctctgttaattccaccacccatgccatgcattcctttgtgtgtgtgtgtcagtcagtcagtctccctgtgaatcgaggagtcggaaccatcccagcaagtgaagaactactacatcgatgtaaaacgcgaagatgcaattgctggattgaatggcctgttcggagtgtcacgcgaggactcaggtgcacgcctggtggagtacatgccatcccatgaccaaccaggtcccccgcatgcaaaacacaaatacacaaaaacaaaaaaaatggcgaaactttgactggttctcttttcacagagtgagtgtgtggacgagaaagaggctacaggtttctgccgttgcgtttgcatgtgaactgtcaaggatctctcggaagtacagtcggagacgcaatttgtgaatgcaacgtgagcgagcagtcaacattgccagtctgcttatccagttgccccatgcaagcttgcacgagtaccgccttatcagataaaatttaatctaaatttctaaattttaggttgtaacagtagttgcctcgtttgctttccgaaaataactaaacttcgaaacgctgtcaataccaagcagagcccccgtattcatggaaaaaatacagagaactagttgacgtggtttttaagttgccacgtggtttcgcacgatgaaaggcacgagcacgtgactgaccatgtgattccttttcctctggaggtgttcgcggtatcgctctgcgatcactcgaactgccttactgacgcgcagccaagacatgcaaatcttcttgaagaagacctcctggatttctgtatcatagtaagagagatccagtgtatcggagccaaataagtcgatgttgatgtccaatccaggtcgggtgatgtacagcctctccattatgtggtagatggttggatggtcttcggacacaaccaatgctttcagcgcaaacaatttgtgtctgttccttttgtccacatacaatatggagtcatagccttcagacatgtccattccatagatctgattgtccacgaactgagagaacactgggaagaaaccgtctcctaatgtgaacaacaaagctaattcgttgggaaagataagcagagacggatcttgtgatttgtatgcagcattagcaagttgcaaccatattttctcaccgactgttgacattattagttatttaacgttgtggatagagttgggttggttgttttattgctttttgctcagatggaaatggtttcaattttttattcactgccgccgtgatgcgaaacttttgcagtgtacgaaaattattcgtaaaagagcatccaacagtgcatatcgtcgtcgccgtttacccaactgtgttgaggatacacgcatgctaagttaccaatgcccaagttagtcattgtgaccatgtgtgagtagccgaagctgctgctaaaaaggatgcgtattcccatagcggtgctgatacggtcgatacttggcttgaactctacagcaactgtgcagagccatacaaggagttgggcaccaggatggtgcgctccatgttggttgaccatttcacacaacaaatttgtagccgcctgaattttcgctttacttgtatcgcacacatggtcgcaaagtctattttgcagtccatccacgccgtttatgtccactaacctaccaccactatgcgagggcagtgtctgcgtgagtggtagcactgcttccgcagggacatccaaggttatcaattcgcataatatgcgtaccctgtcatgaagagactggcgcatccccaattgtctcagtgcataatcgggtaaatgaatagagcatggattcagaagcagatcacgagcaagcttaagcgttggcgcgacagccatgtgcggttcaagtgctgttgccatggcctgggcgtaagcaggctctgctattgctacacgcagcatcgtttttgaaattgatgcaacagtggcccccgctgtctcattgtctagcaggattgcaatcgcggaccggataaagagatcctccacccctgctggcagatgtgctgtcgctacacattcattggccacatggatgaacacatcgatgcatggtatgggtatcttagctggtagttcagctaaaagtcgaaacagatttccaagaccgtcttgactgagtgcatctatgacggcaagcatctgggactgggaacgagttgcaatgaagagactgaccagtcccaccagatgacagtgttcatgtgtacgctcattacatgtccgaatgaacatgtgggtgtacagctggtggaactgtgggctgaccttgttggtacctatgctgacctgccgaccacacgcattaagcgcagtgctcagaaagacggtgggcatgctggcgatcaagcaagaaacaccgttcatgtccaatgtaagctcagtcgtaatgtcgttgtaaaactgtagcatcctcgcaaccccctttgatgctttgcgcataatcacaggtgaaacagcatacggtgtggctgtctcgagcaaaactagcaatgccctagtagcagtcttgaaatcaccgtgtccagagcagcgtctaatcctagaagaagctagcatcaatctgatactaagtggtagtaagcaaccgcacatccacattgtgcaatgaactacagtgatatgatgacaacacgccttctctgccagcgttgcagcggccgcagttgacatcatgaacttagaacccttttatgcacctgaaaacagttaaactcaatggaatgagacagatcgggaaaaagctacccccgaaaacaactacaaaaagccctgcaaaaatctaccccccgaaaacaactacaacgatacgccaccgcattcccgtgtcatgtggatgatgttggtcagcttaaatgctgaaatgtctatgattgtacgagaggcgttttgggctactactacagttggcggaacagtaaaatgaaacatatatcagatggaaatgtacgatagaaaattggcgttaagaatggtcgctgacttgggtgtgttaaaaacttctgtgtttacgaatgaatgaatcgatacaaagacgcacgtgtctgatatgatttccttagcattcagcaacctcactgataaaatcattatgggttgttttgaccacgtatggaacacgtatgtgatgtttgtataaagagttctgtgatgtataaattatgtaagatggcaacgaaacctccgacagtcgcgaaattgaaggagctactaaaattggccgaagtagcatactcatcaaaggacaagaaggacgatattgtccgtttatgcgaagacaatggtctcatcgccagaccccctccagaatacaagacggtggaaaagatgtgtgtcgtgaaatgcgccctgaagaaggcaatgagtcttgacgatgaagaattcggtaagtttagggagcatgtggaccagctcgtcaatgtggtgagccgcatgttacggcggtccagtcttgtgctgactttccacatcacgagtctattagagaaaggtctggatattccagacctgtacaacatgaaagatacctactggaaggattggctccgtatcggggtagacggaatcttccctgatgaggaaagcaagatatcgtacgaagctgtgaaggactccatcggcgatgtaattggtaatgacgacgctgactacatcaagtcttatccgatctatttcgatcaggtattgaactatgcaggtcacacattgagcactgtcgtgtcaaacaacgcatgggttcctttgataccacgtctggccagactcacttccaccactttaaataaattaaatgccccgaagacgctggacacatcgaagatcattcggggatacgacgtgatgcaggctattcagcaagaagtccaaaacatggagggatggccagagtctgttcaagagtacgtcaatgaagttagggagatgctgagtgttccagatggaagtcgagtttatgataactatggcaaagacatggactttccgaccatggtccggtttaattattggatacagacacggttggaggatatggatgcacgtcgtatccgattgatgcccatcttcaatgtccaacgggtgcatgttcgccttgacctgaagaccctcgtgaacctgttcaggcacatgttccccaatgaccagaacatcgttgagctttccaattgggaacatgtaaagaatcccgaaagcttcatgttgccccagaggcctgcacagaagaagaaaaaatcatgtggtcctggtgaatgggaggcatacaagtcggtcctgaagcagtacgatgatgatgttaaggatatcaaggctactgacgagtacagacatgcaaagggtttgtatgacacgcttgtgaacgcccgaaaaacagtcgcaggttccttcttcagaaaaccacctgtcaagaatgggtgggttttcgactgcagcatctgtactgacggagtctctttgagcatgcagtacagcaagacagtacaggtccttgtctcagatctgaagaagacctgtaagaagcctcgtaaagaagaaggtatcaagatcgcagaaaaatacgacggctcacttaaaacgatattgcccgatatgggtatcgtcgtcctgggtgtggacccaggacggagcaacatcgctacggtaacgtatttggcatacgataaaaataagacatggacgctgacacgtggtgaattttaccacaagtcgggtatcaagaagcagacaaggcagaaggaactgcgttttgctgacatgattcctatgtgggagtctctgcgtgaaaatggagcagctttgagtacatcgaggacggataagatctccgcgtacttgtcaaattacgctaagttttctgacgagtggtggagattggctttgcgacgccgagaatcccgtgacaacttgcagcgttacatcggaaaacgaaaggtcaaagactctttctgggcgggtatcaagcggtgcatgatgaaagaacttcctgatatgaaggtttgcgtggcctacggatctgcgatcacgaaactgaagcctactggaccgggagaagttgcagttcccactgggaccatgttcgcatcgtgtaaaagaattttcaaagaggacgtttctgtgacagatgagttcaaaacgactcttatgtcgtgggagacgggtaaagaaaaagaacgtgtttacaagatcccaagtgtttgttcagcagacgtgaagcttaggttgggtggtgaacgttttggtcacacgaaatcgaaaactatgccaaaggtcgctgattgcgaccacttaggggtaaggttgtacaataaacgtaaaggcgcacaagagaagcacaggaggggtggcttcgccacttcccttgtcgattctcaaaaatcgatcgagcggtacccagaggtacgaggactgcgattctctccagaaacatgcatttactcggaccgggatcgctcttctgctctcacaatcgcaaggctgcactgcatggaattgatgggtctaggacgacctcttccatttgcccacagcagctctgttgttgttgatgaataaaaactcgtattgttgtagacaccactcggtccccctccggtggtcgcgacaacattaggttacaccgcaaggtgtaccgtacactccggtttcattttagtattccgtcgagtgtacttgtacttacattttactcaccaacgggagtgtaatgaattctttcaagagtctgcgtcggcacacaacataactcgggtttgtattcacgtgtctccatgtttcctgaatagtcgctgcggctctgtgtcttcgcactaaacggcacgcgtcttggacggataccaacatgttgcggtttctactcaataaatgccagtcccatggtttgtccgggttactcgagacaatgtcccaagtggctactccgggattcgcactcaatccaagccagttccacggcttgtccgggttactcgagacaatatcccaggtggctacactggggtttgtgctcaaataataccaatcccatggtttgtccatgttactcgacacgatgtcccatgtggctacactggggggtgtgctcaaccaataccaatcccatggtttgtccgggttactcgagacaatatccagggtggctaccccgggattcgcactcaatccacaccaatcccacggcttgtccgggttagtcacgacaatatcccaagtggctacactagggtttgtgctcaaataataccaatcccacggctcgtccgggttcgtcacgacaatatccaatgtgactactccgggattcgcactcaatccacgccagttccacggcttgtccaggttactagacacgatgtcccatgtgacattggggtttgtgctcaaccaataccaatcccatggtttgtccaggttactcgacacgatttcccatgtggctatggtgtttgtgctcaatccactccaataccatggtttgtccaggttactcgagacgatgtcccaagtggctactccgggattcgcactcaatccacgccaattccatggtttgtccaggttactcgatacaatgtcccatgagatgacactggtgtttgcgctcaaccaataccaactcaatggtttctccaggttactcgacacgatgtcccacgaaatactcgcgtttgagctcaatccactccagtcccatggtttgtccgggttactcgacacgatgtcccacgtgacgacactggcgtttgtgctcaaccaataccaatcccatggtttgtctgggttactcgacacgatgtcccacgtgacgacactggggtttaagcacaaattactccaatcccacggtttgtctgggttactcgacacgacgtcccatgtcaggtatggattatcactcaattgaccccaattccatttgcattctccggcttttactcgatccagtatgtgactaattcgatgtcgagcattatataaattctcacggttgtgttgtcctcaaataaagtaaagtgggaccattcttttacattacagtctactgaatactaaaatgaaaccgcttcgtgtacggtgtaacctaaatgtgtagaaatccacggggtagtggaacaccaatacgattgtgaatcaacaaattgcaagatgttaacgagaatatccattgaaggaccagccgcacttaagcgatcgcctcttccccggtaccgtggcccaaaagaacacggggtcttgatcgtgctgagttttccgttgaaatattcgcatgtcttgaagcgttctttggcctcctctagcagaaatgcgctgtccgggccgttcacatttccaaaataattttgagcatgaatggaagggaggatgagtgactttgataatcgtttgcagcagcttgaggcggactacaaagtgttgttcgaggaacaggcaaaccagcgtcaggagatccagcgcctggacaaggagatccaagcagtgcgggatgccacgtccacccagatcgagcgtgagttggaaatggcatgggccgaggcgtaccatgaactgcaagggatgttgaccgatgctcagttgacccaagttaaactggcaacattcggcatgcacaaactcacaccccatcttgcttgttgaaaatccttgcttgccatctcatggagcagcctcctgaacgactagctagcttgagacatcagatcacaaatccgctccataccatgtttcgcaaccagtcaaaatcggccgggaggcaggaacgcccattcattgtcaaagctttgcatggggggagttcatgaatttgcttggtgtgtttgccttgccataaaaataatgagagcggtaggtaatatacctgaaaaatgcatacgtattacgttcgtgctgtatgcacgttgcaatatgatcaattgatagattggtttcgatcgcatcctaaaaacatatgctggcctcagcagatgatggactggggtgatgtgtttccagatctgtacgatgttctagacattgatgagggtgctgttgatcaagaaattctgagggcgtttcgcattcaagtggtcagggttcatcccgacaagctaggtcctttggcatctgaagatgaacgaacagcagctgccctccgcacacgagttattctgcaagcgaagaacgtgttgatgaacaccgacagccgcaaggaatatgacagtgagcggcgaatgagaaggcaaggggatcagcaatccaagtctggttttagtgcgccggaggaggcatctgctggcatggcgcatgtttgggaggtctgggccaatgttgttgtagaagggtttgccaagcagtttgaggcaggacctcgaggcgagcgagtggtgcagcttttggaaacgattctgctgccagccataggggtgggcttgggtggggagagaggcttcaagctagggctgacactgtctactgttttcaataccggatgtatttctgtggtcgtgaaggcgctctctgccgaggaccaaaagttgtttttccaggctctggaagtgttgtgtaccaaaatgccttgagtaatacagttgttgagaaacgtccgcagctgaattcccctgccccactccgtggggtcccgcgattcctctttcatacttgccatttcccgacatatttgagaattcccactttatttcagaacaacataaaggagtttcttcattgatctaataataattttgacgtgaactgtcaaaatgttgcaagaagaatatgaaagagaattacgtgtgttggtggaaaaaacatcgacccccgtccgaagcctggtaggttccatcaccaatgacttaactgtaacatggtttagcttgaaatggaaaatactcgaaattcttgggtatgacgtccaggtcattcatgcatgcgaatatggttgcggtagagtttcccctgcccactttcgtcaatcacccacccctctctccccatccgtgttcatgtggttcagcctctgttaagttcaccacccatgtcatgcattcctttgtgtgtgtgtgtaagtcagtcagtctctctgtgactcgaggagtcggaaccatcccagcaagtgaagaactactacatcgatgtaaaacgcgaagatgcaattgctggattgaatggcctgttcggagtgtcacgcgaggactcaggtgcacgcctggtggagtacatgccatatcatgaccaaccaggtccctctcatctgaacatggccaccagcaagcaaatatttggatgacatgggggcgctcgtgaatggaaggaataaagagagagggaacgttacatactcagcaaaacaatgccgagacctgtattgatcaaagttgtttacactcgtttttattaaaacaattgtttagttgctaatctgtcatcggggttgtagctcagtggtagagcgtgaggttaagacaattttcttcattccttgatcatgtcgcccactaattggttcgaatctcggtacctccagtgtttttccaaagttccaccttcagttaatcaatttcctggcttcggatatcttgactgaagacgcgtccaccgtgatccacagctgtcacgatcatacgacgaattgtcacagatccaagtgttgttccgtctgtcatgtcaatgttgatgagatgctgtatccatgacgaaagtctactcgcgcacatagtggcctgctgtatggctttcaacaccttggcatttccagttttggcaggggctttgaggattttcgtctccaccacgaaaagtgtgttgatagcatgtgagaatacaagggcgtccccgttggcgcgcttgaagcagccgtcatcgaagacgtactccacagcgacgaggaacaaacgtgacgatggggatgtgtggtgtttttgtttaattaagtggcgcaatgcgttatactccaagacgcgtggatcgccggaagtagccgatgacgtccgcagtgcattgagacggctgacattccggcagtggaggcgatcaagaaactttgatgtgtcgagactgtccatgtccagcgcccttcctagttggcggactggctttgaaatgggctgacaaggttgtggcggcatcgcgtcgatgaagactcttttcttcgcgcatacgtggatgtgacaatgactccaatctcaaaagaaggctttacatatccgtctgtgtggcgtggggaaagagcgagagagcgagatagaaagatagagagagagaaagagagagagagggatagatattcgcgtgtgtatgtattttgcgttatttgtagatggaagaaaggaaagagtagggtggtgtgcgaatgacgcgctagtgaagaggatgatgaggagaataaaagaaaaatatgcattctcggggcgaggagggtcttttatgatgcccggctatcgtacctccagcaatacacaaggattgggcatgcctataaattcgacagtgttccgcatcttgcgtgtgtcctccgatacattggacagtgttccgccgtttgcgatgacttgacgcaggcgttccgaatgaatccggtatttgagtattttcccttacaagtctgatgcttgatgtgaactgtgaactgtgaactgtgggctcccctccggtcgcccccggtcgctccgctggggggaagaggtgaaaggggctctgccgcttgtttatacagcccgcaattatgcggcgtttacggatatgtcactagcataacgcccgataagatgcgtacgcgtctagttccttttaatttgcagttgaaaaagcgcatgcacatcgattccgttgacaaaatctcatacatcacatgtttatcgacccaacggatgtcatttgtttcaataatgcaatggtccatgaacgctgtgtgcaatatgtccgactgcagcaccagccttatccgaaacttcacaatgttttccgataaagtttgaaaacaagttctcgatacgctcttgctcgttcatcatttgatgacagattggttgttgactttaatttacttggcattgattgcatctgcatgagagaggcgatttgcagttttctttcctggctcaattcgaagaacgcgtccatgtttataagcgtatacaatgtgttgtatggcacttgtacagtcagagacagaatttgtgggacacccttaccggtgacccttgaacccaattgattgggtaggtcagctaaaggttttgtatcaaggtcccaatccttcgtgtccttcatcccgtatttcagcatttaagctggcccagaggataacaattgtaagctgctaactgacccaggtgggtcggttggttgagcgcccacatttgcctctccggaagctggggttttaggggggggggggcgagggaacacagaatacattcggtcgctccacgttatcagaagcagaagaaggttcagcagagttcacgtctaggttccaggttgcactatagccacattggatgcgcttttgacactgttgtgacagtgcagtacttagtggaccttgacgttatttaccaccatcttctgcttctcaaacgttttagccccttctcctttgtctgacactacttcttcttctcatggtgatacaaattgcacgcacatttccttatacccataatcaacttttcaaaataaaaggtgtcccacaatcaaatgtccctagctgtatcggaacgcaatcgcttttagcaactgttaaattggattccccgctcttccatgcatgatgcggtctcttccatgcacgacgcgtctcctcagtttgtgcaattccactgtcccgctccggtgctttttctttttgtttaagcattcaggtgtaaaaatctccaaccaatgcttggagatgcatgagtataaatgcaattgcaattatcattttaaatgggtcttgtgtagaatttactatcccgcccgacagcaattatgccccaaccacgaccaccatgtgtgttggttgtgcccccggatatggatattgcgccaaccgtcgcagaactggatatcaagggcattgcaaggcacctaacgacaagatgcatggataaaggcattgactatgtacctgtttttttgggatgtggttgtgcacgtcatgaagtggctctgtgcaaggaacttcgttcgctgggctacaaactgcacaatgagatgttcctggacgacgtcgtgacgactgcggcgatctctaacattgctgcgtacacaaagacgacgcacgctgactacgatccgcgtcctgtactggtgttctcatttactgacttaaagtcgcacatgttgaatctatcaaaaactccgcagattaaattcattgtcattggcatccatgcatctcaaaattcaaggttaaagatgaactgtatggattccattcgttctgtgcacaatgcgcacgtctgtcaatccaaggtgtcgtacatctgagtacctcaactacatgtgcaaatcgtctatttcaaacgatgatacatcaaacacggagcgtgcgcctgactccaaacggggggtgtaccacagagtgctgtgggaacaatgccgttgcgtgtgatggcatccacgttacagggcatctcggctccttcaggcaagcacttgaacttacactgtttacactgttttagttgataatcttaaattgtggtacttttgaaaaatgaacaacacctcttgcggttgtgcattgagttgacaataaaaaaaaaattcaacaactctttgttcgtctcaaaaagtttacttacaaattcacgtcgttttgatttacaccaaagcgtttccatctctacgagtagaacgactgatgttcgtaaacacagaagttttgaacacaccgtcagcgacccttctaacgccaattttctaagggcgatgtcgtacattatttccatctgatatatgtttcatcctgcaaatcgttcttgtcaaggacatgctactaattaatctgttcaggcagaataatgatttgttcatgatcatcgtccattgggcgttgtgctgtagtcgccctgcccgatttcccttccgtatccatgcgtttgtagaacgcgtcatgagtgcactgccctgaccaatcttggccgcctccatttcccgcatccgcagagagggaagacaagtacgactgctcgggaacgtattcgatcatacagataagcaccctttggttgatatattggacaagacaacggaatagaacattggggttctcaaataaagtgggcacacttataatcatcctacggtcagatgttgcttttgggcacacgttgggggtgagcagattgaagccctcttcctcatccggtagtc

SEQ ID NO: 192 - DNA, 22439 bp, unidentified
  misc_feature 1..22439: note = Fanzor polypeptide
  source 1..22439: mol_type = other DNA
aggaaaaaaattgtcatcgcgtacagctatgctaagtttgccccaggtggcaaggaaagaggtggatagggttgaggaggagactgtgtgaattagttaacaatgtgttcggtgcgttatttttgaataaaacagtttcattcataatatagtagcaacaatgtcaactgacacttctcaactcaaggacattcaaaatattgtcgcgaatgagctggaaaacatgttcttggcactagagagaatacaagaaatactaatttcttcctctgacactttttctggaacttctgttatgggtgatgcttttcttacagcgctagaaaacttatggaagaaaaatccggatgtagatgcaaaacgattggcaacatttgtcaacaaatgcaaagatttgctcgtgtataagccggtacttgaaggtacccgcgagtaaggatcggttgatgatctgggaaaaagcagttgtcctctgtaaaagaagcaagtaaaagaacctactttaaaactaccagatgttggatgtggtgtttatcacgataaatcccacacaacttgtaccgaactatatatattgtttccaacaattggaggagaaccgtatcacactaaacaagcggcggagcccctttcacctatccccccagcggagcgaccgggggcgaccggaggggagcccccacaaaggagtccgcgaggaaccgagcgggtgggcgaccggaggggagcccacaattcacatgcatgagacacactggattgattgatgggttaaccctaaaccctctcgatgggagtggtgactgacaaacaactgagatgacgacaacatggtggtaaagattcaggggaccgtgaatgaataaaaaatgtaatttaatacttggccatctcaatcgagaaacaaatggcgaagttcaatacagttgttctcaaataaagtgggacaccttataatcatccagactgcagatcgttgcttttgggcaacgttggggggtgcagcaggttgaagaggttctcgaagatattccgagtagcctctttggtaaaccgttcaaccgtctgtgtccccatatcagtatcagggggtgggggtgtcgaggagcttctcggcgcgtctcggcgaaacgcgagaggacgttctctgcaatattattggatatcgtggaacgtaaaagcatggaaaattctttcctttttcgttttaaacccttacttttacccacctgatcagaattgacccatctatgtagtgagctcttggacacgttacaaaccttcctgagactccttaaaaaatatttgtagtgaaccacggacctgtacctggtttcaggggatatcattcaaattatactgagtgtcccaaaattatttgagaacaactgtatggtcgatcctgagatctgaatttcggcgggggcccttcaaacggagtcgtgcgcataatgaaaagcaggagaatttcgctcattgtggtgcgctcctccacgccatcaaacgcaggcaccgagaatacggttttcctccccaaatgtgcggatgtggacgacattgtggacttcgtgtacccgaccattgagtgagtgagtgagtgtgtgtgagtgtgagtgagtgagtgagtgagtgtgtgagagcaacaaacgcgacaagatgtcaacacagtgcgtcaacctgtcccgggattcaatgtcattgactgtatgcagtgaatcatgtacatcacaccaatcatgcgtgctccagaatccttcgaaaaatggtttgcaggaggggcattattatacatcaataaatgcccaacgcaggccatcatggtcagcagccactatgaattgttgggggtggcagcagacactgcaacgacagaggagattcggcgagcataccggcaagcagctctgaaatggcatccggacaaatgggcaacatctcctgacagacaacgggatgctgctcaggagcgtttcaaactgttgtgcgcggcttacgaagcgttgagtgatcctgacaagcgtgaagcgtatgaccgccaacacacgcccccgttaaagccagcatcaatggaggatgcgtgggtggtgttttcccgtgttgtaatagagagtgtaaaagaggaaatgcagatatcggatgatacggcacccacggtgttgaagcttattgctagcctgttgctgccagcatccgggttctatttcggtgggctgtctggggtgtttgccagcaacgccctgagcattttgttgatcaaccctcatggattgaccaacgtctggcgcaacatgacacccgagcagaagagggaatttcaggcagcagtgttctgcctggcaaggcagaggagtgaggggacgtagaggttgttttcatggctcgagggagacgggcaaaactgtggaaaactgtcgcatccacaccgtccgtccggcaaaaaatcagccaccaaacggatcccattggaacgctacaattcatacgcgaggcgttgcagtttggcgggaagacacggaaattcacatggcatattggctactacgacccggcccacgtctcactcctgacacgttacactcagaccggtcaatggggcagagtaggaatatctcatggcgcccatctttgtcagtaccagcccatcccggaaagcccagatcgcggatccgcgtatggatcttaaacacgttggcttgtgtcaatgagatgctaccccaaccgaagcacacgccgtcctatactccgcaatatgtttaggagtcatagcaaaaacgtcatcaggcgagaacgacaacaacttttgcctgagacggtcctcagacgcatgacgggcagtagcttcattgtcggcacggtcctcagcctcacgccgggaagtagtttcattgtcggcacggtcctcagcctcacgccgggcagtagttttattgtcggcacggtcctcagcctcacgccgggcagtagttttattgtcggcacggtcctcagcctcacgccgggcagtagttttattgtcggcacggtcctcagcctcacgccgggcagtagtttcattgtcggcacgacggtggaagtatacagtcagagacagaatttgtgggacacccttaccggtgacccttgaacccaattgattgggtaggtcagctaaaggttttgtatcaaggtcccaatccttcgtgtccttcatcccgtatttcagcatttaagctggcccagaggataacaattgtaagcttctaactgacccaggtgggtcggttggttgagcgcccacatttgcctctccagaagctggggttttagggggggggggcgagggaacacagaatacatccggtcgctccacgttgtcagaagcagaagaaggttcttggcagcgttcacgtctaggttccaggttgcactatagccacattggatgcgcttttgacactgttgtgacagtgcagtacttagtggaccttgacgttatttaccaccatcttctgcttctcaaacgttttagccccttctcctttgtctgacactacttcttcttctcatggtgatacaatattgcacgcacatttccttatacccataatcaacttttcaaaataaaaggtgtcccacaatcaaatgtccctagctgtatgaaaagcgcaatggttgttgcaaccgctataataagggttgggtacatgttgttgacctcttgcgaggaaaagaaaggcaagcaatcgctttccatatatgtgggggaaattatgtggcacagtgaacgcgcaaatgcacttcctttatcaatgtctttaccgatcaacaaatgtttgaagtgttgaacccgctcgactggacaatacaatgccagcagatgtaactgaggtatcccctacacattgtcgcccctttgtatgtcagagacccacccaaggaacgaggcagaggcacagcctcttccagaaaatagggattggttgatgattcttattttttgttgaaataattgttgttcccaagatggagagtcttttcagaggtgttcatgtgaacacgtttaaaatagggattggttgatgattcttattttttgttgaaataattgttgttccaagatggagagtcttttcagaggtgttcatgtgaacacgtttaagatagggattggttgatgattcttattttttgttgaaataattgttgttcccaagatggagagtcttttcagaggtgttcatgtgaacacgttttaaaataggattggttgatgattcttattttttgttgaaataattgttgttccagagatggagagtcttttcataggtgttcatgtgaacacgtttaaaatagggattggttgatgattcttattttttgttgaaataattgttgttcccaagatggagagtcttttcataggtgttcatgtgaacacgtttaaaatagggattggttgatgattcttattttttgttgaaataagccgagcgaaatagccgcgcgcggcattcgctattctgcttacagttgttctcaaataaagtgggacaccataaatgtactccttccttctttccgccgttttcatgtggaggcagatggacaatgaggaggaggcgacagctttccgccgtttcatgtggaggcagatggacaatgaaggaggaggcgacaagctttccccgccgtttttcatgtggagggcagaaaatggaaaatgaagaggaggcggacagcctctttttcccgccgttttccatgtggagggcaagatgggaccatgaggagctttctgagcaaagccgccatgtccatgtgtgtgtgcgggggggtctttggagagccttattgcggtctgatatggacaaggagtgtacctgcgaggaggcgggaggggggggggggtccatccgcccccggtctcttacctctcttgtgagaatgactatggacggacaataattaaactcgtgaacaaatcaaaacacttgactgaatgtcataaaaggaaacatcgataactaaccaccaccaaaactactcgcaatatacccgacaaaatcacaatcgagcaaactcttactgaaagtatacaacattgctggtagccatgacactttgggcattccgttagatcccatctgcgatcgccgctaagaaatctcattcagccatggcgtttcggcgtcgtgtgacgacatggtatcttggatcacacctcgctcgccagttccatcgttgggcacacctaccgaactacctacatgtagacggaggaattgaagtgtgcaccagtgtgcactgacacggagacggaaacaacgcccagtggttatcctcaattgatgactagtctcgcggacaataggatcatcacattgcgatcctacctgccatttccaaggcatgtagtactggttggacgcccattacttcccgttataccgttgattggtttgttacgtagtcgattactagtccccttcccctcgcacaagatttttaagcagcctgttcattgagtggatgagttcagttatcctttgtgtgagatacttgatggaattcgcgccaaatcattgatgggaacattgtacagaagtttatagccgtcccagtggtttgcatgagagctggtgctgctcggcgcgcaacgatccagcgacaagtatccgtgcaagtacatcgagaacaagagcatatccagcgccaaacgcgcctctagcatcacagaatccccaggatcgtttgtcattgctgtcaaagtgattgctatggtcggccgaataagtacttatttcgaacacaaatatgtgtattttttttaagctgtatcgaacaaatcaattgggttcaagggtcaccggtaaacaacggttgtcccacatcaattctgatctcaggactggtaatttaagttgacatcgacggagaattgacgtggatcgattgtgatgatgaggcattcggtgctctcctcagcgtgtggtaacagaaggcaggaagtcatagctttggtaaattgcgcgtaacggaaatgaacaagtattttgaggaagatcgacatgcggtcttcgcggaaacgtaatgcattcatgacatgccctcaatacttcatccacaacatgtaggacaccaagtataacacatgcgtcacacaaacagagagtcgcagctaaacagcccctcaatgggcagtcacaaaaaagacaaacacttgtttttttatgagctgaatgcaattagaaaatcatgtatttgctaaccaccacacccacacacctaccaaccccccacccgccagacacacactactccaccccccgttgccatagaggcacaaccaccacccctccgcccccccgggcaataatccaaccttttaagccatatattaacgccgccacgcgttcccagatccttacatatgcattccgatagctaaacaagacgttgcacaactatgtatgttgacgatgttagaataggatggtgcgaagatcatccggtcaaaaggatcatgaacccgccaacaagcaatcaaggacggaagatgtatcacgggataatctcgatgtgataacatcacatcagaatatgtaccgtattaatgatacgattgagttattgcgcgcattgcttaagcacatggagcatgccaccgaatccagcaggaaacgcaaattagcttgttgcatagccaacctaaacgcacggcgaccgctcccctgcgtgcgctgcctcctcaaagtctcaagtagcgccagggctctggtgggaagtttttaacacacccaagtcagcgaccattcttaacgccaattttctatcggcgatgtcgtacatttatttccatctgatatatgtttcattttactgttccgccgactgtagaattgtgcatcaacaaagtgtgtcttcgcttcccccctcccaagcgtttcagtgaaagtcccaagcgtttcagtcagaccggtcaataatgttacagtatattgaataaattcaagcgagtcatcaaatgaatccaatacatccaatctgcccgcgctcccattctgaaccaatctgagagttgtcatgccgaaaacagtgacgaattacattattacacagtcagcatcatccttgtccattctcacacggcggcacttcttgctgatcactgaaataacattcctaatggtgacatcatcattcctgctggtcttggtggagacatgatcccgagttggaatataaaggaatatcttccttgatattgaaggtcaaaatgttccaagaagaatatgaacgagaattacgtgtgttgatggaaaaaaaacacgaaacccgtccgaagcctgagcctaatagatgccatcaccaatgacttaactgtgacatggttttgctggaatggaaagttctcaaaattattggttatgaagtccaaatcattcatgtatgcgagaaaggttgttgtagagttgtgtcttcctctgatatcggaagcttctcaagaagtgcttgtggcaaaaccaatcaatgaaatacccaatgttgcccatccagtaagagatgttgcgttctgaaacaatcccgacacaagagcacataatgcaataaacagtgccaagaagcggatgtatctatctggactcttcatcttggaggtgccgctcctcaaatcgttttgcaacctccacgtccccccatcagttccttgctgaaaaacgtgacaaaatgggcgttcctgcctcccggccgattttgactggttgcgaaacatggtatggagcggatttgtgattccttcgtgctgatgtctcaagctagcgagtcgttcaggaggctctaaatcctgattagaatttttaaaaaaatcggccgggaggcaggaacgcccattaaaaagcaatcccacaccccctctcacattcagtaacccacagggctcctccgaggattcagtgctgccttgacaaaccctgcgaggagatgtgctgcgggggtgggtgattgtgtgacatgtatgtatttaaaaaaagcattatcacaataccggctgatccaaatgaaatgctgataccccaaccgaggcacacgccgtcatatactccgcagcgtgttcaggagtcatagcagcgacgtcatcaggcgataacgacaacaactcttgcctgagacttggccttagcctccgcagcacgggcctcagcctcacgacgggcagtagcttccgcacaacgggcagtagcttcaattgtccagcacgggtcctcagcctcacgacgggcagtagattcattgtcagcacgggcctcagcctcacgacggcagtatgcatgtcagcacgggcctcagcctcacgacgggcagtatatttcattgtcagcacgggcctcagcctcacgacgggcagtagcttcattgtcagcacggggccttagcacgataggcctcgtcacgataggcctcgtcacgacggtggaggtatatgaaaagagcaatgtttgttgcaaccgctataataagggttgggtacatgttgttgaccatcatcctgcgaggaaaagaaaggcaagcaatcgctttccatgtatgtgggggaaattatgtggcacagtgaacgcgcaaatgcacttcctttatcaatcaatgtcttttaccgatcatcaaatgtttgaagtgttgaacccgctcgactgggacaatacaatgccagcagatgtaactgaggtatcccctacacatgcccctttgtatgtcagagacccacccaaggaacgaggcagaggcacagcctcttccagaaaatagggattgattgatgattcttattttttgttgaaataattgttgttccagagatggagagtcttttcataggtgttcatgtgaacacgtttactgttccgccgactgtagacgtgagcatgatggatgtagtgaatgcacttacatctgctagattggatggtatgttatccagaatggatacaagaacatctatgttggagctggtgatttgtctgccaccaagtgacccacattcgccactacggtatcattcttcgtacgaacttttaccgtctcgtaccatcgacttctacagtcggcggaacagtaaaatgaaacatatatcagatggaaataaatgtacgacatcgccgatagaaaattggcgttaagaatggtcgctgacttgggtgtgttaaaaacttctgtgtttacgaacatcagtcgttctactctgtggagatggaaacgctttggtgtaaatcgaaaacgacgtgaatttgtaagcaaactttttgagacgaacaaaagagttgttgaatttttttttattgtcaactcaatgcacaaccgcaagaggtgttgttgcattttccaaaagtactcacaatttaagattatcaactaaaacagtgtatcgtttcataaaactcattggttttacaagaaaaaggagcaaactccgtggacagtgtaaaggggacttagttccacttgtcactgaattttgtagtagatacaaggatacaatcaatgctggaaaattttagtatcagttgacgaatgtggttttagtgagcgtctcaagccacattatgggtattcccctgtaggaaaacctgttatcgttaaaactactggtgggtgggtacaccatagtttgttgatggcagttttttcagatggtaggaaggagttcgttgtgaagaaaggatctgtgaagaagacggacttcgctgcatttattgactctttgagtttgtgcaataattcagtagtaataatggacaacgccagtatccataagaacttggtcctcagaagccccgtaaatatttgttacactcctccttacagtccagaattcaatgctattgagctgtgcttcgctaaggtgaagaaggactttcgtcgattgaactatataccaaacgatacaaagacgcacgtgtctgatatgatttccttagcatttagcaacctcactgataaaatcattatgggttgttttgaccacgtatggaacacgtatgtgatgtttgtataaagagttctgtgatgtataaattatgtaagatggcaacgaaacctccgacagtcgcgaaattgaaggagctactaaaattggccgaagtagcatactcatcaaaggacaagaaggacgatattgtccgtttatgcgaagacaatggtctcatcgccagaccccctccagaatacaagacggtggaaaagatgtgtgtcgtgaaatgcgccctgaagaaggcaatgagtcttgacgatgaagaattcggtaagtttagggagcatgtggaccagctcgtcaatgtggtgagccgcatgttacggcggtccagtcttgtgctgactttccacatcacgagtctattagagaaaggtctggatattccagacctgtacaacatgaaagatacctactggaaggattggctccgtatcggggtagacggaatcttccctgatgaggaaagcaagatatcgtacgaagctgtgaaggactccatcggcgatgtaattggtaatgacgacgctgactacatcaagtcttatccgatctatttcgatcaggtattgaactatgcaggtcacacattgagcactgtcgtgtcaaacaacgcatgggttcctttgataccacgtctggccagactcacttccaccactttaaataaattaaatgccccgaagacgctggacacatcgaagatcattcggggatacgacgtgatgcaggctattcagcaagaagtccaaaacatggagggatggccagagtctgttcaagagttcgtcaatgaagttagggagatgctgagtgttccagatggaagtcgagtttatgataactatggcaaagacatggactttccgaccatggtccggtttaattattggatacagacacggttggaggatatggatgcacgtcgtatccgattgatgcccatcttcaatgtccaacgggtgcatgttcgccttgacctgaagaccctcgtaaacctgttcaggcacatgttccccaatgaccagaacatcgttgagctttccaagtgggaacatgtaaagaatcccgacagcttcatgttgtcccagaggccagcacagaagaagaaaaaatcatgtggtcctggtgaatgggatgcatacaagtcggtcatgaagcagtacgatgatgatgttaaggatatcaaggctactgacgagtacatacatgcaaagggtttgtatgacacgcttgtgaacgcccgaaaaacagtcgcaggttccttcttcaagaaaccacctgtcaagaatgggtgggttttcgactgcagcatctgtactgacggagtctccttgagcatgcagtacagcaagacagtacaggtccttgtctcagatctgaagaagacctgtaagaaccctcgtaaagaagaaggtatcaagatcgcagaaaaatacgacggctcacttaaaacgatattgcccgatatgggtatcgtcgtcctgggtgtggacccaggacggagcaacatcgctacggtaacgtatttggcagacgataaaaataagacatggaagctgacacgtggtgcattttaccacaattcgggtatcaagaagcagacaaggcagaaggaactgcgttttgctgacatgattcctatgtgggagtctctgcgtgaaaatggagcagctttgagtacatcgaggacggataagatctccgcgtacttgtcaaattacgctaagttttctgacgagtggtggagattggctttgcgacgccgagaatcccgtgacaacttgcagcgttacatcggaaaacgaaaggtaaaagactctttctgggcgggtatcaagcggtgcatgatgaaagaacttcctgatatgaaggtttgcgtggcctacggatctgccatcacgaaactgaagcctactggaccgggagaagttgcagttcccactggggccatgttcgcatcgtgtaaaagaattttcaaagaggacgtttctgtgacagatgagttcaaaacgactcttatgtcttgggagacgggtaaagaaaaagaacgtgtttacaagatcccaagtgtttgttcagcatacgtgaagcttaggttgggtggtgaacgttttggtcacacgaaatcgaaaacgatgccaaaggtcgctgattgcgaccacttaggggtaaggttgtacaataaacgtaaaggcgcacaagagaagcacaggaggggtggcttcgccacttcccttgtcgattctcaaaaatcgatcgagcggtacccagaggtacgaggactgcgattctctccagaaacatgcatttactcggaccgggatcgctcttctgctctcacaatcgcaaggctgcactgcatggaattgatgggtctaggacgacctcttccatttgcccacagcagctctgttgttgttgatgaataaaaactcgtattgttgtagacaccactcggtccccctccggtggtcgcgacaacattaggttacaccgcaaggtgtaccgtacactcccaaaagcggtttcattttagtattccgtcgagtgtagccaggtggtaccgttcctcgtcattgtacagttcatactgtagttgcatccacaacacgtctgtggtttgatgcatacaaatctgtagtgcacaagtgtggtttccaatcgccatcatattgattgctataggaattgttatcggtcggatttttcctacaactgacaagctagctttccatgtccatgcatcaacatctcctatattgatccgcacccactttatatgttggatccccatgccagccaatgtgatgttgcgcaccacatcaccctctctaggcagttcgtattgtagatatgactccccattgctttcccttcggagaaatttgtcgcagctcaagcatacctggtaggacaccaataggtgtggccgcttacccgctaatagcatcattaatgcctggtattcattcatacacaatgtttatacacaatattccgaagatgtatggcaactctttcaggacgtttctgaactgctggatcgggggaaatggaatgaaggccggcattcgactaacatacaggtgtcggtggagccttacagtagttctcaaataaagtgggacacaccttataatcatccagactgcagatcgttgcttttgggcaacgttgaggatttttttaaatttctaatcaggatttagagcctcttggtccaagtggccaagacaaatacaaattagactatagttgtaataccacccattggtattgaacgactcgctaccttgagacataagcaccaaggaatcacaaatccgctccataccatgtttcgcaaccagtcaaaatcggccgggaggcaggaacgcccattacttgtgaaaaataaacatggtatcattctcatcagacagggttcgatttctaccccaggatacagagatggagagtcttttcagatgtgttcatgtgaacacgtttaaaatagggattgatgtgagcctccggcattgtgtacaacaatcgaccgtctgtccaagttgtacatagagaattggaatttattcaatatactgtaacattattgaccggtctgactgtaacttgtgttgacattgttttaatttatcactttgtatgtcttttgccggagtggtggtacactacagtacatggcccagagattgagattgcgtaacacacgacttaagaaacaatcatcagaatttataaacaatgattgacaattctcaactacttatctgcatctctaccttcgctattatttacatggctcgactgaagattgagcttgagactgagcgcgttcgaaagaaggcagatgctgctcgagtgaatagtatggagattgagcttgagaatgctcgagtgaatagtatggagattgagcttgagaatgctcgactgaagattgagcttgagactgagcgcgttcgaaagaaggcagatgctgctcgagtgaatagtatggagattgagcttgagactgagcgcgcagaagcgcttgagaagctactgaggtacgatctgtcaagcatgactatcgagcaatggaattccctgaacgataatgacaggcgtctcaatgaggatctttgcaaacaatacggaatccccctccccaacatgcaggagtcgtcctacccaggttcaaccgaacaggatggcgaacgaatctacgacaagtgttccatgtgcgcctcgaaaaacgagtgtaaacaacgcaaaatccatacagattattacagccatacaaactcgaatctctctctgtagaattcattgtcggggccattcattaatattcagtgcacggatgcggtggcggattctcgtccctcatcgcctcgcctcgtatcgtacgaaatgtcatgattaccaaagcattcgataccaagacggggtcatcaatcatttcaatcatattcggtatcgggttggctgcactgttcagacagagttgcaagggggacaggtgtatcactaaactcaacaactgaggacatacacccgcctgctactgctactgcttgcaagttgcattattgagtataaaaacatcatgcatcatgattgggataagtaatcaaacatgaacgatcactcagcgatcacgatcactcctcattaccttcgtcgtcgttgcatcaaacgaacaccattaaaagatgttggcactgtcgactacgatgcaaagcttcaaaaggagattgaatccatccatgaccatttcatgcacaagaaagaagtacttgaacgcagaatattaaaattggagcaggacagcgaacagcaaatcaaattcgcaacccagcggaacactattgccaaaatggaaggcaaagttgatttggtgcaggtcgctgaaaactatcgtcgtgttgaagcgatcgaggatgagtgctgggcttcgaaagtcaccttgaaagcgcctgtacaagtcgaggaggtgtcgtcacacggggtcgcccctccttgaagcacaagtcgtcgagccagagccacacgttcatttgtgaaatgataaaccgcgcgaagaacggaaaaaacgcccgcaaccatcataaacgtgaccctcgctcatgtgatcatgaacggattcgttctcgccaatacagtcaacggaagcttcgtgtacggcacaccttgcgtgaatccatgtccgtacgagctttacatttgaagagaaaatggaaattcaagcttacaaataatgaacatgtcaggaaatacactcggacaattacttttctgtcaagtgagctcttagttcctctggaatcggcacgcccctctccctgagtgtaacggggttaattttaaaccatttcattatattctctatagagtctgtgttgacatgcattataacttgggttagtattgacatggcgccatattttttgtatagttcttgctgatctgtatctacgtatgagatcacatatgtcttgggaagatagcaacatattggggtttctgctcaactcataccagtcccatggtttatctgggttggtttgtataatctcccacgtgatgttggggttttcgctcattccaccccaattccacggtttgtctgggttggtttcgataatatccatcgttatgacagggtttttgctgatccagttccagttccatggtttatctggattggcttcgatcatttcccacgtgatgtagggttttctgctgataaaataccagtcccatggtatatctggattggcttgtataatatcccatgtgatactggggtttttactgatcaaaaaccagtcccatggtttatctgggttggcttgtataatatcccatgtgatactggggtttttactgataaaaaaccagtcccatggtttatctgggttggtttgtataatatctagtgtgatgttcgggtgtgaactcaatccaccccattcccacggtttgtctgggtttgtaatgacaatatcccatttaatgcatgggtttctgctgatccaataccaattccacggtttgtcggggttggcttcgatcatttcccacgtgatgtagggttttctgctgatataataccagtcccatggtttatctgggttggcttgtataatttcccatgtgatgttggggtttatgctcaacccaccccaatcccaaggtttactgggggttgtaatgacaatatcaatcgttattgtagggtttctgctgatataataccagtcccatggtttatctgggttggcttgtataatctcccatgtgatgttggggtttctgctgaaccagttccaatcccatggtttgttgggattggattcgatgatatcccatgtgatattggggtttgagctcaataaactccaataccacttgtattccatacatttgacccgtcttgagatgtggttatttatttccactgaaatcattattatagatagtaatagatagtaatagatagtaatagatagtaatagatagtaatagatagtaatagatagtaatagatagtaatagatccacaagtatctttatgctccgattattttatgatgatgcatgcatgggcggcttgtgtgctcttgcgcgtgcggggaaaacacatacacgcggacttttggggactcatcatgtaacgtgcgggttcgaggtgcattcacgacagcgtggatgagtgtatacctgcactggacggtcaacagattgaaacatccgggtattagcccagaaaacaacagaacgtcagtggacatcgtgagaggaagtgactctcgcgcggttggtcaacttttcaaaagcctcaaaagacaggggtatattctaaaccctggctacagttgttctcaaataaagtgggacactttataatcatccagactgcagatcgttgcttttgggcaacgttggggggtgcagaaggttgaagaggttctcgaagatattccgagtagcctctttggtaaaccgttcaaccgtctgtgtccccatatcagtatcagggggtgggggtggggttgtcgaggaacttctcggcgcgtctcggcgaaacgcgagaggacgctctctcccaaagacttggtgaagtgtaagcatcaggatgtttctggaagcgttcacatcgcggttccaagtcttcccgcagtgaagcataccaccgctctgttggcgtggcgctccgctttgactgcttttgcagtggagaatcttatgaatccgcttgcgtccttctgtacattcccaacctgtaccgtcttgcttcttacgatgagtgagtgccaccatgttgcaaaggtggttctcacagcagctgcatcgttgagatgttctgaactcatcgatgtcctccatgatgacgttttctcggctacgaagctcgaaacgaatagcttggagagggccacaagtccgcctagagattggcgtcgcccccagacctttccaatcaccaaacccgacgagtaccttagcgctcttctttctcggagctacgaagtcagcaatctcaacaataagtttctgtttcttgcagtaccttcgaaagcggaggtttcggtaccccctggaagcacgatgggcaagaaggattggggcggtacccatgtagaatctggcgtacgcaccaatctgttcagaactcgaagagtctctatccggaatgataccaccgacgatatcagccgtctcgaggttccaaacgtcagtttgacgctgggacttgaagatcagacccttgcgataatatttcgccgagctgtacgatctggtacctccgttgagtcctgttacagtcacgatatcagtaacacccgggtctaccgcagccacgaccacattgtcaaggaaggatacaatgccaccctcgtctgttgtcacgtactcatgcgcccgcgtagagaacgcgtctgcaggcatcgaacatgtcagacacgtaggcttattcatcaagatgctgactgcaaagccgtctgtcacaatgcggtaaccgaacttccgagaaactgtctccactttcttgaggtttgcgaagcgctcccatattccttgatggtttttggaagcaacgtctgccttgcatgaattaaagtggcactcgttgaccatatagaaaaaggccattttcgaaatcggaatgtgcgacagagtgaatccagatttgtaaggcaacaacgagaatgtgcgatgtttttcgtttttcgtttttcgtttttcgtttttcttcgatggtctccgacaatatcttgtggtacagaggcagggtcatgtgagcccgagacgcaaaagtgtttccggatggtaaaggtagaacccccctgagacagaatgccacttcgcgtgcaaagaagcgtttcgcgttatctgcgtccaccctaaggttcttcgaggagagccaagcttcgctcaacttttcaagcctctcttgaagtttagtcaacctaacacgcaaaggggatccttctggttccttcctaccgaccctcttcttcgcaagagcaactgcactttttgccgatcgaagtctagatgttggaagcttggttggcagctttgttgtatgagggctcatcttgaagatgacgtcgagattctttgtagggcacttgatcaatgcagccacgatgtccgaccgcaggcgctttgcaatctgtgggtacttccacttcaagtaagtcgttatgcgtcgctcaaggttggtccaaagatggttagaggccattgtggccatgagaatagacaggtctgcaatgatctggttcttcactctcccccgaatgtcaactttggattgccccggctctcttaacaagtcgaacagaagccgactactctcgaagtcttctccaagagtcgaccccttacatttgttggtactgactgcaataaggcaccggtagaagaagttgtgatttacaggaaggacagcgataccattctcaaaaagacgagcaatgtggaaatttgcgaaaatgtaaccctctccaagcaacttgttcatgtccagtaccagtgtgtctatcttgttacgaagccaatcatggggaataaaggtactcaatttcatcttgaccacacaaatcgctcgcccaggtgcacactccccgtcttcctccccttcataatcgacaagttctgcaacgtcatcatgttggtcagcctcatgtaccaacgatgatgactcgccgatcccattctccatcacaaattgtaccccgaaaacgttttgatgtaatctggatctgcagacaggctctctcgaacattcctaacccaatctctcgtattaatcatatattttgacaagtctttatacctccacatttctagaacacaacatatttgcattaagtaatcgaaattacaggttgacgtcaatggacatgatgccctgtagtctctcttcatgcttccaaatatttgttcaatcgcattagctctggggcaataaggaggggtgtacaaaagcttccaccctttgcattcggatatatccttgatttctgaagaatggtgaaaccgattatccatgacgatcgtggttttctttgggatgaccaaagttttaaagaatttaatgaaatcttcttttttacaattgtgctccaataactgataatctattattccctgagatgaaatagcgagtaataaagtgaacttcacacgacggaggttactcattgtcttcgtagttaatcgagaaccgatcttgctgtatccatatttgctgtgttctccagcgtaaaatcctgcttcgtcgatacaaacaacgttagagctttctctgtacttgtcacaaaacatttctacattttcttttgaatgtccgtagagaactgtgggaaacgccttcttcctagaaaatccacattgttttatgtgtctcgatgcagcactgatcgataatctcacattacaactcttgcaaattataccgaccaaatccttgcatgttatgaaggggttctctgcaatattattggatatcgtggaacgtaaaagcatggacaattctttcctttttcgttttaaacgcttacttttaccaacctgatcagcattgacccatctatgtagtgagctcttggacacgttgtatatattacaaaccttcctgagactcctcaaaaaatatttgtagtgaaccacggacctgtacctggtttcaagggatatcattcaaattatactgagtgtcccaaaattatttgagaacaactgtatacaccgtaaggtgtgccgtacacgaagtggtttcagtttagtattccgttgactgtgtatcaccgcttatgcactctgctacatgggtccaaaataggcatcctgcatcatgccactggtgcttgcaaacatgggcttagatcaagcctggatatcctgattgaagcaggtaggtgtgaaggtcgtagttgggggtgatgccgatgcgcatgattgtggtgccaagtgcgcccttcacgacccccagcaggcggccatgcttgtcgaccactggtccgcctgaaaacccgtcatctgcgtgtgcagtgatggccactgatccaggcatggtgctggatagtgatcccttggagcaactgggcttgttctctgtgcctgtgtaccccagtgcgtacactgacgccatgatttcaagatcagtggaccaaaggctcgtggcagagcgggaacccttcaacagaatgaggtcaggcacattgcctggaggtgagggggccacgacctccaaatcctcctcaaagccgtcggttgggtaccttgccttaaaggccacagccggtgatgtactacctagggtcttgccgcagaacccctgcatgtgtcctgctgccacgatgacttccccatgcatgaagccgctgaactgaccaactaggattccgtcctgactgaatccaatcagcttcactaccaatggtgacaccttggcatacactgcctggtctagcatctccactgcagcaccgacgtccaccgggtcaacaccatcatccaagtttatccgcaacctggtcatgttacagccagaccggtcaataatgttacagtatattgaatcaattccaattctctatgtacaacttggacagacggtcgattgttgtacacatttacacattgctgaaaagtttgaggagagtggctatacttgcgaatgtaagccacgggtgccgccgccgtccttgatgagatgagagaggtctccctgtgagtggctcgactcgacgtgtgccgctgccgtccttgatgagagtgtgactgactcgacagtgctttgtttctgttcctgcttgaccctaacctgttccaacctccggtggtcgcgacaacatttattattgattcttaatgatgttttcgatgtaaaaacaaagtctcagattatgcaaacggtttgccaaatgcaatgccatttcgaagatcgattggttagcatggtatgcatcatgtttcatcaaacaacttacaacgcaatcatgcctatttgatatggcaaacatcaatggaataccatgttgataacatggatccgcaccatcattgagcaaccgtttaactgccattatgtctcctagtccgcattgaagcacaagttcaaaatttagtttcttctgggtacagaatttttgagatttacaaatatgtgtgtgaatatctttcaaataattagctatgaattggttctttttcatctgagctaggaataatgcaagatcaatcatttctgcaacatctggctcttggtagattgtcaggtccgttgtatacgaagaccaaaaacatacaacctttaaaactatgttctggtggtcgtagaatgctgcgtaacataatgcaccacagcctccaacacggtcgaatggttcagcacccgcatggaataatgaatcgacagtgtccaagtttcccaatatgctttgcgcacatagttcatattggagtttcatattattgggagacattctaattacaagacatcggatttctttaagattaaatgggcgttcctgcctcccggccgattttgactggttgcgaaacatggtatgcagcggatttgtgattccttggtgctgatgtctcaagctagcgagtcgttcaggaggctctaaatcctgattagaaatttaaaaaaaatcggccgggaagcaggaacgcccattattagcgatgggtgcgtagaaagaacaggctttgcgttgttgcaatagattcaaatctttgataaatcacatggcaacttttgacaagaaaaatagttacaccgcaaggtgtgccgtacacgaagcggtttcatttaagtattccgttgactgtaggggtccagatacaaagggaagggaaggggcccacttgcgagtacctgatggaatgcaaccattccaattcgtatccacaacgg

SEQ ID NO: 193 - DNA, 22436 bp, unidentified
  source 1..22436: mol_type = other DNA
  misc_feature 1..22436: note = Fanzor polypeptide
gcggtacccagaggtacgaggactgcgattctctccagaaacatgcatttactcggaccgggatcgctcttctgctctcacaatcgcaaggctgcactgcatggaattgatgggtctaggacgacctcttccatttgcccacagcagctctgttgttgttgatgaataaaaactcgtattgttgtagacaccactcggtccccctccggtggtcgcgacaacattaggttacaccgcaaggtgtgccgtacacgaagctgtagttacgccacgcctgggttggatatcaggactcgatacgtgatggagaaaacaggagtgctccccagtgacctgggcaagtacagcactgagggttttgcgcgcgacgcagcagggctacgccgccagttagggccgggtttcagttttgaaacactggagggcgaggtgttgtccagcgctgtattggaccacctgaagtggttgttgtcccacgacacagaggtggctgtgttgttgttctgcggccatggcatgtggcaggggtcgccgcagcacggtagtctcgtgtgttcattcaagcagctggtcccagctgaggcaattgagtgcgtggcggagaagttcaaaggcacatttgtgaggttgctgaacatgtgcgatgccgaagagttgcaacagttgaaggatgggcaaggtaccagggacgcagtaaggctgcgaggtgctcagatgcaagggggggcaggcgcgccaagcacctactacggcatgacagtggcagccacgcagcagtttggcaagaccactggtaacagccggggcagcaagttcggtgtcgcactggggcgcatgtttgatcaggaggtggttgtgacgtacgatgggttcgagacggcattggacaagtattggagtggggcgcaagtacggatgacgcacgctttccggggtgtgttcgggacgcccgctctcccggtgggttcttgttgcatcactaatgatgatgcgggttctgagtctgagtctgatgtggagttctgagtctgaggtaatgggcgttcctgcctcccggcctattttgactggttgagaaacatggtatggagcgggtttgtgattcctcggtgctgatgtctcaagctagcgagtcattccggatgctctaaatcctgattagaaattttaaaaaatcggccgggaggaagtggccgggaggatcgttactgttggatgtaaacctttctagttttaatgcgcaacactgacatgactacgttatgccgtgcagaatgacagccaaggggtgcttctcgtacaagaatgccaccgtcaacggcttcaacatcaccaatcagctccaggtccgagtggaggcgatcgacaacaacgttgcgaagatctataccacagatgagaacggcaacccgatgccgatgcctgtcgacgtctcattgcgcaccggagaggatgaacgtcccagtctacaacaatgagttcctcatcgtgtggattgaaagctacgtgctggctgtcggtggcgtcgacattatgtggctccacaaccagaagaagcaggccttctctgatagcaaaggcataacggctttctcactgtaaagcgtggtgtatccagtgccatgcagccgtaaagcgtggtgtatccagtgccatgcagacgtaaaataacctcgcatcaggcggcagcacatgtgccgctatggccctcccaaacaaaaaataacgaaagtaacaaaattcagggaaacctatcattctacatcacgtttgttctcatcctcaagcaaccaacctcaaaactgcttttcaagtgatatatgtcgccaacacttggatgagaaccaccgtaccacatttaacaagtggcggagcccctttcacctattccccacagcggagcgaccgggggcgaccggaggggagcccccacaaaggagtcctcgaggaaccgagcgggtgggcgaccggaggggagcccacaattcacatcaaacagcagacacacacacgcgacgccgccgcctccatctcggacatggacagcatcagcaaacctggtctcttcgcctcatcatcatcgtgacttggtctcttcccctcccctctaagatttcgccagccaatccgatcaaaacaatatcagaaaagtgataaaagagagttgcttcggttcccaacaggcgctctgatagtatgttagttgcgtgtccatgtcaacgttgttgttagttgctgtatcaaatgtaacacgtttaaaatagggattgatgtgagcctccggtagtcttaagtatttattttttgttgaaataattgttgttcccgggaggagaactgattacccagaggttccacaaatccacagccaagctctcggctatggtcttacgattgggggcaacttagtactgatcagacccgcaccccgcctgtgtacagcgaccttctggggaggatcgaccccccccgtttgagtgttcttttgggccacggtaccggggaagaggcgatcgcttaattgcggatggctggtcctctcgatagtaccgacaaaaggacgataccgagtctgccgtgatctaaaaaagaaccacgatattccagcgggggcgaacggaggggagcccatagtggaacatcaaccagcagacacactactgggtgcacaagcagacacactactgggtgcacaagcagacacactactgggtgcacaagcagacacactactgggtgcacaagcagacacactactgggtgcacaagcagacacacgcacgtgaagaagagtgataggcgaacggaggaaacatgtcggatagatcggataacgcacgcactttatcacgacacataacgcatcctcacacacgcgtcgcggcggatgctgtcgagatcatgcccaccaaacactcactctcactcattctcacgcacgcactctatcacgacacaaacggtggatttcgcatcatactcggtgtccatcctgagtagaacgactgatgttcgtaaacacagaagtttttaacacattttactgttccgcagactgtaggcaccgcgtgtcagcttctatgtattgtttttatgataacagattcctttgtattcgagtaaaaaatatgtgcattgaaagtacaaacccctatatataaaatgatccaattgtctgaaatctatgcgaaatcacagtcgacatcaaacatcttatatagcgataatgcacccattaaaggagtgcgatcgcgaccaggtgttaaagaagcaccatcgatgtcatttgaacaagatacagtcacaggaatgttcaatgaatcaagtaatgtcttaggatttgctgcaggagcatatactacgctcattgcatcatcttccaatttacaagccaatacgcaaatcacaacatcttcaaatatcgtgcctctcaacgacaatgtctcacaattaggaacagtaacaaagaagttcgcaaaactgtatgcaacagatatctatgtaacatctgctacatttaacacactcggaggaacggctatctcaagtatcgtcacttccacaagtagcaatgtcgcagccagttctgcagcggtcaaatcagcatacgatagtgccgtctcagcttccaatcagacgtacggcatcggcgcgctcgatagtaatggtgatatccttctcagtggcaacttgcgcatctccgaaactgccaatatatacaaaggtacagagttatataaaccatggggaaagccggaaatgcccattttccccaagaattcgaaaatgagtaatttcttcattatcatatcaccgacaggtagcattatcacctgtggaggtaacaacagcggccaactaggaaataacacgacatcagaaggtgcgacgacaacattacaaaccatatcgagtttcggatctctgaatcgtaaaacgatcgtggccatttcgggcggcaaatttcacacgcttgcccttgactcgacgggacgcgtgcacgtatggggattcaactccaaaggccagctaggaaataatactaccactcaatcaaatgttccgattgatgtatcgagtttcggatctcttgtcggtcaaacgatcgtggccattgcgggcggcgatttacacacgcttgcccttgactcgacaggacgcgtgcacgcatggggatacaaccaacacggtcagctaggaagaaacaatatcactgattcatcagttctgatcgatgtatcgagtttcggatctcttatcggtaaaacgatcgtggccatttcgggaagcgatttacacacgcttgcccttgactcgacgggacgcgtgcacgcatggggatacaaccaacacggtcagctaggaaatggtaacatcactcaatcaaatgttccgatcgatgtatcgagtttcggatctcttgtcggtaaaacgatcgtgaccattgcgggcggcggcgctcacacacttgccattgactcgacgggacgcgtgcacgtatggggaagaaacaaccaaggccagctaggaaataatactaccactaattcatcagtcgtgccgatcgatgtatcgagtttcggatctcttgtcggtcaaacgatcgtgaccattgcgggcggcggcgctcacacgcttgccattgactcgacgggacgcgtgcacgcatggggaaacaacagttcaggccatctaggaaataatactaacactcaatcaaatgttccgatcgatgtatcgagtttcggaactcttgtcggtaaaacgatcgtgaccattgcgggcggcggcgctcacacacttgcccttgactcgacgggacgcgtgcacgcatggggattcaactccaaaggccagctaggaactggtactcactaattcatacacactaaaattacacacaaaaacacactaaaattcatacacactaattcatcagtccctgttttagcgttcacaaccgttacagagacggtctcaaacttgttcgtgaacttcacaggccaacatcgttgcttcgtggacgcgctcgctccagcaagtctacgcgatcacgaaggacttgttgtcgtcacagacaaaaacgcatacgcatccggtcttttaagaggacgacaacgcgccatgacaatcaacgaagccctacctatcgtatctctttccaaggtcccaaaagatccccgtgcattcagtgtgatctcgctcacccaggaccatcccgcaggtccatctgcagccatctcagtaacagagttcctaaagatcgcagaaaaaggtgatgtacgtgtccaaatcaattcgctcggcgaaggatgcatctgggtatgcgacgagaccggatcaactatccatgcaggtgattacgtcaccacaagtagtttgtccggttacgcgtctctccaagttagattagatgatggagatgtaccggatggtacattacgaaactatacggtcgccaaactcacgatggattgtgatttctcacagcctctggtagatgttgaagaagtacaacaagatgaatatgggaatgtcgttttcgatgcagacggatctctcgtgtacacgatcgtgaccacgacacagggtccttctgttgtggacccagataccggagagacacgtcctggggaaccactcgaaacacctattctagtgaccgaacctgcctacgaaatgcgctggatgacaaccgaaatcgatgcatcctcaggtgtatcgatcacgactcttatttcaaaagaagattacgagacacgtaagtcagatggacaattagtcggtttgtcacgtgcagctttcgttggatgcacttatcattgcggataagtgtacgactccgatatattcaaacaatacccgtgaaaaaagtgtgtgtgtatgataacaataacgaacaactgctattgctgatttgtttgtcatgcttgatgaagacatcctcctagttcgcagtaacaccgagctgcgcggacatgtcacggtacccgcctcgattacatccatcggtcgattctcttcttatggtccttcagtctttcacgccggagcagcgttctcaaatgcaccaactacattcggtgccaacatcgcatgcagttcgatcatcgatgcatgaggaggaatagctgtatcaggattcctatcgaatgctgctctgacacttactgattctggaggaggaatggcattgttatcagctccactccattccacacaagatgtgcatctgcaaaaagagctaaaagtccatggcaatgcgaccttcgatacacacgtcaccgttaacggcacgctatacgcaaaaaacttacatccgtctttcaatacattccaagctagcaacatcttgatttcaccaggtggaattattcagttcggagaaggaggctcttcgaccatctccttttccaacgctccggacacgggtctgttcaatccaatggctagaacactaggtgtggtcgcaggagggacggagatggtgcgtgtgtcagacacaaccgtatcattgttgggggatctcgtggtgtcatcgaacatagtcccgatgacgaacgcgacgcagtacctcgggacatcgaccatgcacttcaaagaggcgtggatcgaagagctccacatctcgtcgaacactctctacatcggggacacgccagtgctttgcgctgataatgatgccgtgtccatccgcgctgacccggggcaaggcatcacggtaacgaccacaggcgatggggagacatcactggtgtccgccaagggagtcaatgtagtgtcggaagggggtgtcacgatgcgtgtatcaggacctctagggagagttaacatccagtctagcggagcaggtggcaccgtgaatttgggagcggaaaaggaaattgtgatgacagcacctcttacgacgatatcaagtaacatgatcgtaaaaggtgacctaactgtagaaggcatccaattaacggtgaacacgcagacggtgacgattgaggacaatataattgtacttaactcaggtgagataggatcaggtgtctcaaagggtgaggcaggattttctatagataggggagatgctcccgaatatcagcttctttttagggagtcggacaacgcgttcgtaataggtccgctaggctccctcacacccatagcgaccgagacatttgcacgaaacgcaaacaatatatccagtggaacattagcggttgctagaggaggaacggggggctccacaagtaccggaacaggtagtgttgttttgagtagttctccaacgtttacgggaacagctaactttgcatctctaacaacttctgggccttcgacgataaatggtaacatgaccttcggaaccggagtcaatctatttgtaaaccctaacgattccgtgactgctccagggtactcttgggatactgatacaaataccggaatgtatcgtgttgcggcaaatacaatagggtttgctgtaggcggggtcaataaagctactataaacagcacggggatagtgggtagcggagctaatataaccagtttaagtgctgccaacatatccagtggaatattagcgattgttaatggaggcacgggagtcagtactggcttaggtgccctgaacgcaaacaatatatccagtggaacattggcggttgttagaggcggcacaggggtcacccttagtaccggaaccgggagcaacgtgttgagcgacaacgcaactatgagcaacttgacgaccataggaggcatgatcagcagtaacggtgtcggacttaccgcattgaacgcaaacaacatatccagtggaacattagcggttgatagaggaggaacgggggtatccgtcagtaccggaacaggtagtgttgttttgagtgtttctccaacgtttactggaacaactaactttgcatctctaacaacttccaatttggatgtgggtggtcttacgacactgaatgggaagtgtatgtgtcttgatacattgactgtgggtgttggtgttggagatgatactgtttacccagtacatataaagacaagtgtggataacgtatccctgttcagtgtgggcgatgtggtcatgtactccgacattcgcaccaagtcggatgtgctcccgattccggatgcattggaacgtgtgggacgccttcgagggtatacgttcataaagaatggtggtgacgagacacgtcgtagttgtggtctcattgcacaggaactattggatgtcttgcctgaagctgtgcatgcacatccggaatctggaatgctgactgttgcttacgggaatgtagtgtctttacttgtgaatgcgataaatgaacttaaggcacaagtcgatactttatcgtgcacttaatgcttggagtgggtgcatgaatcccccgaattttcgcattgcaagttcaatgatcagacacatattcgttttcaaagggtctaaggaaaaaacgcatatttttttgtaaaatgtctgtagaagctacacatccacataaaaaaatcatagacaggttttccattttgacaagagagatgcgacaagaggcgacatgtggcaagagagatgcggagatctttatctttgaggtttttagaatggtggccttgctaaacgacatcgatgttctgaatgcgatatggactcatttccctacttctgtgtggtcttgtgcttctggacatgtggttcaagatctgtatgaagaagagatgatagggacattaaatgaatttgccttgaaaagacggtttatcatgggagggaagtggcagtaccaaacattatcacaaacagatccacgactaaacgtgaccttcgacgattaatgcgtcgatttgtaatgatgaatggttgtcggaaccaagctcaagaaaactcaatgcacgtgtttcttgatgacaagtaccgcactgtgcggtcgcttgagcgcacaatgatcgtgctaccacagagaagccccgcatccacgaacttaaggcacaagtctatactttatcgtgcacttaatgccggagtgggcgcatgaatcccccgaatttgtattaatgccggagtaggcgcatgaatcccccgaatttgtattaatgccggagtgggcgcatgaatcccccgaatttgtatgtagccgtcaacaacacgcagccttgcaccgggataagttacacagttgcaaatgtcaatgggcgttcctggctcctggacgattttgacttgttgcgaaacatggtatgaagcggaattgtgattccttggtgctgatgactaaagctagcgagtcgttcaggaggaaaatctttttactaaaaagctccgggcaccggtaagggtgtccataaattctgcctctgactgtaggaatctgaattcgcacgcggctatccaggtttaaaggttactgtcgatatttacaataaagccaccactggcaacccactcgtacaagctgcatatatagtgatgaataccgggcgtgcgtgtaggctgtctatcatgctggatgaaggagaactgatccgcatcactaagtgcgagtcaggtgaatactcgattactgggtcacagggtgtgtgtgtgtggggcaatggttcggagcggtttatggcatcctatgtgacatcaatgttgaccggacatgacatagagcacatggtgctaaccaacaacatcttcttgcctaacatcaagccatctactgcgagcaacatggtggcgtgtgtgcttgagcgattggagttcgtgaagcacattatcctactcaaaggcgggcctacagtcggcggaacagtaaaatgaaacatatatcagatggaaatgtacgacatcgccgatagaaaattggcgttaagaatggtcgctgacttgggtgtgttaaaaacttctgtgtttacgaatgaatgaatcgatacaaagacgcacgtgtctgatatgatttccttagcattcagcaacctcactgataaaatcattatgggttgttttgaccacgtatggaacacgtatgtgatgtttgtataaagagttctgtgatgtataaattatgtaagatggcaacgaaacctccgacagtcgcgaaattgaaggagctactaaaattggccgaagtagcatactcatcaaaggacaagaaggacgatattgtccgtttatgcgaagacaatgatctcatcgccagaccccctccagaatacaagacggtggaaaagatgtgtgtcgtgaaatgcgccctgaagaaggcaatgagtcttgacgatgaagaattcggtaagtttagggagcatgtggaccagctcgtcaatgtggtgagccgcatgttacggcggtccagtcttgtgctgactttccacatcacgagtctattagagaaaggtctggatattccagacctgtacagcatgaaagatacctactggaaggattggctccgtatcggggtagacggaatcttccctgatgaggaaaagatatcgtacgaagctgtgaaggactccatcggcgatgtaattggtaatgacgacgctgactacatcaagtcttatccgatctatttcgatcaggtattgaactatgcaggtcacacattgagcactgtcgtgtcaaacaacgcatgggttcctttgataccacgtctggccagactcacttccaccactttaaataaattaaatgccccgaagacgctggacacatcgaagatcattcggggatacgacgtgatgcaggctattcagcaagaagtccaaaacatggagggatggccagagtctgttcaagagtacgtcaatgaagttagggagatgctgagtgttccagatggaagtcgagtttatgataactatggcaaagacatggactttccgaccatggtccggtttaattattggatacagacacggttggaggatatggatgcacgtcgtatccgattgatgcccatcttcaatgtccaacgggtgcatgttcgccttgacctgaagaccctcgtgaacctgttcaggcacatgttccccaatgaccagaacatcgttgagctttccaagtgggaacatgtaaagaatcccgacagcttcatgttaccccagaggcctgcacagaagaagaaaaaatcatgtggtcctggtgaatgggaggcatacaagtcggtcatgaagcagtacgatgatgatgttaaggatatcaaggctactgacgagtacagacatgcaaagggtttgtatgacacgcttgtgaacgcccgaaaaacagtcgcaggttccttcttcagaaaaccacctgtcaagaatgggtgggttttcgactgcagcatctgtactgacagagtctctttgagcatgcaatacagcaagacagtacaggtccttgtctcagatctgaagaagacctgtaagaagcctcgtaaagaagaaggtatcaagatcgcagaaaaatacgacggctcacttaaaacgatattgcccgatatgggtatcgtcgtcctgggtgtggacccaggacggagcaacatcgctacggtaacgtatttggcagacgataaaaataagacatggacgctgacacgtggtgaattttaccacaagtcgggtatcaagaagcagacaaggcagaaggaactgcgttttgctgacatgattcctatgtgggagtctctgcgtgaaaatggagcagctttgagtacatcgaggacggataagatctccgcgtacttgtcaaattacgctaagttttctgaagagtggtggagattggctttgcgacgccgagaatcccgtgacaacttgcagcgttacatcggaaaacgaaaggtcaaagactctttctgggcgggtatcaagcggtgcatgatgaaagaacttcctgatatgaaggtttgcgtggcctacggatctgccatcacgaaactgaagcctactggaccgggagaagttgcagttcccactggggccatgttcgcatcgtgtaaaagaattttcaaagaggacgtttctgtgacagatgagttcaaaacgactcttatgtcgtgggagacgggtaaagaaaaagaacgtgtttacaagatcccaagtgtttgttcagcagacgtgaagcttaggttgggtggtgaacgttttggtcacacgaaatcgaaaacgatgccaaaggtcgctgattgcgaccacttaggggtaaggttgtacaataaacgtaaaggcgcacaagataagcacaggaggggtggcttcgccacttcccttgtagattctcaaaaatcgatcgagcggtacccagaggtacgaggactgcgattctctccagaaacatgcatttactcggaccgggatcgctcttctgctctcacaatcgcaaggctgcactgcatggaattgatgggtctaggacgacctcttccatttgcccacagcagctctgttgttgttgatgaataaaaactcgtattgttgtagacaccactcggtccccctccggtggtcgcgacaacattaggttacaccgcaaggtgtaccatacactccaaaaagcggtttcattttagtattccgtcgagtgtaactcgtaacatattggccctcttaacaattgcgccaacggacttaactatcgcaaacgacgcaactgctaaagatgcgccgctctccaaagagggtagctttcccactgcgatcgttgccacgaccatgccccctattgctgtaacaagtgatgccgcaaacacggtccactgccacgttgagagctgccgcgctgatgatgctacgactgttacttcaaccccaataccccttgcaatcgtcggctccatgttgagcacgcgctctgccacagctgcatcgtgtagtgcttgatgctgcaatgtatgacttgtttacactcgtctttcgaggggggacacgtgtcgcctcaagcagacttctgcttgacaattatttaaggattatgaaagaggactcgcgggacccacggagtggggcagtggaattgagctgctgactcgcggatctgacctgtttacactcgtcttcgatgcacatgaggaacacgtgtcgcctcaagcagacttctgcttgacaactatttaaggattatgaaagaggactcgcgggacccacggagtggggcagtggaattgagctgctgactcgcggagatgacctgtttacactcgtatttcgaggcgcatgggggacacgtgtcggatctgacctgtttacactcgtatttcgaggcgcatgggggacgcgtgtcggatctgacttgtttacactcgtatttcgaggcgcatgggggatacgtgtcggatctgacttgtttacactcgttttcgaggcgcatgggggaaccgtgtcggatctgacctgcttacacgcgcgcttcgaggacgcgcatggggaacatgtgacgtctcaagcagacgtatgcttgacacacggggatgaacatccatggcaatgctgaaaactgacgcaggtggagggagggtttctccacctgattagaggtcaagcacggaattgaattgaatgcggactcgtgtgaacctctacggatctgacatgttttatggtgtaaacaggatcagagtaagcaaaatgtagatgttgtaccataccaaagagttatcattccgactgaacaaggttgaaacgatgctgacggacgcaacaaaacaacccaaggccaacttggcgccatgcccacccatcagggggctgggagcaaactggcacaggggcgcaggcgcaaaggcgagcatgcaggcagatgcgacgatcatgaacgcacgcgcgcagatgcagctgcaggacccgttcagtggatggagacagttcggatgctacaaggactggacagatgcaaacgaggcgctgcaaagactcaagggacatgcgaggcacgcgttcgagatcataccgttcggaaagccatgcaagccgtaccttgacatcgacggtccaccactgccgagcgaccaggtgcccttcccagacgtcgctgcactggtcgcgcacacagaggacgcaatcaagatgatattcagcaacgactacggaatccagatcgacgtcgacaacgacctcatatggctcgtcagcccaaacgccaagaagctcagcctgcatctcatcatcgacacgaagagagaaggaacgccgctccacggccccccaaaatacagaacgaacgcgagaagcatcatcatcttgacacgcctccgcgaaaactgcggaacactgtcgacacctacgtctcactccaaggcccctcaaaatacagatagatggaggtgtactacacgcatagagtcacgcctccgcaaaacggcggaacactgggtcgcgtgggacttccgcccggatacggacaaggcgaagacgctcgacaccctctccagcgctactttgctgccgcggatggcgacacggtccacgtggagtacgcaaagaaggagcacgggagggggaggctgtttgcgaaacgcgggctttcgcatactcatcggtgtccatctgcatctgcctctgcctcaaaataccacacggcggcgcttgtgcaatcgtcatcaaatgaagtataaattaaacagcgggctcttataattaccagcacactttgcagacacttcttcattcgcagtacctgaggatacacagttctaaagtcggatacagatgtcatcaaggaattttgtatgtcaatttgatggatgcaactctgcatttgcttgtaatagtaagttgactgtacacaaaaggacgcatacaggagagaaaccatttacatgcgattttgatggatgtggtgctgcatttactcaaagtggtgttttgaagacacacaaaaggacgcatacaggagagaaaccatttacatgcgattttgatggatgtggtgctgcatttgcttgtaatagtaagttgaatgtacacaaaaggacgcataaaggagagaaaccatttacatgcaattttgagggatgttgtgctgcatttgctggtagtggtgctttgaagacacacaaaaggacgcatacaggagagaaaccatttacatgcgattttgatggatgtggtgctgcatttgattgtaatagtaagttgactgtacacaaaaggacgcatacaggagagaaaccatttacatgcaattttgagggatgttgtgctgcatttgctggtagtggtgctttgaagacacacaaaaggacgcatacaggagagaaaccatatgtatgtgacttcgatggatgtggtgctgcatttgcttctactagtaatttgaagtcacacaaaattacgcatacaggagagaaaccatttacatgcgattttgatggatgtggtgctgcatttgcctggagtggtgttttgaagagacacaaaatgacgcatacaggagagaaaccatatgtatgtgacttcgaaggatgtggtgctgcatttgcctggagtggtgatttgaagacacacaaaaggacgcatacaggagagaaaccatacatattcgattttgagggatgtggtgctgcatttgctggtagtggtaatttgaagacacacaaaatgacgcatacaggagagaaaccatttacatgcgattttgatggatgtggttctgcatttgcctggagtggtgttttgaagacacacaaaaggacgcatacaggagagaaaccatatgtatgtgacttcgagggatgtggtgctgcatttactcaaagtggtgatttgacggcacacaaaaggacgcatacaggagagaaaccatatgtatgtgacttcgagggatgtggtgctgcatttactcaaagtggtgatttgacggcacacaaaaggacgcatacaggagagaaaccatatgtatgtgacttcgatggatgtggtgctgcatttactcaaagtggtaatttgaagacacacaaaatgacgcatacaggagagaaaccacatatatgcgattttgatggatgtggtgctgcatttgctgctactggtaatttgaagacacacaaaatgacgcatacaggagagaaaccacatatatgcgattttgatggatgtggtgctgcatttgctgctactggtaatttgaagacacaccaaattacgcatacagtcgagcatcaacagcggaagaaaagagaagagcaaaaggttgccaagttgttagaaaatcatggcattgatttcaaaagagaacaccaggtagacttttaaagtcagctaaattagctgtatgggatctacattcacaaggatagatttcttgattgtcaaagacggggttgctatattcttagaggtcgatgagaatcaacataaattcggtggatactcggttgcttgtgacatgaaaaggatggctagcatctatgagtccctagtcttcgatgacaacacactgccattatatttcattcggtataatccgcatgcatacagggttggtggtgaactacagaaaacaacgactgtcgctcgtcaacaatgcttagtggacgttatacactccaccagttctacaactgttaaacgaatgaatatactttatatgtattttgattgtgatacactcgtagataaaaacattcgattgtcggttcacacagacccagagtataacgagacaatgaagaagtgttgtctacacccagtgtattagtagttacagagaaacgaacacctaaggggtgttcctgcctcccggccgattcctgcaagttcaacaaagacgcggactcggtcctcgtcccgatcaagcagcaccacaaggatgacccagacacagcactcagggcagtcatctcaaacgtgccagaggatgccgcactcatacaggtgccagagcacataccgagatacgtcaagaagaacgggatcgcatggccggcacgaccgcgcacgcaaacagtcgcaaacgcagtcagagcggcgggaaccatcatcgccaaggccgtagagaaggaaccgcacgtccgacgcgccgacataatcgtgcgcatgctcgacctactcagacgagacatgcacctgtcagcattccacgatagacgaccctgaggacgcgttcgatcgagccgtaggcgtcaggttcaactacagtgacaggagtgaaccgtgctacacaggaaacatacacaacggagagcagaacatgagatgctttgtagacacagcaggaaactgcatcgtcaagtgcttctccgccacatgcgacaaccacgcgcccgcgtgcataggaagactcgcggaacctgctggcgacgagtgggatgcgggagccattcgagtaaaaagtaggtacattgacatcgacgcatgcctagagatgaagcaggcggtcgatgtgtggttagacccggagcgaaaggacgtcaacacgctctccgtgcgcagcccgatggggtcaggaaagtccaccatgctagacgcactcttagaacgcgtgggagaggacaagaccgtgctcgtcgtcacataccgccagtcgctcgcgctagagcacaagagaaaactggcgcgcaaaggatttgtatcatacttagacaccgacgtcacaccacaggacctcaggcgaagggacaagacaccgcgcgtcatctgccagatcgagtcgctacacaggctagcaaagcacacgtgcatgcgatacctcacatcgggctttgacatagtcgtgctcgacgaggtggaatctctgctgcgacacttcatgtcgccaaccgtcgtcaacccattgactgagatacagggtctggcggacacgctcaacgcaacgaccaccggcgtcgtcacaatggacgcgacatggggcagcgtcacgaaagaattcctaaagcaggccggcttgcgcaacctgctcgtcgtcaacgactaccggagcacagagaacgcgcgcacattctccatatcgaaggacgaggtgacatggagcgcgcagatctgagacgacatcatcgcaggcaggaacgtcgtcgtcgtctcgctcagccaagagagagcgatgcaggtgcacaaggccgcacttgacacattcgacgacccgaaggacgcggcaagactatgccttttgcacacgtccaagacagcagacgcggtcaaggcgatgctcatcgacgtagacgcactctggagcagcaaacgcgtcgtcgtgtactcgccgaccatatcggcggggatcgatttcagtaccgagcattttgacaggatgtacctgtacctgtgccccgggtccgcggctccgatgggcgcgctgcagatgactggacgcgtgcgccacctggtcgacaccgacgtcaggactctcgtctccaagaacatgagggtggcacgagaggcaacccgacaacacttgacgcacgtcgacctctaccagtggctcaggtgcgatagaggggggtgaaaagtggtgggtaaagtgacgttacagccactgcttaaatcatttacctgtccctttgatgccactgcttgacaactgacgcaggttgatggagggtctcgcaccctgcttaaatgtcaagcacgtaccgagtgatagataggtggcgggtaaagggacacttctaaaacacgcttcgctataatatataattgtcccattggaaccactgcttaacaactgacgcaggtggatggaaggtttcgcaacctgcttagaggtcaagcacgtacccgcgattgactgtggagacgaccacacactgcaagagctctcgggtggcgctctcgccccgttgtttgcgaccgtggctccaccgacactgaagatgactgtcgaaagctactttctagcggagatatacaacgccagcttcgactacgtgtcctgcttcgccgaccttctggagcatgcaggtcaccgcatggacctcggcaccagctacgctgcggtcagtgccgcccgcgtgcacgcgccgcctgagggcgacgtggaggcgacaagcgagttcctgatgcgcgtcctcaaggctcaggagcagatggatgcgcttaccggagttgtcactgcccctgtcactgcccctgacgctgtccctgacaatgtccctacccctgtccttgtcgctacccctgtccctgttgccggcaccgacatcctcagcaaccctgatgtgcccactgccatgcggcgcaaggatctcatggatgctatcgagcagcgcgtgatggccaacgacgcgagcgaggacgacaagttcattatgtacctgagccgctactgctctgcatggggcatcgaccgcgttgacgaggcgttcctgctggagaacaagcctggtgctgtcggttctccgaaggcgaggctcctgtcgcgcctgctgtgcccgatcctacgcccggtgcgcggcgccgacgtgcacacgactgagcactcagggttgctgaagatcgttctcatcgaagagacactcgctgctctggggtttgtgtccccgttcgacaccgagaccgtgatcccaaatctgatgacagcgtttgacaccaagctgaagggaacacagatgttcagtgactacacgaacaccgctcggctgttcaggcaggcctcgtgcggcgttcgcgacgggtgggacttgcgcaaggtgtcaaagtctgtgaagatgatcctgaacgcagtgggtctggatatggttagcatgacgaagcgggttcaggtaaaaggcaagagaactcaggaggagaggaactaccgcctgtgccgggagagtgtctgccgtatgctcgagctcgttaaacttcgtcttctgcgcacggacctcactcctagcaacgagcacgccgccgctgccctttctggccacgagctgtccatgtacaaccacctggttgacgtggcgtcgcctgtcgcgtacgtcttcgagcctgacgacgacgagccgtcaggcctataataatggtgtaaacgcgagcattgggatacagcatgtgagcagctcgacagcgatcatggcgcacattacaaccaatgtcgtgtacgcgttggttgagcacaagttcattcagaattatgagctcgtcgtcaaggtgggcaggacgtcgaggcccattgttcagcgactttctcagtacctgaagaactcaaagatgatattcgccatccacgtaattaatccgcgtgcttgtgtggaggctgagactgtcctgatccggtaccttcgcggagaccctagagtcaagccccgccgcgacgttgggtacgagtactaccaacttgacgcggctgatgcatgtgccgtctttcatgagatggccggtgtcgtcttccagtacgcgtggacaggtggcgtcgacagtattgattgcggcaccgaggacgtaccgcccgacccccccatctttgccgttgttgagccagagaaggaacgagagaaggagagagagaaggaacgagagaaggagagagagaatgatagagagagggatagagagaagacggtctctcgactggtcgccaagatattcgcgaacgtcttgaggctcaataccccacggaacgttgaggtacttgcatctctgctgtgcccggagctgcagcgcccttttcgtggcgtgccgttgcaccccgatcttctgaagatcgtgttgatagaggagacactcgctgctctggggtttgtgtccccgttcgacactacgaccgtcatctcgaacctgatgacggcattcgacaccaagctgaagggaacgcagatgttcagcgactacgcaaacaccgctcgactgttcagccaggcatcgtgtggtgttcgtgacgggtgggacctgcgcaaggtgtccaaggcagttaagatgatcttgaacgccgtgggtctggatatggcgagcgaaaccaagcgggtgcaggtcaagggcaagcggaccaaggaggagataaattaccgcctgtgccctgaaagtgtctgccgtatgctcgagcttgtgaaacttcgtcttcttcgcacggacctcacgccgagcaacgcgcacgctgccgctgccctatcgggtcacgagctgtccatgtacaaccacctggttgacgtagcgtcgcctgtcgcgtatgtcttcgagcctgaagacgtacgcgacatacctataataatgttgtaaacgcatgtattgggagacaggatgtgagcagctcgacagcgatcatggcgcacattacaaccaatgtcgtgtacgcgttggttgagcacaagttcattcagaatgatgagctcgtcgtcaaggtgggcaggacgtcgaggcccatttttcagcgactttctcaataaatgggcgttcctgcctcccggccgattttgactggttgcgaaacatggtatggagcggatttgtgattccttggtgctgatgtctcaagctagcgagtcgttcaagaggctctaaatcctgattataaattttaaaaaatcggccgggaggctggaacgcccattaatacccgaagaactaccgcatgtgccccgagagtgtctccaggatgctggagctcgttaaacttcgtcttctgcacacttgacacacgtagacctcttgttgacaaccacctggttgacgtaccgttgcctgttattattattattcgtaagccctcccccgatatccatgaatcccaatttcacgtacggatcgtacatcacggtatatcggatgagaagacactacaagacgtcaagatttcgcctgaattttctacaaaaacccatgattataagactacgactaccgttttccaacgggcatcatcgatgtttgcaagctttccgcagctatcacactcatgccacccccccttcccatctttccacaaacgcaactgataccttaagttcactgcactaccgcatccatcgcacgacaatgttttcacacgcgaccatttagctccgcatgacacacacgttcggactcctgtgtccatgttttgtgtcacaagagaggacgcgcacttaccacaacttacttcttctcgttccatacagtcagtcgttctcaaataattttgggacactcagtataatttgaatgatatccccttaaaccagatatgtgtcatggtccgtggttcactacaaatattttttgaggagtctgaggaaggtttgtaatatatactctctttacacctgtcgacctgtccagaccatgtttcgcaaccagtaaaaaccggtcggtaggctgcaacgcccattaattaaatccttgttctcctcaactgaactcaatgcaagtgtttcgtgatgacaagtaccttactgtgcggtcgctagagcgcacaaggatagtgctaccacatataagtcctgcatccaaagtgaacgcatctatacccccgctctgtactagcatcagaatatcctccatcgtgaagaagggtgcaggcgcggacagaccgtagtacacaccggtgctggactcaaacaccaccgagcacggagcgg

SEQ ID NO: 194 - DNA, 22409 bp, unidentified
  source 1..22409: mol_type = other DNA
  misc_feature 1..22409: note = Fanzor polypeptide
tgccatagtcatcataaagtcgacttccatctggaactttcagcctgactcgaacttcacggacatactcctgaacagactctggccaagattccatctcctgtatttcttgttggataaccctcatcacgtcgtacacacggatggtcttcggagctcccagtgcattcaaagtagccttagtgaggcgggtcagacgaggtaccaaaggaacccatgcgttgttcgacacgacagtgctcaatgtgtgaccagcatagttcaaaacctggtcgaaatagatagggtaggagttgatgtagtcagggtcatcgctaccaagcacctttccaattacgtctttcacggattcgtatgatattctactctcttcatctggaaagacgccgtcaactccgatccttagccaatccttccagtaggtatccttcatattgtacatattaggaatcggcaggtcgccctccatgagcctcgtgacatggaaagtcagcaacagactggaaggccgcaacatgcggctcaccacattgacgagctgatccacatgccccctgaacttaccgaattcttcatcgtcaagactcattgccttcttcaaggcgcatttcacaacgcacatcttttccaccgtcttgtactctggagggggtctggcgatgagaccattgtcttcgcataaacggacaatatcgtccttcttgtcctttgaggagtatgctacttcggccaattttagtaactccttcaatttcgcgactgtcggaggtttcgttgccatcttacataatttgtacatcacagaactctttatacaaacatcacatacgtgttccatacgtgttccatacgtggtcaccttagcgaagcacagctcaatagcattgaattctggactgtaaggaggagtgtaacaaatatttacggggcttctgaggaccaagttcttatggatactggcgttgtccattattactactgaattattgcacaaactcaatgagtcaataaatgcagcgaagtccgtcttcttcacagatcctttcttcacaacgaactccttcctaccatctgaaaaaactgccatcaacaaactatggtgtacccacccaccagtagttttaacgataacaggttttcctacaggggaatacccataatgtgccttgagacgctcactaaacccacattcgtcaaatgatactaaaattttcccagcattgattgtatccttgtatctactacaaaatccagtgacaagtgaaactaagtcccctttacactgtccaattttctaacggcgatgtcgtacatttatttccatctgatatatgtttcattttactgttccgccgactgtagaagatcttcattgtgaattgctttaatctgagtgagcgagtcatcagctgaatccctatgcaccgctacacggtgcccgcgctcctcccgttcataaatccaactgagttgtcaagcaggagtctactcgtggtattcaggaatcagttgaatgtgttggcggaaccccacgtattcactgtgcgagtcagcaactgaatccctatgcaccgcgctcctccgttcagattggtgcgcgctggtcctcgaattcgtcgtgaatgtgaatgaatgtatgcgcagcaaaatttgttattcgaaaaccagactaggataaaggagaagcagaaaaaacacatcatacatgcagacttttggggatttatatcggtgcgtcatggctcgagacaaaataataaagcattccattattatggcatgtgcaaatatacaatcagtacaaacatttgatggtaggataatcttggctatattatgggtggatcaaattcgccgaggtgcttacatgtttgaaaataccatacttcaacttatttgcactgacgaggaaacgactcccgccgttgcatcttcaataggaattgtgccctagtttcagatggttcgtgaattacacaagacattaaacaacatgcaagaaccttctgacaaagacaaacacaaactgtatgacggagcaaaggcttggctaaaaaacatcatgggttattggttccgttgtggatacgaattggaatggttgcattccataaggtactcgcaagtgggccccttcccttcccttcccttccctctgtatctggacccccctcagggtagggtaggtaggggtcccacttgaatgcccattaaagatacagatacagggtaattggcactaaagaaaggtacttgaataaaagctgcctaatacttgcgggtacctttatggccccctttgggtggtgagctagtacgcctagggtcattccatacagctagggacatttgatattgggacaccttatattttggggattctgaaaagttgaccaattcaagatttgtaaccgatcttgtcaatacagatactgtcttcaggtgattgacacaaaaaattcaaggcatctaaagacactgaatttacatgttcaaagtaccctgaaaagtcaaactgatggctaacatcgtgcgcatcaataatccttttcaaagcgttactgtaatcaaatatatctgctacatctggatcagcattttagtattccgttatcaaatatatctgctacatctggatcagcattttagtattccgttgactgtatcgagatcatgtacaccgtggcattcgatcttcaaccggcgagctccaacatggacatccggaatatctctgtatcgaattgaattctccaaagggatgtctattttgtcaatgctgcacccaggtaatcgtttggatccttccagccacaaacggactccttcatctgaaggatccagttccaccttgtaataatgctcggctcctggcaaatatgcaaaacctgttggcacgtgtccaaccacacgagcatatctaccaagaccaagaccaagaccagagcttgcaattgaaaaaacagttggcatctcaatgacttcaagggggtgaccgtcattcaacaaccgcgcatagacaaataatgaatccgacttcataatttatctgagaagcatttattttataaggaaacgctacagtcggcggaacagtaaaatgaaacatcccaataaacggtataaaaatgatccggaggttggaacaggttagggtcaagcaggaacaggaaccagcactgtcgagtcagtcacactctcatcaaggacggcatcgagttgagccactcacagggagacctctctcatctcatcaaggacggcggcggcacccgtcgagtcgagccactcacagggcgacctctctcatctcatcaagtcatgtggcttacattcgcaagtatagccactctcctcaaactttgcagcaatgtgtacatgtgtacaacaatcgaccgtctgtccaagttgtacatagagaattgtaattgattcaatatactgtaacattattgaccggtctgactgtaacatggccaggttgcggataaacttggatgatggtgttgacccgttggacgtcggtgctgcagtggagatgcttgaccaggcagtgtatgccaaggtgtcaccattggtagtgaagctgcttggattcagtcaggacggaagcctagttggtcaattcagcggcttcatgcatggggaagtcatcgtggcagcaggacacatgcaggggttctgcggcaagcccctaggtagtacatcaccggctgtggcctttaaggcaaggtacccaaccgacggctttgaggaggatttggaggtcgtggccccctcacctccaggcaatgtgcctgacctcattctgttgaagggttcccgctctgccacgagcctttggtccactgatcttgaaatcatggcgtcagtgtacgcactggggtacacaggcacagagaacaagccccgttgctccaagggctcactatccagcaccatgcctggctcagtggccatcactgcacacgcagatgacgggttttcaggcggaccagtggtcgacaagcatggccgtctgctgggggtcgtgaagggcgcacttggcaccacaatcatgcgcatcggcatcaccccaaaccacgaccttcacacctacctgcttcaagcaggatatccaggcttgatctaagcccatgtttgcaagcaccagtggcatgatgcaggatgcctattctggacccatgtagcagagtgcagaagcggtgatacacagtcaacggaatactaaactgaaaccacttcgtgtacggcacaccttacggtgtatagccagggtttagatatatacccctgtcttttgaggcttttgaaaagttgaccaaccgcgcgagagtcacttcctctcacgatgtccactgacgttctgttgttttctgggctaatacccggaatatgtttcaatctgttgaccgtccagtgcaggtatacgctcatccacgctgtcgtgaaggcacctcgaacccgcacgttacatgatgagtccccaaaagtccgcgtgtatgtgttttccccgcacgcgcaagagcacacaagccgcccatgcatgcatcatcatctataatcatccgcggcggtgcgtgcgtgcgtgtgagtcagcgacttaagacatcgggttacaatgtggctggcatatcctgagaatcatggattctctgcctggccaacgcctctcaccgacatctctgagataaaaaacgtaattaggacgtttacagtcaacggaatacttaaatgaaaccgcttcgttcgtggctcccctgcccgcgttcccactcactacagatatatcaacaacatgggcagcaacatggagggcaactgggacatgctgaagcaggctgctgctgaaaagccgattgtcatcaaaggcactggaacctacaagcgcacttttccggtggaccacataacaggcaaggtgctgatccgtggtgcagctagtgacaacgaggtgctgcttgagcagagcagagggaagtacacaggcataaagctcatgcgtgggctgtgggaagagccaacggggcacagcagtggcaccttctttccagtcgcagcacctgccggcgtaggggtgttgtggggcagcgctgggcactgcctcatgcccgccagcgtgcaacagaagtggcggtgcggctacggcacagacgtgctgccgtccagtctgtccactcggccggttccccgcgcaattgtggacctgggctggctaacagcggggcgcaacgttagcgagctggctgaacacatcccctcgcagccctcgcagcgcatcgatgaggctgagaggtcctgccagacttcgggttcatggtcaccaaggcacctgaggggggtccgatgcagatcttcattcccagcgcaaggaagctggtggatggggacgcggtgtgcgtgctggggtttgctcatcgcctgactgccgaatgggcgaaaaggtttctgcgcaccgaggcggattatgagcaggccgctgatgaggccgagctactgggccatcagctacctgctccagcaagctggcggctggatgaaaatctagccctgcgacgtgcgcttgacctggaggatgatgtgtgctacccctcgcgcttggtcgtgtcgcctggactggtggccggggcctctcagcgcatcatagagcacacctgcagcaccttcccgggcatgtcaggcgggccgggcgtggacgtgcaaaccccttggcagctgatgtttgtgcacactcgcgccgacgacgacttccgccgcaacaactacggctactccgtccaccacccgctctttgtcaatgcctatgagcgggaggtgctaccgaggctgctggccacatcctcagacctgctctcaaaagagatgatgcgctgcttgcacgggtatctggatgcccacaaggaccagcttgctgaccaaggcgttttgcatcaggtggagaagcgtcgctgagtcgcgcaaggtatgctctgtgcccggttctgggatcgttcaagcagacttctgcttgagaccccacccatctgatatatagacacaaggacccctttaatatgcgtgccccactccgtgtgtcccgcgattcccctttcatgatcccgacatagttgtcaagccgaagtctgatcgagactacacgtgttccccatgctccacgaaccacgagtgtaaacaagtcagatacactacagacaggatcctacacgtggcggaccttgcttcttttacagaggacaactgctttttcccagatcatcaaccgatccttaatacacgagcaaatctttgcatttgttgacaaatgttgccaatcgttttgcatcgacatccggatttttcttccataagttttccagtgctgtaataagataagctttataatgtgtaccgtacactccagaaagcggttttatttaagtattccgtcgagtgtgtgcatgccgtttattttcacccagttcatggattttgaatgtacggacgcgttctgcgaaatcaccacaatcttttaaaatcaggtacaaatcggagcataaagatacttgtggatatattactatatattactatctattactatctattactatctattactatctattactatctattactatctattaccatctattaccatctattatttagttattactattaataatgatttcagtggaaataaataaccacatctcgagacgggtcaaatgtatggaacacaagtggtattggagtttattgagctcaaaccccaatatcacatgggatatcatcgaatccaatcccaacaaaccatgggattggaactggttcagcagaaaccccaacatcacactagatattatacaagccaacccagataaaccatgggactggttctggattagcagaaaccctacaataacgattgatattgtcattacaacccccagtaaaccttgggattggggtgggttgagcataaaccccaacatcacatgggagattatacaagccaacccagataaaccatgggactggtattatatcagcagaaaaccctacatcacgtgggaaatgatcgaagccaaccccgacaaaccgtggaattggtattggatcagcagaaacccatgcattaaatgggatattgtcattacaaacccagacaaaccgtgggaatggggtggattgagttcacacccgaacatcacactagatattatacaaaccagccctgacaaaccatgggattggtttaatatcagcataaaccccaacatcacatgggagattatacaagccaacccagatataccatgggactggttttttatcagtaaaaaccccaacatcacatgggagattatacaagccaacccagataaaccatgggactggtttttgatcagtaaaaaccccagtatcacatgggatattatacaagccaatccagataaaccatggaactggaactggaccagcaaaaaccctgtcataacgatggatattatcgaaaccaacccagacaaaccgtggaattggggtggaatgagcgcaaaccctaatattacgtgggagattatacaaaccaacccagataaaccatggggctggtatgagttgagcagaaaccccaatatgttgctatcttcccaagacatatgtgatatcatacgtagatacagatcagcaagaactatacaaaaaatatggcgccatgtcaatactaacccaagttataatgcatgtcaacacagactctatagggaatataatgaaatggtttaaaattaaccccgttacactcagaccggtcaataatgttacagtatattgaatcaatcccctccggtcgcccacccggaaaggggctccgccgcttgtttatacagcccgcaattctgcggcgtttatggatatgtcactagcataacgcccgctaagatgcgtacgcgtttagttccttttactttgcagttgaaaaagcgcatgcacatcgattccgttgacaaaatctcatacatcacatgtttatcgacccaacggatgtcatttgtttcaataatgcaatggtccatgaacgctgtgtgcaatatgtccgactgcacccaagccttatccgaaacttcacaatgttttccgataaagtttgaaaacaagttctcgatacgctcttgctcgttcatcatttgatgacagattggttgttgactttaagttacactcagaccggtcaataatgttacagtatattgaatcaattacaattctctatgtacaacttggactcgttcaggatgatctaaatcctgattagaaatttaaaaaaatcggccgggaggcaggaacgcccattatatacacccacatcgtaccttcctccagggaggcgccggctccgtcacactaagggccatgcagggcatggctatgcacagcctgacctgcgtcagagtcctcacggagaggggcgtgccgcttccagaggaactaagagctcacttgacagaaaattaattgtccgattgtatttcctgacatgttcattatttgtaagcttgaatttccattttctcttcaaatgtaaagctcgtacggacatggattcatcatttgagagtctttgagaaatgagacaacgggacaacgacattgaagatcgcaataagcacagaacaaaagcggtgtttgccagactctcgcaaatggtagagcatgtcggtcgtgttcgctcgtttgtgcacaacgtgcgtaccacgcacctcgcagcggcactcacccttacggccaaggcagacgatgagctgcgggagttgttctccagcctaaccgacgtgtgcagggagatgggcgacatcaccaacgattccattggcggcggaacagtaaaataaaacatatatcagatggaaataaatgtacgacatcgccgttagaaaattggcgttaagaatggtcgctgacttgggtgtgttaaaaacttctgtgtttacgaacatcagtcgttctactctgtggaggtggaaacgctttggtgtaaatcgaaaacgacgtgaatttgtaagcaacctttttgagacgaataaggatttgttaaaatcgtttttattgtcaactcaatgcacaaccgcaagaggcgttgttgcttttttcaaaagtactcacaatgtacgattatcaactaaaacagtgtatcgtttcataaaactcattggttttacaagaaaaaggagcaaactccgtggacagtgtaaaggggacttagttccacttgtcaatgaattttgtagtaggtacaaggagacaatcaatgctgggaaaattttagtatcagttgacgaatgtgggtttagtgagcgtctcaagccacattatgggtattcccctgtaggaaaacctgttatctttaaaactactggtgggtgggtacaccacagtttgttgatggcagttttttcagatggtaggaaagagttcgttgtgaagaaaggatctgtaatgtgcgttcctgcctcccggccgattttgactggttgcgaaacatggtctggagcggaattgtgattcctctgtgctgatatctcaggctaccgagtcgttctggaggctctaaattctgagtagacatttcaaaaaatccgccgggaggaaggaacgcccattctgtgaagaagacggacttcgttgcatttattgaatcattgagtttgtgcaataactcagtagtaataatggacaatgccagtatccataataaattggtcctcagtcaccccgtcaatatttgttacacacctccttacagtccagaattcaatgctattgagctatgcttcgctaaggtgaagagagactttcgtcgtttgaactacataccgaatgaaacaaagacgcacgtgtctgatatgatttccttagcattcggcaacatcactgataaaattattatgggttgttttgaacacgtttggaacacttatgtgtataaagcggtctgtgacgtattgattatgaaagatggcgacgaaacctccgacagtcgcgaaattgaaggagctactgaaattggctgaagtaccatactcgtcgaagtccaacaaggacgatcttgtccgtttatgcgaagacaatggtctcatcgccagaccccctccagaatacaagacggcggaaaagatgtgtgtcgtgaaatgcgccctgaagaaggcaatgagtcttgacgatgaagaattcggtaagtttagggagcatgtggaccagctcgtcaatgtggtgagccgcatgttacggcggtccagtctggtgctgactttccacatcacgagtctcttagagaaaggtctggagattccagacctgtaccacatgaaagatacctactggaaggattggctccgtatcggggtagacggaatcttccctgatgaggaaagcaagatatcgtatgaagctgtgaaggactccatcggcgatgtaattggtaatgacgacgctgactacatcaagtcttatccgatctatttcgatcaggtattgaactatgcaggtcacacattgagcactgtcgtgtcaaacagcgcatgggttcctttgataccacgtctggccagactcacttccaccattttaaataaattaaatgccccgaagacgctggacacatcgaagatcattcggggatacgacgtgatgcaggctattcagcaagaagtccaaaacatggagggatggccaaagtctgttcaagagtacgtcaatgaagttagggagatgctgagtgttccagatggaagtcgagtttatgataactatggcaaagacatggactttccgaccatggtccggtttaattattggatacagacacggttggaggatatggatgcacgtcgtatccgattgatgcccatattcaatgtccaacgggtgcatgttcgccttgacctgaagaccctcgtgaacctgttcaggcacatgttccccaatgaccagaacatcgttgagctttccaagtgggaacatgtaaagaatcccgacagcttcatgttgccccagaggcctgcacagaagaagaaaaaatcatgtggtcctggtgaatgggaggcatacaagtcggtcctgaagcagtacgatgatgatgttaaggatatcaaggctactgacgagtacagacatgcaaagggtttgtatgacacgcttgtgaacgcccgaaaaacagtcgcaggttccttcttcagaaaaccacctgtcaagaatgggtgggttttcgactgcagcatctgtactgacggagtctccttgagcatgcagtacagcaagacagtacaggtccttgtctcagatctgaagaagacctgtaagaagcctcgtaaagaagaaggtatcaagatcgcagaaaaatacgacggctcacttaaaacgatattgcccgatatgggtatcgtcgtcctgggtgtggacccaggacggagcaacatcgctacggtaatgtatttggcagacgataaaaataagacatggacgctgacacgtggtgcattttaccacaagtcgggtatcaagaagcagacaaggcagaaggaactgcgttttgctgacatgattcctatgtgggagtctctgcgtgaaaatggagcagctttgagtacatcgaggacggataagatctccgcgtacttgtcaaattacgctaagttttctggcgagtggtggagattggctttgcgacgccgagaatcccgtgacaacttgcagcgttacatcggaaaacgaaaggtcaaagactctttctgggcgggtatcaagcggtgcatgatgaaagaacttcctgatatgaaggtttgcgtggcctacggatctgccatcacgaaactgaagcctactggaccgggagaagttgcagttcccactggggccatgttcgcatcgtgtaaaagaattttcaaagaggacgtttctgtgacagatgagttcaaaacgactcttatgtcgtgggagacggataaagaaaaagaacgtgtttacaagatcccaagtgtttgttcagcagacgtgaagcttaggttgggtggtgaacgttttggtcacacgaaatcgaagacgatgccaaaggtcgctgattgcgaccacttaggggtaaggttgtacaataaacgtaaaggcgcacaagagaagcacaggaggggtggcttcgccacttcccttgtcgattctcaaaaatcgatcgagcggtacccagaggtacgaggactgcgattctctccagaaacatgcatttactcggaccgggatcgctcttctgctctcacaatcgcaaggctgcactgcatggaattgatgggtctaggacgacctctttcatttgcccacagcagctctgttgttgttgattacattacattacattacatgttaaagtctacttgacaccgcgagggtgtatgagactctgtgctttaaacaaaaagaaaaagcacccacaaagcaaaaaaccccattacatcaggggtgtgtcgaggacaaacaaaccaaactcccaaccaccgttttggtggcgtaggtattaaaccccttagagcaggacccagatctcaaccacttacagtggcggaggtaagaagctaacaaatgagaagtcacaagaagaagaaaaaaaagggataataaattacggtgccactaagcagtccagggcttcctgtcttgctcttctacaagtagaaagatagtcggctaggttgctccaaaaagacttagtgccatttccattcataaaggttctgaatgtggaatcgcagaattccacattccatacggttaagtcggtatcctcatggacatgcctataaatatctgtaaacagattctggtagcggaggcgaatatcattataaaaagggcactcaaacatatgcatttcatcctcagttttttggaacccacacatttgacagtgtctcattgagcgagggatgtgtgctctatccaccaccctcattctttctgtgttcagccaatgggaacccattctaaactgtgctatagaacgaatctgatcctgcttatgtaaggcggatgtaaagggaatcaagccattctcatcattgctgttggctgcgaaccatttttggtatcggaggcgtttaaagccaacccttctctcatcagggatgtctctaactgcattggtgtcacttgggtacttaaacctccatgactcaaaaacttcagacataataccttcgacatcgacagcctccaaaatgttgatgtttttactggatcctagcttgtggagagcacaacgcaagtcatgaacccagccagtgttggagtcaaaagattcctcaagagccattctaatgagatcctcaggttctttatgtatggtcttgttccagaagcgcaaagcttgtttaagccaagcaaaacacaacggggttctacccagctcttccatgataatattagatgtagtagattggcaaacacccaacatttgtttaagtatacctctatgccatttctcacaagcatggtcatttgagataagtgtgttgttcagaatagaaggagcccacacctcacagccaaaattcaggataggttgtacaagagaatcaaacaggtgggtgagaatatcaatattgtatatctccatagtatggcatcgcctacgaagcatgtggtgtgccttttgggccttagtgagcatcctagaaaaagcagcttttgcacgattgcttgagtcaccatccacaaagagggatcccaagtagataaaagataactttgtagaaagttgtgctccatcatagacaaatttgtaatcaggatccatgcgggcctcatcacagaattgtttgttgaaaacgacaatctcagttttctttatattcacagccatcttagtagcctcgcagaaatctctcaggcagtcaagcatcgcttgcatatctgccggggattctgccattatagctaggtcatcagcataaagtaacagttgcagaatctttcccctaagctcagcccctacatttgggagcttggattggaggaacgattcaattctatcaatgaacagaccgaataggagtggggatagggggtctccttgtttaactcctacaagggatggaaaggaggatccaatgtccccatgtaggcgaacttggaaaacaacatgattatacatggacttcagaatactgagataggggtccttgactcctagccttgctaagcaatcccatagcaagtctctgttgacccaatcataagccttcttgaaatcaacaaaagccacaaagagtggttttttcttttctctatatttatctacaatatggttaagaatgaatgatgcatctgcagtacccctaccacttctaaatccatattggccagcggctctgaggttgaattcttctgaccaatcatctagtctacgtagcatgcaaagggagaagatctttcctatggagttgctcaccgcaagacctcgatagttgtccttgtcatacacactgcctttggatttgggtacgggtaccaaggcagctgcagcccattggctagggtaagaagtcttccagatgagattaaacaggttagtcatagcttgtacaaatcgggagttggcctcatgggaagcaaatctgtaccattctgcagggataccatctaccccgggggaggagtttttccgtagggattggagaacagaaaacacctcctgggtggtaaagtcttgacataaccatgttggtgcggcctctatctgaggtccatcagcttgagggacaaagtccctagcatccagacttggatcaatacctacttgcacatcaaagaggtctgcaaaataatcagtccaatcatgaattgtgatatctgccgtagtggccttgttaggctcacgcacgtctttccaaaaacttttcggattatgccgaagattcgtatgaaggttctccatgcgtgtttctagccacttcctcttctttcttctgagaatcctcttgtactccttgtgcatagaaccagccaagtcagagctagagccatgttgatgttctgcttggcttgctgcctgtctagcacgattgcattcatcatcataccatgcgttcacgggcccgtgcttacgcttagctacaggtttgtgacatggtgtgcatttgcttatggctagttcaatagcactagcaatccccttctctgaatcttccatagatgagctatggagtgcattgtcaagtaatcggttaacgtctggatcacgcttaattgtgtgtgcatacatctggacatagttgtctttccatttcagtttgggcgaaggtttaccaccagcaggtgtactaatagtaccttgagaaggcctaagggcagcatctggtatgtggagtgtgataggcatgtggtcaaactttccacccccgggcctgagagggcagtcatgcttgggagccacactaaacttgactcctggggtgttgagaagactaggggcggctagcgcataatcaatgacagatttcttgtccatgccatctgcaaagaaggtatgtgcaccttgcatatcaccttctgttctaccgttaaggatgataagaccagttactacacatagctggagtagggccccccccatgttgatgaataaaaactcgtattgttgtagacaccactcggtccccctccggtggtcgcgacaacattaggttacaccgcaaggtgtgccgtacacgaagcggtttcatttaagttgactgtattggcgagaacgaatccgttcatgatcacatgagcgagggtcacgtttgtgatggttgcgggtgttttttccgttcttcgcgcggtttatcatttcacaatgaacgtgtggctctggctcgacgacttgtgcttcaaggaggggcgaccccgtgtgacgacacctcatcgacttgtacaggcgctttcaaggtgactttcgaagcccagcactcatccttgatcgcttcaacacgacgatagttttcagcgacctgcaccaaatcaactttgccttccattttggcaatagtgttccgctgggttgcgaatttgatttgctgttcgctgtcctgctccaattttaatattctgcgttcaagtacttctttcttgtgcatgaaatggtcattgatggattcaatctccttttgaagctttgcatcgtagtcaacagtgccatcatcttttaatggtgttcgtttgatgcaacgacgacgaaggtaatgaggagtgatcgtgatcgctgagtgatcattcatgtttgattacttatcccaatcatgatgcatgatttttttatactcaataatgcaacttgcaagcagtagtagtagcaggcgggtgtatgtcctcagttgttgagtgtagtgatacaccggtcccccttgcaactctgtctgaacagtgcagccaacccgagaccgaatatgattgaaatgattgctgaccccgtcttggtatcgaatgctttggtaatcatgacacttcgtacgatgtgggtgtggataactgggcgtagataactgggcctccctggtcacgtaggtgtgcgacatgttaatgtggtcaacgaagtgagtccgtacagtggcgatatgtcggtcacgtaggtgttcgatatgtccaggtgaaccaacgcagtgagtccggacagctacgatatgtcttggatattgtcttcgatagccgacattgattggtagggtacgtattccacccgattgacaccgattttcaactctttgagcctgcaaatgcgtgataatgcgtattccaaactgttataatgtcttaagtggatccttgtgacacaccggggtgcggcgcatctccactgtttgcaaacgagaggcacttgtttgaggtgggattcgttcgaaatcgcattagatagaatgatctccaatacatcttcattgatttcttcaaacgaactcattcgtttgtgaagtgttctgtgctgtgctgatggttgtttacactgaagaatggttgtttacacttaattcgaggactaccatacgaggcgaggcgatgagggacgagaatccgccaccgcatccgtgcactgaatattaatgaatggccccgacaatgaattcgacagagagagattcgagtttgtatgtctgtaataatctgtatggattttgcgttgtttacactcgtttttcgaggcgcacatggaacacttgtcgtagattcgttcgccatcctgttcggttgaatctgggtaggacgactcctgcatgttggggagggggattccgtattgtttgcaaagatcctcattgagacgcctgtcattatcgttcagggaattccattgctcgatagtcatgcttgacagatcgtacctcacttgcttctcaagcgcttctgcgcgctcagtctcaagctcaagctcaatctccatactattcactcgagcagcatctaccttctttcgagcgcgctgagtctcaagctcaatcttcagtcgagcattctcaagctcaatctccatactattcactcgagcattctcaagctcaatctccatactattcactcgtgcagcatctgccttctttcgagcgagctcagtctcaagctcaatcttcagtcgagccatgtaaataatagcgaaggtagagatgcagacaagtagttgagaattgtcaatcattgtttataaattctgatgattgtttcttaagtcgtgtgttacgcaatctcaatctctgggccatgtactgtagtgtaccaccactccggcaaaagattcaaacccacctattgaatgcgtttccgcgatctccggtctcagaatcgcgagagaactttgtgaaactcgcaagcaagccaagtcgtaggtctgctctcgaagcgtctagggaatatgttggcgtctgctgtccttagagtaggcgtcatcagccacgcgtgtctcttcttgtgtcctcctccgatgatgagcaattcgtcactcaaccctgcttgtgtttacactacatttccaatgtcgcgtctcggtgttgtgcatgcaccgttaggtgtgccgtacacgaagctgcttgagtgaataagcttgagactgagttcggtaggaacaagctcactgtagataaccaacagcaattgcatcgtctgcagtaacagtaattgcatcgtctgcagtaacagcaatggcatcgtctgcagtaacagcaatggcaagtgctgctacgtgtgcagcagcagcggcagccgcagcagctaatgcccttgccttggtgagcgaacctgctggcgagggcttgacatagctctgcatctgcggcacaatattgtaaaggtcctcgttgccgagcttgattgtgtaggactcttgaatggacacgtcgtaacacctggtatcaaaatcagtgtcaatgatctgctgaactagtacctgcccaccccaaacccttttttttcccacagaaaggccagctggaggattgcaccgagctccatccgaatacttgaatgacatcctgactatgccaaatgcgacagcttcaaacacggcccttatgtcgtcggtgatgtacatgtcatcaggtccagtcgaccccgtagccttttgaaagctgatagaaccatgcatgatgtccggatcctgcatgttgttttttgacattaagtatattgaatcaattccaattctctatgtacaacttggacagacggtcgattgttgtacacaatgccggaggctcacatcaatccctattttaaacgtgttcacatgaacacatctgaaaagactctccatctctgtatcctggggtagaaatcgaaccctgtctgatgagaatgataccatgtttatttttcacaagtaatgggcgttcctgcctcccggccgattttgactggttgcgaaacatggtatggagcggatttgtgattccgttgtgctgatgtctcaagctagcgagtcgttcaggaggctctaaatcctgattagaaatttaaaaaaatcggccgggaggcaggaacgcccattaagtataaaaaatcaagactatgtctagtatattgctttgcgcaccctatctcttctgtgtagaacagaaacaatggataacttcaagaagttggatacaagcatgtatgcgtgtttcacagtttcaggcagtacgtggaatggcaaattttttattttacatggaacggtggtattcgataatgaggatgacgccaagaaatgtttagaaatactcgacctgtacaaagagacattctacttcaggagtacatcgaacgtgatgaataagactatgttcacgtttgacggcacgacaatccacctattatctggtgccaaaattgagtacgaccagaatgcttctcgattgaagaagattgtagagatagaaaagacgtacacggcaaacacgtgggaatacatggacaatacgtaaggctattcgggtatcttccgctcaggaaaagggcattctggagctgcttgctgttatgtttttgtttgcagttgtatattctgtattatccatgttattatgaagctaaattctcctcgcacgtggagtagtaaatgtagtacatagagagaagagtaagtaatgcggtgtgggttgttttttgtctgcgtaataaagaacccttcttctcgttaatttttctcaatattgttttttttttattttgttttttgttttttttcgatcgtttaagttttctgtttttgcgtaaagtggttattaaaataatataatagttaaagaaaaaagtttaacgacccccatttgcactagcgcgcactcctccttccttttttcaacaataaccggcacggggcaccgggggccgcaagacacccacatcccttttcgtgggaaaggaagggagcaatgaaatcgcatcgctatttttccttcgattatttattttcatttggcgttttccatgctttggtttttttttttattggtttagtagccttttttactgcaatatcatatttatttcacgcctctcttcagcttccttctctcgttttccttcctctcgccctcaaacaacgacacgaactcggtgccgcaatcaaggctgtcgactccacgaactggaatacgacattggttgtcatgtgcgccatgattgctgtcgagctgctcctatgctatataatcccaatgcgcgcgtttacaccacttccacgagacagacgatgaatggacgagacagacgatgaatggacgagacagacgatgaatgtgtgtcatgaatggacggacggacggacggtgtggatgcgacagttttccacagttttgcgtgtgatgattgattgatgccttgacacacttggtttctgcagctcaattcccctaccccactccgtggggcccgcgatttccctatcgatatacgagatctattgtctagcagacctctgcttgacatgtgatcatcgtttgcgattactttaccgtgtttcccgtcatctgtgagtgatatcttacagtatcgaggtattgacacagtccaacttacagtggtggtgtttcactgccaggactcgaacccccttgtatcactcaaatcacgtgcatgtgtgtgtgcactccatggggcgtacgtccaagaagaacaaaaatgtgcagcacacacgtatttcgccatgcaaactatctggtgggcagcttgtgaaggtgacatgcaaccgggtactggactaccctcatgatggcatcgtaagccgttcttacagcaaggagtacacagcgcgcgatgcgtctgacgtgctgaacagtgtgcatgtgatccacttctgccgcggtgaccctcagtctctatttgatgatggaagtggtaaggcgccgttggacgagctacgggtgcgtgagacgtccctgtcgtggtttgtggcacagggtcgagatccacacatcgagtccggcccgccatcaccgttctcacctgatgaagtagtgaaacgtgctagggcgtgtttgggcgctgcggactacaaggctcgcaagcgtaactgccagtcgtttgccacacactgctattacggggtggcccactcggctgcagtggttagggcaggctacctgatcgcaggggcagttacagtcagatacagaatttatgggacacccttaccggtgacccttgaacccaatgggtaggtcagctaaaggttttgtatcaaggtccaatccttcgtgtccttcatcccgtatttcagcatttaagctggcccagaggataacaattgtaagctgctaactgacccaggtgggtcggttggttgagcgcccacatttgcctctccggaaactgtggtttttgggtgggcgatgaggagggcacacaaaatgccgctggtcgctctttcccgtccatccacgtcgtcagaagcagaagaaggttcttggcagcgttcatgtctcggttccaggttgcaccacagcgcaccatggatgatgcgcttttgacactgttgcgaaagtgcagtactttgtggaccttaacgttcttcaccaccgtcttctgcttctcaaacgttgttggtgttgtaggagccccgtcgatgagggcggagggctcgttttgaactctgcgccagacgacgctgtctgccttcatgttgacgagcttctgaagcagccgtggcaagtacaagaagtgttgcgttcgtcgacgttttgaacagaacattctgacgacgtgaaaggcacttcctgatctctttcactggtcccagaacacgaacggactgatgccatagccctggttggaccagttgccgaagccaacaacggtcttctttgttttggagcaatcacatcgcataccttttcttcaatcgttttcttctgtgcttttggagcaatcaaatcgcataccttttcaatcgtcttctgtttgcccacatatcgaagaatcgcatcgatcggtaacctctgttggctcggtgttgaaggagggtcgggaggcgctgaggtaacctctgacatggtcctgcatgtcgtgcatactgctcgtagtcggcgatggaatggacttcacgaggtcttgcgtatcggcattccatttgtttgtgcgacgattgctggtattgtacccagctgcttccctaaagcgggcagagctgaaagactcgactcgaccgtcagaagatgctatagtgacgatatctgtcatacccgggttgataccgacacgcagcgcaccctggcgcaaagaagcgtcctggcagtcttcgatacttgcgtctttgggataccccgcattatctcctcctccttctccagcgatatctttacccacctgaggcttcatttggacggagacccctttgccgtcgctgaggattcggttgtcaaaatgagaccctttcg

SEQ ID NO: 195 - DNA, 22382 bp, unidentified
  source 1..22382: mol_type = other DNA
  misc_feature 1..22382: note = Fanzor polypeptide
gcccgatattcctcacgtactcctccgtggtacttaattcgcgtacgatgataacagcgggtgactttggttaaagctgtgggtcttggaaatgttgttaacacatccgatgattggcttgaaagaagtgtgggcacgtgctgccaaaaccattcattgttctatcctcctcccggtggggaatcatgttcgagcctgtcgcatgttcggtgtatagtaaccttgaacacgaacgtctcgtgcacgagttttggtctcctctgtcatcatcaatcattccaggcgccgtctcctgacggcgtttgtttacgtgccaataatgccaataattgctacacttgcgacgatgtcataaatgcatacaaagcaaaaggatggacatacgacaagaaaacatttgtacagtgcaaggagccggaatacttgggatgtttcgctgacaaaggattcaccggcatcagtcgacctctcgtgggtgccggtcgcacaaaatccaaagacaaggccgtgatattaaaaaattgcgagaatgcagcaaagataagggggcacaacatctttgcaattcaggataataactcatgtttcacaggaacggaagcatctaagagttacgcgcgcgacggcgtaagccaaaactgcggtactaatgggacaggggggggatgggcaaactctgaatacaaaatataatgggtggtcggggggaaacggggaatggtaccgatgcgtttacacttgacggaatacttaaatgaaaccgctttctggagtgtacggtacaccttatggtgtgccgtacacgaagcgtattcattttagtattccgttgactgtaccttgacccagcagttccatgcagggcagccttgtgattgtgagagcagaggagcggtcccggtccgagtaagtgctggtttctggagagaattgcagtcctcgtacctcagggtaccgcttgatcgatttgttgtcgaaaaaagagggggctaagccacccctcctgtgtttttcttggatttgtttacgtgtgcagtacaccctcactgccaactgttcgcgataagagacctgtggaggctccttcaatggggtgtgacccaacaactcgtaaccttagtcgaatctgacccacctgggttatcctttgggccagcttaaatgctgaaatacagagatgaagggcaaaaatatgtcctcgcctttagctgatctacccattgggttcaagggtcaccggtagggtgtcccacaaattgcgtctccctccgactgtagtttcattttaatgttcctttgaatgtactgtattcaacattttgacatcatgagtacatcatcatcgaatattataaatcaggatcaaagagcattcggtagcgacatacattcgcctcgtcctcctcctaatattcccctaatcagtgttgttgtatccaaacatgacgaggggccgccacatcatgatgacgagaatgagcaagaacaacaaaataaatccgcgccgacagtgttatcgctctccaatcgttgtgcagccgaagtcgtggcatgcttcttcttccacatattggggtcgttatcccctacaccatggtgcaacgcagccacgttgtccatcatggttctagcgaccgcccgcatctccggggcgcacctgaatccttgcgtcacatgggttttcacgttgatggggtacacgcacccgcacgaggcagtcctctacgctgtatcgcagtacgttggatgcgtcttaggcgcaatgtacctctcgctcatgatcccgggcgtcagcgtggggggacctggcttaggatgcttctcgccaagcgaagggatcacagacaggcgcgtgctggctatcgaagggctcggaacgttcgtgttcacattgtgcgtcttcgcggtcgtgtggtacactcaaaacaagcacgggtacggtaccatcggtcctatcatgatcggactggctctccttgcaccagcccttgccataggaccgctcaccggtggtgcaatgaatcctgcctgcgtgttggcaagtccgacggtcttcaacgagggcgcaggatgcaagggagagttcctgggcgtgtacgtgggagccgagatgctcggggccacgttgtccgcgatatgcgtgctcctgtgcttcggtttggcagaggttccttggtacccgtacagtgtgaagaaggttatacggcgcatcgtggaagccgcaagacacccaccctttgtaacgtactcattggtgcggggagattgaaccattaattcctcgcgtaaacccctaaaccacagttaacacagcatacatgggtgacaaacttaatcaatcaatcaatcaatcaatcaatcaatcaatcaatcaatcaatcaatcaatcaatcaatcaatcaatcaatcaatcaatgaggtcagagacaatttcaccattcgcgctgaccgatgaggaatgggcggatatcattaaatccaacacattcacgcgtagcagagctgagaaacggcgctttgatcatctgcaagaggaatctactgaaaacatgaagaccatcttgaacaaattgccgaagatcaagacgaagaagatgtagatgtagatgatatgtgatacaatcactgtagttaattggattgatgggacacacgtccacattgtaacatattttctctctctctctctctcacacacaaaatcttgacataatgggcgttccagactcccagcggatttttactggttgcgaaacatggtatggatcggaattgtgattcctctgggctgatatctcaagctagagagtcttttctggaggctctaaattctgagtagacatttcaaaaaatccgccgggaggcaggaacgcccattacatctcaaaaatttagtagggatcctgtgagagacgcttttcaatttcgtccctttcatacatgtagggacattcttgttcacgggcatgttcctcatttgccaaggcattgattacatcactgacaatttgggtctccttattcgatatgttgttcagtgattcaatgaaggtctcgaagattttcttacgctctttctgactgttctgaatgcgcttgcgatacttgaacatacatgaatcttcgatgcacccctggtgcttctcacacccttcatttccgtccccacaaaactcgaggccatctttgttaaggttgtgatgaaaaacgcgccgagggcatcccgtaaacgtaattcggacagtgcgaatacaatctcgggagggggagatcttacacatcactctttcgttgcaaatattaaacatttgtgcttgatacaaatgtacttacttacttcctgacgcgattttttttagtgcaatcgtccgcgagtcaatgactcactgagctggctggctgacatccttgtcggaacacacattgcggacaatctttatctgcagataggctctctcgattattccaagtcttcatcagaacacacgatatgcagcagttgatacaatgtataaaagttacgaacaacaactactaaagtgcttactcgcacatttacgataacacatattttgatgaaagtgatacaatcgtgttgaaaataaaaggcatattacatattcacactataatccacagtggagcgccaagagctaccatgggtaatccttcacaacagcaacatgacacaagcgcgcccatctctccgcaactggctgagcaggcgcttcaccggtttctatcccagcgccgtgtacataaaggggacgaattcacacacaacggcatggggggaggacgctcgtgcagtgcaggatcatactacatatccgcatccgaccaggaagatttccaccgtctgtaccgtgaagcagtaaatgcaggcgcaccggatctctcgctcacagagaagcaccgccacatcggaccggtcgtcattgacctagacctgagacttgattcgggatgtattggaggcggcagggcttctcctgacaagtccatagtggacattcgctcattggcacctcagatatgcaaaatataccttcaacgcatccgagaatttgtcgacgctccgcgcatccgtttctttgtcatgtcccgatccaaggctcctatgttcttcaagagcggcgtgctaaaggacggactgcacatcatcgtcccggacatcgtgacccgcaccgaggtgcagtacctcctcagacagaaggtcctagatgacctatcggccctgttctccacacacatccctggcttgttattgcgcatcgaggatgtcgtagacgaggcagtcatcgaaaagaacaactggatgatgtacggaagtcgaaaacctggtgccacgccgtacaccgtgcacagcgtgctagagtgggactccgtctcctcactagcggaggtcccgatagcggaagacgaacaacatctctcagacatactctctatccggaacaagtacaccgagagcgagctaagagaagatagtcttgatgaggtgactgtattctcacgcacacgagaacatcgcaacagaatgcgagagacgatccagaatgtagtcatgcaggaagacgattgtaggaacaaccacgtctccgccgatgagttccttcgcatttcccagattgtgatgatgctttctccagctcgcgccgactgctacaacgagtgggtccgcgtaggttggtgtctgcgcaatatagatcatcgcctactagacaagtgggaggaattcagccaacagtcgccaaagtatgtgaacaccgagtgcgctcgtttgtggaacaagatgcgcaaaggcggactcgggataggcacactacatatgtgggcgaaacacgacaaccccgaggcgtacccgaaccttatccgcaatgatctacactcgctcatcatgcagagctcgaacgggacgcattatgacgtcgctcgcgtggtgcaccacatgtatcgctatgattacgtgtgcgcttccatcaagatgcgcatctggtacgagttcaggaaccatcgatggcacgagaccgattccgcatacactctacgcggcaagatcagcaccgaagtggtcagcgaatacacccgcgctaccatgaacattcaatccatgtccctgacggttgatgagtctgagcagaaaaggttgatcgagctggctcacaaactcaccgccgtatccctgcagttgaagaagaccgctttcaaggacaacgtgatgcgcgagtgctgtgagttgttcatggtcgagaagttctgcgacctccttgacagcaactgctctctggtggggttcgagaacggagtgtacgacttggagcgtttcgagttccgtgacggtcgtcctgacgactacatttccttctcgacgggttgtgcgtacaccccattccatcgcgaccacccagtggtcgccgaaataaacaagttcttcgcccagacgcacccacgagaggacgtgcgcacgtaccttctaaggacgctcgcggattgtctctcggggcacatccggtacgagcgcatgaacgtgtggacaggaagcggatcgaacggcaagtccatcacgatctctctcatggaaaagtcgcttggggactattgctgcaagttccctgtcactcttcttacgcgccagagagcggctagcaacgcagccacttccgaaatcgctagggccaaaggcaggcggttcggcgtgctgcaggagccatgcgagaacgagcacctgaacatcggactaatgaaagagttgtcgggaggagataccattcagtgcagggagttgtacaagccccccgttgagtggaagccgcaattcaagttgtttctacagtgcaaccatttaccttcggttccttcggacgacggaggcacgtggcgacgcatacgcgtgatagagttcaagtccaagttcgtgcccaagccatccccggaccaccctaacgagttccccatggaccttgaactatcgtcaaagttggagcattggaaggagcacttcgtatcgatgctgataaacacatacacggccacgttcgggcaggcgctcgaggagcctgagcccgtcatggcgtgtactcaccagtaccagcgcgacaacgatcactttgccaatttcgtcgacaagtgtgtagagaaggtcgaagaagacacggtatcggcggaaacgctcacgctcgacgcagcattcgacgagtggaagatatggaacaaggccgagtcggacggtatcacgggggcaaccaagatccggagaggcgcgatgaacaagtacctcgaccaggcgctgaggacgaaaggaattcgtgtcaagggggtaggaattgtttacgaggggttccggttgatcgaaccagagttacgttgatatttgccatcttgaggaggcatagacattgaaggtggcattccgaacgggtatcgaggaagcgcatcatacgaagaggggccgttattattaccaccacgggcgctagatctcgggccaacgtttttagaaatggattgttgtgttgtatcaccattgtccccaccattaatgtgaagtcgttcattgtcgcggccgcgcccacgcccacgcccacgcccgcgcccgcgcctattctcattctcattctcattctcactcgcactatcactgtcactatcattgttgcgggtgcggtcactgtttttgcggtcattgctgtcgctttcactatcgttgttgttgtcacggttattcttgctttttaggggtagggaatccggatcaaacatagctcggcgtttcatattgtagaccgctgatggtatgaacggtttgcgtgacacagattcttcttcatttcgcttgatcgatgcgtcatctatattgttgtctacttcacgacatttaagatcttcgcgtttctgaggactcctcactccctgttctttcgcgttcgcgttcgcgttcgcgttcgcgttcgtgttcgcgtttttttttcgcgtttgttttcgcgtttgttttcgcgttcgcgtttgcgtttgttttcgcgtttgttttcacgttcgcgttcgcgttcgcgttctcgtaagcgttagcgttagcgtttgcgttcgcgttagcgttcgagggggagttcgcactcggagaacgctgcacaaacatagatcgtaaaccgaataaacctgataccacgattatcaacacaggaattgtactcgccattttgtatttaaaacggatcactaaaaaatattcgggtcaactccggcatccggttacaacgcggtacttataataagagatatgatggcatctttcttcatggaggcaatagcagttgctgtcacaccaggggtgttcgtactagaaagaagtcttctaagctcgtcgacacgcatagacttgagtttaccctcgttcaaattactgggtcgaagagattcactatcaccctcaataggtactatttcagtctgttgtggaaaggtagtagcggaaccagtatcggtactattagtaccatcagcatcaacatcaccaacatcagtatccgtgatgacacaagaagtttgtggggtataatttacagaatggtcctcgatgcatggtgatcaattggaggaaatgatcgtcccgacaatgtcgatcatattgtctacctcgtcatcttcattgtcctcatggtcatcggtatattcttccccggagtcggaatcgtcttcaacatttgcggacttaccgtcacccttcttcaagacaataacgtgattagtattgttacaagtctcattaccattgggctcattatggcgcaacttagaactcaccaaagacagacactccaatcgaaccatctcgatacgcttttgcatctttgtgtggatgtccgatatagacatgaacacatacaacgccgtgcacacggccaggcaagctgtgagaacgctccaagggatacgtgttacaattgtcagtgccattgaaaagactttacatgtccttacaaatacaaaatcaacgaacgattgaccgcgcaacccgtttttcctacaaatgaaaccgtaaacgataacgagacgtttgatttattgatttgcgttcgcgacatgtatcacgtgtcactacactcggtggaacagtaaaatgaaaaagactcaataacgttctgcattgtttcaattactgctcttgggtcttgaagaagctttgggtcttgaagaagctttgggtcctgacgaagccttggttcctgacgaagctttgggtcctgaataagctttgggtcctgacgaagccttggttcctgacgaagccttgggtcctgacgaagccttggttcctgacgaagccttggttcctgacgaagccttggttcctgacgaagccttgttcgcggatttttcggttgatttattattctttttggactttgtagacgactttgttggcgtcgtcttggagatacttttggtggaacgagtaacaacatcctttttttcgggctttttggtgaaaatatcgtttacaatgttaactccttctctagcacctagcattaaaaaagggactatgaatttttgaaattcagttgcaattattcctgcttccaacataggaaggttccgttaataaacttaacggaacataaaaaaaactgaaacataccaaaaaactgtacaaggacaacgcttcaatggacactctcgaaagtaccgacaaaagaacgatacggagtctgcaggatggagagccgtgatctaaaaaagaaccacgatattctcttgcaatttgttgattatattatggtattggtgttccactgccccgtggatttctacaccataaggtgtaccgtacacgaagcggtttcattttagtattcctttgactgtacagtcggagacacaaattgtgggacacattaaaatgggcgttccttcctcccggcggattttttaaaatcttgtcaccctgacaccgtttaacacaggacatgtcagggagagaccgataagacacagagagacaggcagtcaataggaagctgacactacagtcggcggaacagtaaaatgaaacatatatcagatggaaataaatgtacgacatcgccgttagaaaattggcgttaagaatggtcgctgacttgggtgtgttaaaaacttctgtgtttacgaacatcagtcgttctactctgtggaggtggaaacgctttggtgtaaatcgaaaacgacgtgaatttgtaagcaacctttttgagacgaataaggatttgttaaaatcgtttttattttcaactcaatgcacaaccgcaagaggcgttgttgcttttttcaaaagtactcacaatgtacgattatcaactaaaacagtgtatcgtttcataaaactcattggttttacaagaaaaaggagcaaactccgtggacagtgtaaaggggacttagttccacttgtcaatgtattttgtagtaggtacaaggagacaatcaatgctgggaaaattttagtatcagttgacgaatgtgggtttagtgagcgtctcaagccacattatgggtattcccctgtaggaaaacctgttatctttaaaactactggtgggtgggtacaccacagtttgttgatggcagttttttcagatggtaggaaagagttcgttgtgaagaaaggatctgtgaagaagaaggacttcgttgcatttattgaatcattgagtttgtgcaataattcagtagtaataatggacaatgccagtatccataagaaattggtcctcagtcaccccgtcaatatttgttacacacctccttacagtacagaattcaatgctattgagctatgcttcgctaaggtgaagagagactttcgtcgtttgaactacataccgaatgaaacaaagacgcacgtgtctgatatgatttccttagcattcggcaacctcactgataaaattattatgggttgttttgaacacgtttggaacacttatgtgtataaagcggtccctgacgtattgattatgaaagatggcgacgaaacctccgacagtcgcgaaattgaaggagctactgaaattggctgaagtaccatactcgtcgaagtccaacaaggacgatcttgtccgtttatgcgacgacaatggtctcatcgccagaccccctccagaatacaagacggtggaaaagatgtgtgtcgtgaaatgcgccctgaagaaggcaatgagtcttgacgatgaagaattcggtaagtttagggagcatgtggaccagctcgtcaatgtggtgagccgcatgttacggcggtccagtctggtgctgactttccacataacgagtctattagagaaaggtctggatattccagacctgtacaacatgaaagatacctactggaaggattggctccgtatcggggtagacggaatcttccctgatgaggaaagcaagatatcgtacgaagctgtgaaggactccatcggcgatgtaattggtaatgacgacgctgactacatcaagtcttatccgatctatttcgatcaggtattgaactatgcaggtcaaacattgagcactgtcgtgtcaaacaacgcatgggttcctttgataccacgtctggccagactcacttccaccactttaaataaattaaatgccccgaagacgctggacacatcgaagatcattcggggatacgacgtgatgcaggctattcagcaagaagtccaaaacatggagggatggccagagtctgttcaagagtacgtcaatgaagttagggagatgctgagtgttccagatggaagtcgagtttatgataactatggcaaagacatggactttccgaccatggtccggtttaattattggatacagacacggttggaggatatggatgcacgtcgtatccgattgatgcccatcttcaatgtccaacgggtgcatgttcgccttgacctgaagaccctcgtgaacctgttcaggcacatgttccccaatgaccagaacatcgttgagctttccaagtgggaacatgtaaagaatcccgacagcttcatgttgccccagaggcctgcacagaagaagaaaaaatcatgtggtcctggtgaatgggaggcatacaagtcggtcctgaagcagtacgatgatgatgttaaggatatcaaggctactgacgagtacagacatgcaaagggtttgtatgacacgcttgtgaacgcccgaaaaacagtcgcaggttccttcttcagaaaaccacctgtcaagaatgggtgggttttcgactgcagcatctgtactgacggagtctctttgagcatgcagtacagcaagacagtacaggtccttgtctcagatctgaagaagacctgtaagaagcctcgtaaagaagaaggtatcaagatcgcagaaaaatacgacggctcacttaaaacgatattgcccgatatgggtatcgtcgtcctgggtgtggacccaggacggagcaacatcgctacggtaacgtatttggcagacgataaaaataagacatggacgctgacacgtggtgcattttaccacaagtcgggtatcaagaagcagacaaggcaaaaggaactgcgttttgctgacatgattcctatgtgggagtctctgcgtgaaaatggagcagctttgagtacatcgaggacggataagatctccgcgtacttgtcaaattacgctaagttttctgacgagtggtggagattggctttgcgacgccgagaatcccgtgacaacttgcagcgttacatcggaaaacgaaaggtcaaagactctttctgggcaggtatcaagcggtgcatgatgaaagaacttcctgatatgaagggttgcgtggcctacggatctgccatcacgaaactgaagcctactggaccgggagaagttgcagttcccactggggccatgttcgcatcgtgtaaaagaattttcaaagaggacgtttctgtgacagatgagttcaaaacgactcttatgtcgtgggagacgggtaaagaaaaagaacgtgtttacaagatcccaagtgtttgttcagcagacgtgaagcttaggttgggtggtgaacgttttggtcacacgaaatcgaaaacgatgccaaaggtcgctgattatcgcgaccacttaggggtaaggttgtacaataaacgtaaaggcgcacaagagaagcacaggaggggtggcttcgccacttcccttgtcgattctcaaaaatcgatcgagcggtacccagaggtacgaggactgcgattctctccagaaacatgcatttactcggaccgggatcgctcttctgctctcacaatcgcaaggctgcactgcatggaattgatgggtctaggacgacctcttccatttgcccacagcagctctgttgttgttgatgaataaaaactcgtattgttgtagacaccactcggtccccctccggtggtcgcgacaacattaggttacaccgcaaggtgtaccgtacactccagaaagcggtttcattttagtattccgtcgagtgtaaaggatgactcagttctacgggaagctatcactacagtcggagacgcaatttgtgggacaccctaccggtgacccttgaacccaatgggtagatcagctaaaggcgagtacatatatttgcccttcatctctgtatttcagcatttaagctggcccaaaggataacaaggcaagctgctgacaaacccaggtgggtcggtcggtttagcgctcacactcgcctcgatggaaactgtggttttgggggaaggcgagggaacacagaatgcctcaggtcgctctctcccgtccatccacgttgtcagaagcagaagaaggttcttggcagcgttcacgtctcggttccaggttgcaccacagcgcacattggatgatgcgcttttgacactgtctctacagtgcagtgctttgtggaccttgacgttcttcaccaccatcttctgcttctcaacagttattctgtcgaccgtttttgtaaggagtatttagccgttccgacatcggatttgttaagcatcgattaggcgggtttttacattggtgacacttgtcgcagagggtactgtcaacgcggcaaacgtttaaatatccaaatttctaggacattgcgaatgtccaaattgacactaattgctgccgtttctgctaaaggtatcgttcattacaagatccttgaatgggcgttcctgcctcccggccgattttgactggttgcgaaacatggtatggagcggatttgtgattccttggtgctgatgtctcaagctagcgagtcgttcaggaggctctaaatcctgattagaaatttaaaaaaatcggccgggaggcaggaacgcccattcttgatcacaattgcaagaaagtcgactttgtacagtttgtatctgagttacatgtacagcggggtacagtcgctgtccttgacaatatacagttccatcattcaaaggagacgatttctatgttcgattctgtaggaatacgaccactctttgtacctccttacagtcccgagtttaacgctattgagaatgtctttagtttgctcaagcgaaaatatcgctgcatgtgcccaataatcccagatgtagcagatatatttgattacagtaacgctttgaaaaggattattgatgcgcacgatgttagccatcagtttgacttttcagggtactttgaacatgtaaattcagtgtctttagatgccttgaattttttgtgtcaatcacctgaagacagtatctgtattgaattggtcaacttttcagaatccccaaatataaggtgtcccaatatcaaatgtccctagctgtatgggaagctatcagggccgatagttctaagggagtacataagtagtcaccaagtcataaaacgcttgagagcaccgcaattcatgttctgctcatattttagagcctccggaacgactcgcttgcctgagatatcagcacggaggatcacaattccgctcaagaccatgtttcgcaaccagtaaaaatcggccgggaggctggaacacatcccccatcaggatgggatggggctcacacacccttgatagcattgatagccttcttcttcaactgagctacctgctcagcatccaaccgaaacctcttctgcttgagctctccatcatctaacaagagaaccatcaaaaagtcctcgcgacgatatttaacctgctgtgaacgctgattcttcgggaactcaaacatgccatcgacacactcagaatcggatttgatgtacacgccctggacgtagaaatatccattactctctctgatggaggtcaccttgaacgcgtacacacgacgcggatcatctccgtcgggagaatcactcaaacgcacagcgtatgggtcagacggttcgctgcaaactgcaaacccgacttctccaggcttgggaatctcgtcatcatcatcatcatcatcacaggtgtgtttcggctcggtgatagtcatccgcttggatgcgtgccggttggatgcgtgccggttggatgcgtgccgcttggatgcgtgccgcttggatgcgtgtatgggatcaggaaggtcacacgctgtctcttcacaaggattggcattgaagtcccatagtcgttctcgagatgggccggcgtccccgagggcccgcacaggtaccgtgttgaatgccagtgcaccgtactttttcatcgcggatgggtggatgtaaaacatgagccgcagcatgtggctcagatccaggtcagccatttgtggattgtccgctgcctcattcagctgtttcggcttggttcctcgaatatgtccagaattagccaaccagccgacatcgtagaccttgtacacagcattcttgaatccaagcttccagttggagggaagcatgctcgtctcaatgaagacgtgtctgaggtccagcatcggagcaagaacggacatgctctcggcaacagtttgcttccgctgtcctccgtcgtaggcaatgcagtccttcggtttgatcaagtaatgggagttcctgcttccgaacggattttttattttactgaaatcttacgataaatattgtaagatcgtttttgcaaattaattgattttgcttttttggtgtattttacgaaaatatcttacaatttattttgtaagatcgttttcgcaaattaattgattttgcttttttggtgtattttacgaaaatatcttacaatttattttgtaagattgttttgttgtattcaggagaaagagactattcccttcaatttcagttgtaacattgatttgctcgtttggagagagagaaagttccttcgaagtattccaatacaaaatcaattgtagaggacagtcaagaggaaggtgaaagctgtttacaaagtcttgaacgcattgctcataattatttatctcacaactcacaactcaacagttcgaaagtacaacttagtacttatgactccgaaatctgtacttatgtgtacctcacttatgtataactcacaactcagaacttatatgtaccttatacaagtcagaactaataactcctaactcaggacttattattcataatttcatacctcatagcctcattatgtacataacacaaatttaaatctgcaaactgccatcctagaatcctgaaatcactcaaaatgtgtgctggatggtgcaaacaagtacactcgtgcaaacttgtgcacggtgctaatgttgcactgctgccaacaagtccattggtgctaacttctgcacttagtgctgacagatcatgtgctaactgacgccatggtgctacctgacacaatactgtctactctagattggctgtgggaacaggctatcacgttgtagaaagagggccaatgctaacttgttgggtaacaacagcgcctgaacaatcgctgcactagagtctcctcctccatgcccccatccccatcttcctcctcctccatctcctcctccttagcaatgtctacattgtctccatccgattgcacagcctctgccttggtgtccttctcaatggattggcagcttgacccctttgcatgactccttgctgtgcattgattgccatgcccagcaccttctctggcagcttgacccctttgcatgacctggcagcttgacccctttgccgggccccccccttgctgcgcatgcatgaaagactgttttgataaatcggaaaggctttgcttcatgccttgcgctttcacctcttttcatgccttgcgctttcacctcctttcatgccttgcgcaaattgcctttcgcatcctgcattgctttgctgagcatctgcattagcaccgggtggccctgcatggtcccgagttgcacctaattctcgcaccctttgcgcaatgcatttcactgctatgggaattcacttcagctctgttctcatgatctgctgctttgcctttcgctttctgcatcgccttgctgcgcatctgcattagcaccgggtggttgtgaataacccccgagttgcttctaattctcgcaccctttgcgcaatgcatttcactgtcactgtcctgcctagcaccttctctggtggatgctgggcagatagccaggagcactggcgctcggagcactggataggtctgcctacctgcatggcggttacccgcctgcacctgccagaccagaccaggacacgcgccgggccagcacctgcgccggagtactggcgaacagctctgcacccgcctgcaccttcctgaggcctgcctacctgcatgatggttacccgcctgcacctgcgtcagagtactggcggacagtcctgcatacccatatggcatgcatccttagctaccgttccaagatttctatagcgtctggtttggttatgaattgcagtgtagtggtagactgcaattgtagcccagacttagctgccttgtgcctgtgttgaccaagttactgcttgccaacaggttgccttgtttattggttaatctttgccgggagtgtggttgggtgtttatgttgtgattggtactttacatgacagtgacatatggatcatgtacacctgcagttcttctattttactgtgttcttgcccacctcggccacctacctatttactaggtttgttttagtggcccagtactgcaataggtaaagcaaagaggtgtagttgaggcctgcttgacttgcatagcatgactgatgaaatgtcatagcccagaagaatttagcccttttgcctgttccgtctaggcattcggtggatcaagttttctttgactggttttaggattgattttttaatgatagggaggactgtgtgtattccgattttttttttctcaatcattcgctcgttgggtttgacaatgctcccgatcatgatcgggaggactgtgggtattctgagtttggttttcctcaatcattcgctcgttgggtttgacaatgctcccgattatgatcgggaggactgtgtgtattccgaatttggttttctcaatcattcgctcgttgggtttgtcaatgctcccgattatgatcgggaggactgtgtgtattccgaatttggttttctcaatcattcgctcgttgggtttgacaatgctcctgattatgatcgggaggactatgggtattctgagtttggtttttctcaatcattcgttcgttgggtttgacaatgctcccgattatgatcgggaggactgcgggtattctgagtttggtttttctcaatcattcgctcgttgggtttgacaatgctcccgattatgatcgggaggactatgggtatgccgagtacaaaaaaaaaaaaaaaaaaaaatgccgagtacatgttttctgaatcattcgctcgttgcgtttgtcagtgctcccgattatgatcgggaggactgtgtgtattccgaattaggttttctcaatcattcgcttgttggttttaacaatgctcccgattatgatcgggaggactatgggtattctgagtttggtttttctcaattattcgttcgttgggtttgacaatgctcccgattacgatcgggaggactgtgggtattttgagtttggtttttctcaatcattcgctcgttgggtttgacaatgcttcgattatgatcgggaggactttgggtatgccgagtacaaaaaaaaaaaaaaaaaaggcaagtacatgttttctgaatcattcgctcgttgggtttgtcagtgctcccgattatgatcgggaggactgtgtgtattccgaattaggttttctcaatcattcgctcgttgggtttgacaatgctcccgattatgatccggaggactatgggtattctgagtttggtttttctcaatcattcgctcgttgggttttacaatgctcccgattatgatcgggaggactgttggtattctgagtttggtttttctcaaatattcgttcgttgggtttgacaatgctcccgattatgatcgggaggactttgggtatgccgagtacaaaaaaaaaaaaaaaaaaggcaagtacatgttttctgaatcattcgctcgttgggtttgtcagtgctcccgattatgatcgggaggactgtgtgtattccgaattaggttttctcaatcattcgctcgttgggtttaacaatgctcccgactatgatcgggaggactgtgtgtattccgaattaggttttctcaatcattcgctcgttgtgtttgacaatgctcccgattatgatcgggaggactgtgtgtattccgaattaggttttctcaatcattcgctagttgggtttgacaatgcttccgattatgatcgggaggactgtgggtattctgagtttggtttttctcaatcattcgctcgttgggttttacaatgctcccgattatgatcgggaggattgtgggtattctgagtttggtttttctcaatcattcgttcgttgggtttgacaatgctcccgattatgatcgggaggactttgggtatgccgagtacaaaaaaaaaaaaaaaaataatgccgagtacatgttttctgaatcattcgctcgttgggtttgtcagtgctcccgattatgatcgggaggactgtgtgtattccgagtttggttttctcaatcattcgctcgttgggtttgacaatgctcccgattatgatcgggaggactgtgggtattctgagtttggtttttctcaatcattcgctcgttgggtttgacaatgctccctattataatcaagaggactgtgggtattctgagtttggtttttctcaatcattcgttcgttgggtttgacaacgctcccgattatgatcgggaggactatgggtattccgaatttggttttctcaatcattcgcttgttgggtatgacaatgctcccgattatgatcgggaggactatgggtattctgagtttggtttttctctaaatatgaatctatttttgaatctgaatctgaatctgaatcattttctttaccaacctatttgtcttccgcagggtctacaatgactgtaccgtggaaataaaactccaatcggacgggaaggatttgcgatgcggcgtcatggacgaatggaccaaggagcgccaagtgccaatgaacatcgaagtcgttgttggtggaccagacttctatgttacggctacgcacgctcactggttgaggttttgcggcgaatgcaggcatatgtgcggagcagatgcattctggtcgacactcacccttgcggaagtcaagacagcccagttgcttgaagtcactagcattcggaggcccatgtcaggagctgggctataaggagataacaatttgaatacgatgaccttacagagttgtcggtgatctgtcctcttcgttgattgtaggaagctgacctcgtcgcgcctttcctgacttcttcgcggaggctgtaggaaatgtaaagagtgcagaagttacgcaatatcctatcgaaattgaaagcggcaagtgcggtcagcacacaatggttgtttcgaacggtgtacatcataccgcgtacgtaacattcgaaatgtacctgtcagatttaaaaatgtaacctgacccacggtgcagcagtacagtctgttcgattgctctctactggcgtcaggtgaaggcccttttggtgtacatcgaggtgacgtcctcctgtcgctaggaccaaactcctcgaaatcgctcctgagctttccttcgcatgtctcaacccacgccctagtttcctcaagctctttgtcggcgataaattcgccctcgccgaccctgacaggcttgctgcgcattgtcaaccaccaacccaagagcctgaatgtgaactggtatccatgatagggctcctaacatgggccgtcgaatgctagtgacttcaagcaactgggctgtcttgacttccgcaagggtgagtgtcgaccagaatgcatctgctccgtacatatgcctgcattcgccgcaaaacctcaaccagtgagcgtgcgtagccgtaacatagaagtctggtccaccaacaaggacttcgatgttcattggcacttggcgctccttggtccattcgtccatgacgccgcatcccaaatccttcccgtccgattggagttttacttccacggtactgtcgttgtagaccctgcggaagtcaaataggttggtaaagcaaatgattcagattcagattcagattcaaaatcagattcagatttagagaaaaaccaaactcagaatacccatagtcctcccgatcataatcgggagcattgtcaaacccaacaagcgaatgattgagaaaacctaattcggaatacacacagtcctcccgatcataatcgggagcactgacaaacccaacgagcgaatgattcaacaaacatgtactcggcattttttttttttttttttttttttttactcggcatacccatagtcctcctgatcataatcgggagcattgtcaaacccaacgaacgaatgattgagaaaaaccaaactcagaatacccacagtcctcccgatcataatcgggagcattgacaaacccaacgagcgaatgattgagaaaacctaattcggaatacacacagtcctcccgatcataatcgggagcactgacaaacccaacgagcgaatgattcagaaaacatgtactcagcattttttttttatttttttttttttactcggaatacccatagtcctcccgatcataatcgggagcattgtcaaacccaacgaacgaatgattgagaaaaaccaaactcagaatacccacagtcctcccgatcataatcgggagcattgacaaacccaacgagcgaatgattgagaaaaccaaattcggaatacacacagtcctcccgatcataatcgggagcattgtcaaacccaacgagcgagtgattgagaaaacctaattcggaatacacacagtcctcccgatcataatcgggagcactgacaaacctaacgagcgaatgattcagaaaacatgtactcggcatttttttttttttttttttttgtactcggcatacccatagtcctccctatcataatcgggagcattgtcaaacccaacgaacgaatgattgagaaaaaccaaactcagaatacccacagtcctcttgattataatagggagcattgtcaaacccaacgagcgaatgattgagaaaaaccaaactcagaatacccacagtcctcccgatcataatcgggagcattgtcaaacccaacgagcgaatgattgagaaaaccaaactcggaatacacacagtcctcccgatcataatcgggagcattgacaaacccaacgaccctattcgcttgaagtcacctactacactgctagctgccaggcagatgcctggtcaccagctgctagagtgggtgtcggacctaagcccggcaccgttattgatatagctataggctgtatcataacattcccccgaatccctggtattctggtacccagaattcctgggattccacaacacaagtcataaggagtaagccagacaaatatgcccgtggagaagaaaagtagggggaaagcaatcctaaaaccagtcaaggcgtaggtatgacatccgtgaaaaactgtctgaacagtatccgaagctcttcttgcacgcatccgctgatgcaatggacaacaagaagactaatcttcctcagtcacgccacttctcacatacaaagaagaccgcaggaggtgaacttctaaagacacgcatcatgggtgagtacaaatacagcgcatgtaggacatgtcctcccgatcataatcgggagcatacacagtattttaaacttgaaatgattacttaacaaaataatgctaatattctgacttcatgtttccttctatgttaactcaggattattc

SEQ ID NO: 196 - DNA, 22379 bp, unidentified
  misc_feature 1..22379: note = Fanzor polypeptide
  source 1..22379: mol_type = other DNA
gggagcatgctcttaatgtccatggcgttcatcaccccctcaatgagagcgaatgcgtctactgcttcatcgtgtggcttgacgccgaggacctctgctacaagtagcattatccgctttaacgttggactgtcagtgcgctcagccatacagctagggacatttgttgttggagtaaaaatgaacgcatagtgcttcttatgtttttttattatcgggaaagatgaatcgcgggacccagggaattcagctgcggactcgcggaaacacgtgtcctaggatctgacttgtcaatccatcggaggaggacacacgcaaacggcggaacacggtcgaatgtataggaggacacacgcaagatgcggaacacggtcgaatgtatcggaggacacacgcaagatgcggaacacggtcgaatgtatcggaggacacaagcaaacggcgggaaactgtcgcatccacaacgtcagtcagtccgtccattcatgacacacggatgcggtggcggatcatcgccatcgaatgaagtgtaaacaaccatttttcagcacagcaaggcacaccataatacacgcacgttatcatgatcgatgcagaggtaagacatcgcgcggttgttcacatatttatgcgcacgatgtaagcaaacacgttgacttgtcaggctactttgatcatgtaacttctgtgtctttacaggccttgaatgttttgtgtcaatctcctgaagacagtatctgtattgacaagatcggttacaaaacttgaattggtcaaatccccaaaataaaatgtgtcccacaatcaaatgtccctagctgtatggaggattttgaaaggagagtacgtgtgtggcacgaaaacattcggatcttcgaggatcatgtccctcctcatgcttctttgaaagtttcgtacgatccttccttcgagtttgatcgcacgaaatatggtacgatgcggaccgatatccgtgtaatagacatggacacagtagatgcgaccctagaccttattgagcaaggtatgcacccgctcgtcttgaacatggcggacatacataatcctggggggtgcgtgtcttgtggaggtgggatgcaggaagagtcgttgttccggaggacgaactaccatcgtcatctctcgaggtcgttttacccgatcggagaaagggaagccgttgtatctttcgacgtcgacatcatcagggagtgcgagagagacggattcgagttcctgaagttttctaaatcggcatccttcttggcatgtccgtgcatttccatgccacagctggtggacaacaggttctcagagaaagacagtcaattgtttcgcgaaaaggtgagactcgtattgagtgtagctcacaagtacggacatgacagcatcgtattaggagcttggggatgcggggcgttcgggtgtccacctaaacacgttgccgagatcatgtttgccgagatcgaaaatgtagaagggtgcttcaagaagatcgttttcgcgattctaggtaaaaacatcgatttctttcatctcgcagaaaatgaaaaaaatagtaggaaactttcggagggtacatcaccaaagtagcacagatgtcgtgatagcatacagctagggacatttgatattgggacaccttatatttggggattctgaaaagttgaccaattcaagatttgtaaccgatcttgtcaatacagatactgtcttcaggtgattgacacaaaaaaatcaaggcatctaaagacactgaatttacatgtttaaagtaccctgaaaagtcaaactgatggctaacatcgtgcgcatcaataatccttttcaaagcgttactgtaatcaaatatatctgctacatctggaacacaaaaaatctacttaggcttaaatgcgcgagcagtatgattcagtttggaagttttaggattggatgtgcgcgtggtggacgttttaggattggatgtgcgcgtggtggacgttttaggattggatgtgcgagtggtggacgttttaggattggatgtgcgagtggtggacgttttaggattggatgtgcgagtggtagaaattgcaggattgaatttgcgcgcgtatgggtccatcttcgaaacgtattctttgaattccattcgatttgtttggaattgtctatgaacttaatatttgatattgcgagtttaatatttgatattgcttttttcgagtcctcgtctgtagcgtaaagaaccatttgattggtactcgaatggtaccagatgtacaatagatggaatttttctgtcattttgatatttttttctcccaagcgtcccaccaactctgacacattaacgtccggcacgatgggaacggtggcatagtttatgactggatataatcgcagcatgttacaaatgtcgataacctcggacggacgcaagaatcggcacaacaactcatcatggatcgctttcatacccttgtacgtcaacagtttatccacattttccccccatttttgctttatccattcaatgatattaatcttttgctgtttagacagtttaacattatcatatttgacagtgttcacttcgtattttttgcgttcgctattgtttttcttagcgcactcattaaacaaatttattctctccttggagccggatccgatttgtgtgcggttcatttttaataagtgtaacattttttttactcacatacagctagggacatttgatattgggacaccttatatttggggattctgaaaagttgaccaattcaagatttgtaaccgatcttgtcaatactgtcttcaggtgattgacacaaaaaatttaaggcatctaatctagtgaacaaccgcgcggtgtcttatctctgcatcaatcatgataacgtatgaaatggtataaagaaatgtggaaaatattatatcaccaaaagaaaaaaaatactcaccccctcttaattttgcatttcctcctggcactacagcagactaggtggctgccgatctgaagaaaatgcttgataaccctggtgctatcttccctccagcatttctcaatggtgatgatcatggtggtcatgacagcaaggctctggccctgggtctgggccttggacttggcctgggaatccctatccttctcttgattgggttcttactgtaccgcaggtcaggacaggtcattaaccctgcctaaggagggtacggctaattctgcctaagtatccatgccctggccaatcatggcagctcaactagatacagtctagctaggtacactgcaggcgcacgccacggcggcgtcatcgaatgaagtataaatatatgatgctgctcatggaaaggaggaagatgtcggtcggtcgtgttcgaaggaagagagaggagaacaatatatagggatatatagaacaggagcagctcgacagagatcatggcgcacaagttggtcgtgtacgcgtttgttgagcacaagttcattcagaaaaatgagatcgtcgtcaaggtgggctggacgtcgaagccctttggtaagcgactttctcattacccgaagaactcaaagatgatcttcgaaatccacgtacttaatccgcttgcttgtgtggaggctgagactgtcctgctccggtaccttcgaggagaccctcgagtcaagccccgtcgcgacgttgggtacgagtactaccaacttgacgcaggtgattcaggtgccgtctttcaggagatggccgatgtcgtattccagtacgtggggacaggtggcgtcgacatgtctatcaagtctgtcttataatcatacgacagccttgattgcggcaccgaggacgtgccgccagacccccccagctttgcctttgttgagcgagagaaggaacgcgagaatgagcgagagaaggaacatccattatgtgccctgagctgctgcttccccattcgacactacgaccatcatcccaaatctgatgacggtgttcgacgaaaagctcaagggaacacagatgttctgcggctacaacaacactgctaggctgttcagccatgcatcgtgcggcgttcgcgacgggtgggacctgcgcaaggtgtccaaggctgtgaagatgatcctgaacgccgtgggtctggatatggtgatcgtgaccaagcgggaccaagcgggtgcaggtcaagggaaagagaactcaggaggagaggaactacctcctgtgccctgagagtgtctgccgtatactcgagctcgtgaaacttcgtcttctgagcactgacctcacgccgcagctgccctttcgggacaagagctgtccatgtacagctctccggatgctggagctcttgaaaacttcgtcttctgcgcacggacctcacaccgccgccgcgctgccctttcgggtcacgatatgtccatgtacagacagccatagtccatcggcaaacaacggattgtattattcaacaagcggcggagcccctttcacctcttcccccagcggagcgaccgggggcgaccggaggggagccccctcaaaggagtccgcgaggaaccgagcgggtgggcgaccggaggggagcccacagttcacatcaaccagcagacacactacacactacacactactacacactactgtgtaactacagtcggcggaacagtaaaatgaaacatcaaaaaaacggtataaggcggtgacaatcataaaatgacccgtccagcaaagaaacctccttacatgacgcattgcacatcaacaaagaccccgtgttcttttgggccacggtattggggaagaggcgatcgcttaagtgcggctggtccttcaatggacactctcgaaagtaccgacaaaagaacgatacggagtctgcaggatggagagccgtgatctaaaaaagaaccacgatattctcgttaacatcctgcaatttgttgattcaaaatcttattggtgttccattgccccgtgggttgctacaccatttggttacaccgtaaggtgtgccgtacacgaggcggtttcattttagtattccgtcgactgtaactgtcaagtcttacacaatgtgtatgttgtttgtaaaagattcactgtaacacttgggcgtttccgatgtgtcgtctcaagcagacttctgctttacaactatgtcaggagtatggaagaggaatcgcgggacacacggcggcacctgtcgagtcgagtcacatcacatggcgacctctcgcatcaggaggcggcacctgtcgagtcgagtcacatcacatcacatggcgacctctcgcatcaggcggcggaacctgtgtcgagtcacataacagagcgacctctcgcatcacggcggaacctgtagagtcgagtcacatcacacggccaagttccaagtcaagcacgagctgtccaccatttatcagtctgtaatccacgatctcaatctgagtcccactacaactgtcgggtcatatccatatgtcgagaccccttccttttccaacagagtgataaaaaatttgtcaaagtgatatggcagcggaacacaatgcttatgcatgtactgcaaaaaagcaatctttaaaattttgtaatccatgtaggcgcctgacttcttctcacattgctcgaaaaaggcagcaattatgtcgtttagtttatccataagttacacacactcaaagctttatacagttgttcaattcggcctgaattattttttctcattgcatgatcgaagcaaacggaagtgtgcgactttcgcaagcagacttctgcttgagaactatgtcgggtttgtgaaggggaaacgcgggccccatggagtggggcagtggaattcagctgatgcaggtgccgtctttcgggagatggccgttgtcgtcttccagtacgtgtggacaggtggcgtcgacagccttgattgcggcaccgaggacatgccacccgacccccccatcgtctcgtggaagtggtgtaaacaacgcagaagactatttaactaaccttattatcctcttcacagccatattattctctgctacatcacaatcctcaatacgttgttggttcctaggcccttgaatacttaaacaatagaagagaactgtgggaactgagtttattataacttttccaatttattagctttgtattattaaaagtcatggtcatacacattgatgaggacgtcctcgcgtgcaacgggagtcataacgagatcgcgcgcatcgcgaaaaaaataattggaaaccgcatcgctgccgccgcgagcacgaacggaaagctattatggtacgtattcgacgggcgatggaagacggacgtcgacgcgatccacgtcaagcacgagctgtccaccgttgttctagagcacttcagtatcgctatgaacagggagagagcgtcccaaagcgattacgacatgcagagcaacgaggagagcacaaaggacgactccgccgacctagcgcacatcaccgcgcgcctccaggaagcgaccttcaagaataacgtactgaaagagatgctcgagtacttttacgaaccggaattcattaagaaactcaacgccgaccggctagcgcacatcaccgcgcgcctccaggacgcggccttcaagaataacgtactgcaagagatgctcgagtacttttacgacccggacttcatgaagaaactcgacgcagacccaaacctattagggttcaacaacggcgtgtgggacctcaaaaacggcgtcttccgtcaagggcatccggaggacatggtctccatgtccgtgggattcgattacaatggcgaagtgtgcgaggaatcagcagaccgcgtgcgaaaatactgggacacaatgcacccagacgacaaccaacgagaatacctcatccacacattttctagacagctgtacggagacagtggacaagagctctttcacatacacaccggcggctccgacgcgtccacctcgaacgggaagaccaagttcttcgaagtcatggagatcgtattgggagactacatccggaaattcggcgtggaaatgctgacaagaaagaaacgcatagatccagctcgcccgataccacagttttcgaagcggaagggggtccgcattatgtattgcacagagccaaaacacgacgaagtcttaaattccggagtcctcaaggatatgacgaccggtggggaagccatcaccacctgtgcattgcactccagcgacatcgtaagcttcatccgcacgcaacacaagaccggtggggaaggcatcacccaccgcctcgtgcactccagcgacatcgtacacttccgcccgcaacacaagatacacattatgtgcgacgcaccgacgatggtcgacggttctgacacgggagtccaacgacggatacgaaaaatcgactacgtcagtcggtttgtggacgaggatgatgcggacgccgccaaattcctcttcccacgagacttagggcttgtagagtcattcaaggcagacgacggcgcgatgcgcatggagttcctacgcacccttctacacgcgtttgtatacgagtacaagttcgatatgcccgattcgttaaagaagaccagtgcgacgtacttgaacgcgaacgacgccgtggctatgttcgtcgaagagcacgtctccgcggccatcccggacacgggaatggacctggaacgtcacctaagagaagagacggacacggacctggtccttcacctacagcaagagacggacctgggacgtcacctaattaaacgaaaaactttgagagggatggtttaaatcacacggcaacctctcgcatcacggaggcacctgtcgattcgtgtcacatcacagagcgacctctcgcatcacggcggaacctatcgagtcgactcacagagtcacagagaccattacagtcggcggattgatgtcgacttacgggggacgatcgctcgcatcgcaaagaagttgatactttctaaagatactcacagataacggaaaacacggtaaagtaatcgcaacatgtgatcacatgtcaagcatgggtctgctagaagaccgagtaccgatgtccggctccatttcgttttgtcgccggagcaaggtgctttacatatcaccgctggcaggactcacttcgttgattcacctgaacatgaagggcaccgacgtggaagacatatcaccactggcaggactcacttcattggtgcacctggacatttcgaacaccgacgtggacgatatatcaccgctggcaggactcacaaaaaatggatggaatgatgtgtaaaattgttcaacgggtcatcctatgatatagatagccggtatctacatatggactgtgacaattcgttgtatgatcgtgacagctgtggatcgcggtggacgcgtcttcagtcaagatatccgcaagccaggaaattgaataacttagtgaactttggaaaaacactggaggtaccgagtctaccgttgacagattagcaactaaaaaactattgttttaataaaaacgagtgtaaacaactttgatccatacaggtctcggcattgttttgctgagtatgtaacgtcccccccgttcccccagatggatgtaacgttccccccgttcccccagatggatgtaacgttccgttttcagaggtgttcatgtgaacacgtttgtttaaaatagggattgatgtgagcctccggcattcttcagtatttattttttgttgaaataattgttgttcccgagatggagagtcttttcagaggtgttccatgtgaacatgatacagtccagccaaagcaggaccaaatgcaatgggatgatctccccacaccctgcccgcttttttggttgatctctgaactgctctgctctgatgccacatgccatcaggatttaggctggatttcttcttgggttgtcgcagtcgggtcttaaggctcaacttgggcacttgccacactacgtttccttcaggtggaaaatagtatatggtgaggaaaaatggctttattacagctaagcgaaatcaagaactacagtcggcggaacagtaaaatgaaacatatatcagatggaaataaatgtacgacatcgccgttagaaaattggcgttaagaatggtcgctgacttgggtgtgttaaaaacttctgtgtttacgaacatcagtcgttctactctgtggagttggaaacgctttggtgtaaatcgaaaacgacgtgaatttgtaagcaacctttttgagacgaataaggatttgttaaaatcgtttttattgtcaactcaatgcacaaccgcaagaggcgttgttgctttttcaaaagtactcacaatgtacgattatcaactaaaacagtgtatcgtttcataaaactcattggttttacaagaaaaaggagcaaactccttggacagtgtaaaggggacttagttccacttgtcaatgaattttgtagtaggtacaaggagacaatcaatgctgggaaaattttagtatcagttgacgaatgtgggtttagtgagcgtctcaagccacattatgggtattcccctgtaggaaaacctgttatctttaaaactactggtgggtgggtacaccacagtttgttgatggcagttttttcagatggtaggaaagagttcgttgtgaagaaaggatctgtgaagaagacggatttcgttgcatttattgaatcattgagtttgtgcaataattcagtagtaataatggacaatgccagtatccataagaaattggtcctcagtcaccccgtcaatatttgttacacacctccttacagtccagaattcaatgctattgagctatgcttcgctaaggtgaagagagactttcgtcgtttgaactacataccgaatgaaacaaagacgcacgtatctgatatgatttccttagcattcggcaacctcactgataaaattattatgggttgttttgaacacgtttggaacacttatgtgtataaagcggtctgtgacgtattgattatgaaagatggcgacgaaacctccgacagtcgcgaaattgaaggagctactgaaattggctgaagtaccatactcgtcgaagtccaacaaggacgatcttgtccgtttatgcgaagacaatggtctcatcgccagaccccctccagaatacaagacggtggaaaagatgtgtgtcgtgaaatgcgccctgaagaaggcaatgagtcttgacgatgaagaattcggtaagtttagggagcatgtggaccagctcgtcaatgtggtgagccgcatgttacggcggtccagtctggtgctgactttccacatcacgagtctattagagaaaggtctggatattccagacctgtacaacatgaaagatacctactggaaggattggctccgtatcggggtagacggaatcttccctgatgaggaaagcaagatatcgtacgaagctgtgaaggactccatcggcgatgtaattggtaatgacgacgctgactacatcaagtcttatccgatctatttcgatcaggtattgaactatgcaggtcacacattgagcactgtcgtgtcaaacaacgcatgggttcctttgataccacgtctggccagactcacttccaccactttaaataaattaaatgccccgaagacgctggacacatcgaagatcattcggggatacgacgtgatgcaggctattcagcaagaagtccaaaacatggagggatggccagagtctgttcaagagtacgtcaatgaagttagggagatgctgagtgttccagatggaagtcgagtttatgataactatggcaaagacatggactttccgaccatggtccggtataattattggatacagacacggttggaggatatggatgcacgtcgtatccgattgatgcccatcttcaatgtccaacgggtgcatgttcgccttgacctgaagaccctcgtgaacctgttcaggcacatgttccccaatgaccagaacatcgttgagctttccaagtgggaacatgtaaagaatcccgacagcttcatgtttccccagaggcctgcacagaagaagaaaaaatcatgtggtcctggtgaatgggaggcatacaagtcggtcctgaagcagtacgatgatgatgttaaggatatcaaggctactgacgagtacagacatgcaaagggtttgtatgacacgcttgtgaacgcccgaaaaacagtcgcaggttccttcttcagaaaaccacctgtcaagaatgggtgggttttcgactgcagcatctgtactgacggagtctctttgagcatgcagtacagcaagacagtacaggtccttgtctcagatctgaagaagacctgtaagaagcctcgtaaagaagaaggtatcaagatcgcagaaaaatacgacggctcacttaaaacgatattgcccgatatgggtatcgtcgtcctgggtgtggacccaggacggagcaacatcgctacggtaacgtatttggcagacgataaaaataagacatggacgctgacacgtggtgcattttaccacaagtcgggtatcaagaagcagacaaggcagaaggaactgcgttttgctgacatgattcctatgtgggagtctctgcgtgaaaatggagcagctttgagtacatcgaggacggataagatctccgcgtacttgtcaaattacgctaagttttctgacgagtggtggagattggctttgcgacgccgagaatcccgtgacaacttgcagcgttacatcggaaaacgaaaggtcaaagactctttctgggcgggtatcaagcggtgcatgatgaaagaacttcctgatatgaaggtttgcgtggcctacggatctgccatcacaaaactgaagcctactggaccgggagaagttgcagttcccactggggccatgttcgcatcgtgtaaaagaattttcaaagaggacgtttctgtgacagatgagttcaaaacgactcttatgtcgtgggagacgggtaaagaaaaagaacgtgtttacaagatcccaagtgtttgttcagcagacgtgaagcttaggttgggtggtgaacgttttggtcacacgaaatcgaaaacgatgccaaaggtcgctgattgcgaccacttaggggtaaggttgtacaataaacgtaaaggcgcacaagagaagcacaggaggggtggcttcgccacttcccttgtcgattctcaaaaatcgatcgagcggtacccagaggtacgaggactgcgattctctccagaaacatgcatttactcggaccgggatcgctcttctgctctcacaatcgcaaggctgcactgcatggaattgatgggtctaggacgacctcttccattttcccacagcagctctgttgttgttgatgaataaaaactcgtattgttgtagacaccactcggtccccctccggtggtcgcgacaacattaggttacaccgcaaggtgtaccgtacactccagaaagaggtttcattttagtattccgtcgagtgtaattggtggagtaatgacatgaaaacggttgcgcatacctgtcaggaaccatgtacacaataagatgcggtggtcctgtcaaagaattgagtgcgagtcacatggcgaccgacctctcgcatcacggcggatcctgtcgagtcgagtcgagtcgagtcacagagcgaccgacctctcgcatcacggcggcacctgtcgtgtcgagtcacagagcgaccgacctctcgcatcacggcggaacctgtcgagtcgactcacagagtcacagagcgaccattacagtcggcggattgatgtcgactcacagagtcacagagcgaccattacagtcggcggattgatgtcgacttacgggggacgatcgctcgcatagcaaagaagtcgatactctctaagacaacatgtgatcacatgtcaagcatgggtctgctagacaagcgctcttgtatatcgatagggggatctctgcccccgcggagtggggcaggagaatttagttgcagaaacctgtcaagtcatcatacacatacacacgcaaacggcgggaaactgtcgcatccacaccgtccgtccattcatgacacacggatgcggtggcggattctcgtccctcatcgtctcgtagtcctcgaattaagtgtaaacaaccattcttcagtataaacaaccatcagcacagcacacttcacaaacgaatgagttcctttgacgaaatcaatgaagatgtattggagatcattctagccaatgcgatttcgaacgaatgccacctcaaacaagtggctctcgttagcaaacagtggagatgcgtcgcaccccggtgtgtcacaaggatccacctgagacattataaaagtttggaatacgcattatcacgcatttgcaggctcgaagagttgaaaatcggtatcaatcgggggaaagacgtaccctaccaatcaatgtcggagatcgaagacaagatagaagacatatctccgctgtccggcctcacttcgttggttcacctggacatatcgaacacctacgtgaccgacatatcgccactgtacggactcacttcgttgacgcacctgaacatggcgcacacctacgtgtacgaagacctattatcaccgctttccggactcacttcgttgacgcacctagacatttcgcacacacttgtgaccgacatatcatcgctgtccggtctcacttcgttgattcacctagatatttcgcacctcacgtacgtggacaaacacccattatcagcgatttcaggactcaattctttggttcacctcaacatttcgcatttcggaaacaaactagaagacatatcaaagctgtccggactcaccgagttggttcatctgaacatggcgtacacacgggtgggcgaacacctattatcaccgctggcaggactcacttcgttgattcacctgaacatggagggcaccgaagtggaatacctatcatctctgtccgcactcaattcgttgattcacctcgacatttcgcatctcagatacaagctcgaagacatctcaccggtgtccggtatcactgcgttgcttcacctgaacatggagggcacacgtgtaccctctatatcactactgtccggcctcacttcattggttcatctgaacatggcgtacacatgtgtggtcgaagaccgagtaccgatgtccggctccattttgtcttgtcgccggagcaaggtgctcgacatatcaccgctggcaggactcgcttcgttgattcaccttaacatgaagggcacacgtgtgaaagacatatcaccactggcaggactcgcttcgttgattcacctgaacatgaagggcaccgacgtggaagacatatcaccactggcaggactcacttcgttgattcacctgaacatgaagggcaccgacgtggaagacatatcaccactggcaggactcacttcattggtgcacctggacatttcgaacaccgacgtggaagacatatcaccactggcaggactcacttcattggtgcacctggacatttcgaacaccgacgtggacgacatatcaccgctggcaggactcacttcgttggttcacctcgacatttcgaacaccgacgtggacgacctatcaccgctggaaggactcacttcgttgacgtacttgaaaaattgatggaatgatgtgtaaaattgttcaacgggtcatccttagtaaatgtagccggtatctacatatggactgtgacaattcgtcgtatgatcgtgacagctgtggatcgcggtggacgcgtcttcagtcaagatatccgcagccaggaaattgaataacttagttaacttaattaactgaaggtggaactttggaaaaacactggaggtaccgagtctaccgttgacagattagcaactaactttgtagttcagagaactcgcggacgaggcgccttcggcacaacacatacgtgggatcggagatgctttttcgaaattgggtttggatgagttggatagcgtttttacgcctaatatggtgggcacgccacgcttgttggatctttttagcatatttcgcaagtgtgacattctcaacgatataatttatttgtaattgttggtggtatgtctcgctcgttgcgtatacacttctacaccggtcagatagccttgctggaacaatccagaagctccacatgtaatcatggcttccttctctttgctgaagatgacgatgaggttggatctcatgcgtgttgcatatgaatccgtccagtatcattaaacacggttttgtggatatccaactggggtcgattgtgactgttctcacaatattgtgtttactccagaacttcacgcaggcgtcatctaggtctgaaaagacaatattctcccagccctgcatttatgaacatttgtttcatggtcgagttgtttgcttatacagtcgagctccatctacagttgttctcaaataaagtgggacaccttataatcatccagactgcagatcgttgcttttgggtaacgttggggggtgcagcaggttgaagaggttctcgaagatattccgagtagcctctttggtaaaccgttcaaccgtcgaatgtcgacaatggatccactttcatcgaagactcgttcaaatacagtcgacggaatgtacatgtgactgtcatgtattcaaagcggtattttttaatgataactgactcctgctgcaacacgtcatgcctcaaagttggcagcggacgaccgcatcctcacacacgcacggcggcgggtcttacgcaaccgcatgtactcaaacgaaagccgtgtgtatcaagcaggcttggaaatggaaaaacgttggggggtgcatgagctcacctacgtgcgaggagatttagcttcgtaatagcatggatcgatacagaatatacaactgcacgaaaaacataacagcaagcagctccagaatgcccttttcctgagcggaagatacccgaatagccttacgtaatcgtccataatcaatattggatccatgtattcccacgcgtttgccgtgtacgtcttttctatctctacaatcttcttcaatcgagcagcattctggtcgtacttaattttggcaccagataataggtggattgtcgtgccgtcaaacgtgaacatagtcttattcatcacgttcgatgtacgcctgaagtagaatgtctctttgtacaggtcgagtatttctaaacatttcttggcgtcttcctcattatcgaataccaccgttccatgtaaaataaaatttttgccattccacgtactgcctgaaactgtgaaacacgcatacatgcttgtatccaacttcttgaagttatccattgtttctgttatacacagaagagatagggtgcgtaaagaaatatactagacatagtcttgcttttttatacttgtgaaaaataaacatggtatcattctcatcagacagggttcgatttctaacccaggacgtaaggtaatgtgcatgatgtggatgttcgcctcgatgtcacaccagtcgcacgacttgggatcatgatcaatcaagaaagatggatgacaacacatgcatgtgcctgtaatgtgctgcaacacgtcattcctcaaagttggcatctggtacccggtgcattatgtgcaagagatgcactctggttatgctgtccgataggatagatagataggataacgcactttatcacgacacatgccgcatcctcacacacgcgtcgcggaggctgctgtcgagatgatgatgcccaccaaccactcactcactcactcactcactctcactcattctcacgcacgcactctatcacacgcaaacggcggaacacggtcaaatgtatcggaggacacaaggatgcggaacacatacatacatcgtcaatcactcaatcactcagattaaagggaccggcgctttgcgtacccaggcatgcccaatcattgtgtatttctggaggtacgatcgccgggaatcatcttccctagcgcgtcattcgcacaccacccatcgatgcgcacgtacacgacctgggtgtaaccttattagctcgcgatgtgcaccaaagccaatataaaacatcatcgttagaaaagttcgagcgtcataccaagcgttacagtcagagacagaatttatgggacacccttaccggtgacccttgaacccaattgattgggtaggtcagctaaaggttatgtatcaaggtcccaatccttcgtgtccttcatcccgtatttcagcatttaagctggcccagaggataacaattgtaagctgctaactgacccaggtgggtcggttggttgagcgcccacatttgcctctccggaaactgtggtttttggggtgggcgatgatgagggcacacaaaatgtcgccggtcgctctttcccgtccatccacgtcgtcagaagcagaagaaggttcttggcagcgttcacgtctcggttccaggttgcaccacagcgcactttggatgatgcgcttttgacactgttgcgacagtgcagtactttgtggaccttgacgttcttcaccaccgtcttctgcttctcaatcgttgttgttgttgttgttgtaggagccccgttgatgagggaggggggctcgttttgaactctgcgccagacgacgctgtctgccttcatgttgacgagcttctggaagcagccgtggcaggtacaagaagtgttgcgttcgtcgacgtttttgaacaaaacattcttacgacgtgagaggcacctcctgatctctttgatgggcccagaacatgaacgactgataccatacccttggttggaccagttgccgaagccaacaacggtcgtctgtgcccttggtgcaatcacatcgcataccttttctttgatcgtcttcttctgtgcttttggagcaatcaaatcacagaccttttcaatcgtcttctgtttacccatataccgaaagaatcgcatcgatcggtaacctctgctggctcggtgttgaaggagtgtcgggagagcgctgaggtaacctctgacatggtcctgcatgtcgtgcatactgctcgtagtcggcgatggaatggacttcacgaggtcttgcgtatcgacattccatttgttggtgcgacgattactggtattgtacccagctgcttcgctaaagcgggcagagctgaaagactcgacgcgaccggcagaagatgctacagtgacgatatctgtcatacccgggtcgacaccgacttgcagagaagcgtcctggcagtcttcgagaattgcgtctttgggataccccgcgttatctacagcgacatcttcactcgcctgatgcttcatttggacggagacctccttgccgtcgctgaggattcggttgtcaaaacgagaccctttcgtctcaagtccttggacattgaagtactttctccacaacatggaatgattctcgtgacgtccatcgccacggaagctctcgagcggcgaatcgcccatgctgagaagcttcatgagtgtcatggacgatatagggacgtaagaaatggtgaatccgctcttgcgtggaaggatactgaacagacgggggcgtttttttgttgttttctcttttagatccgctcccaactctgtaagcacgtgatgaaacagtctcattgtcaggtgcgctcgagtgttgaactgcttcccccttggcagcggcaagagatctctcaggcgtctgacaacgtctttgatgaggttcgcatgcacgagactcgctgggatgattttgtcgatatccgactcaggatactggaccactgccttgacaatcttattgaaatgtttcttcaacgagggatgtttcaagcgcaggtacttgattacaaccctgtccacgtttgcccagacgctgttgcatgccatcgtcgccatttgtattgagacgtctgcgattacctgtccccattgacgaacgtccacctttaagtagcctgcaggcctgagagcgtcgaaagcaaccatgctatccttcaagctttgtcccagcgtatcctttcgaacgttggatgtcgagacagcaaggatgcacctgtaataaaagtttcgatccaggtgcggcaactgcttcacgtcaaagtctacatcatcgaggcatctggtgatatgaaaatttgcgaataagtatgcctctgcaactgcgtggttgattacgagtaccatgctttggatccttgagcagatttgctgccttgatacatccatgcacagagaatttagcgtcttcttgaccaccatgatgtccagatcgtcgtcgtcatctccattgtttgtcactacccccatcgagatggagggagggagtgttcttttcttgtcttgatatcatcatgtacaacaatttccttataccataatacacgcacgttatcatgatcgatgcagaggtaagacatcgcgcggttgttcacatattgatgcgcacgatgtaagccaacacgttgacttgtcaggctactttgatcatgtaacttctgtgtctttacaggccttgaatgttttgtgtaaatctcctgaagacagtatctgtattgacaagatcggttacaaaacttgaattggtcaaatccccaaaataaaaggtgtcccacaatcaaatgtccctagctgtatgtatatagcgttgcctatcacaatatcgttcgcttcgtctctaattcttgtctatgctcgacgcgcatgtcaaagcatgttggaagccttgtccatgttagcatggttggtttcgacaagtgtgatcatcacatggattgccatgacaaaaaaacagaagttacctcaaatttgcgcaggcatcatgtggattataacaatcacgatgttgattagcttctgctcatcattttaaaagaatcatgaagtaatgggcgttcctgcctcccggccgattttgactggttgcgaaacatggtatggagcggaatcatttcacacacaagcattggagcgtttgtatgaagttcttcttactctgctcattatatcaagggagatggatctggcaacaatcagtagttttaagcgcataggaatgggcagcttcgcaaccgtgtttgtcacggaggggtggtgttgaagcaaattcaggacccttgcaaagatgcagtggcaatgttgatgaaggaacatgatgacctcttgactttgaacagtgtttgtggtggctcgtctcagttctttcaacttccgcgtgcccatggcagctacacagactactacagttttgcgcaggaggtaggtatccagcggacagaagacatggggttgtcaccgcatgccttgtatgtcatgcaacgtatatggcctgtttcacattggctggctaccagtatacgggacttgttccttcctcagcctttcagagacaagcccccccctcagcttctggcaagactctacctgggcaatgggacatcgcgtgaaggcagccggttcgtgaacactgagaatttccccttgtctgccgaccgaattgagcgccttggacttcctgcagataagatagctgctggaatgggacatatgctggcttcgatcaacttcaaagctggccgagatgggcgcgacatcgagttcgtgttgtgtggtcatcctgaaaatcccctgagtaaggtgccgttctacgaatgcatcgatttcaaccaaatgcgaccgcatggggggtctgcgatagtgattgtcagcagcatggtcagcaatgacccatactatcctcggtcgtggtcgcctcagtggcaggcctttgctgacgcctatctcgccacagctgctgaggccaacgagtcccccctggcacatgatgtgttgcagaaggtgcattctcactgggaggaaaaaaattgtcatcgcgtacagctatgctaagtttgccccaggtggcaaggagggcgagctttgtgataaaatacatcggagcgtgtcaaggtttaacgaaagcttcaagcggaagaggtaagcacttatctttggttaaaaaaacgaacccagttaatatccatataccggaaactcagcacccctgaaagtgacgctcccgctgttggtggtaacttgtttctgagggaatcccagaggcacacctcctttaccacgtctcaccttgtgtcccctcgctccctagcgcaatctttggttagatcagctgatggtattcaccatcctccgctacccgagggttgactgtggtcccgcgctttgtgtagggtgtttgcagcgggctgaaattacgggacttctgtgatggtttctgggacatcccaacaaggggcgggtgtttcacatcaataaagagagtggcgggttataatataatcgaaagacaagcagtaaaaaaacataagaaaagaagttgtattacaaacagtgtaaataagcaatctcgatgttagcaagccccatgaccatattgatcgagcgtgaaaattagttttgactcactgtatatgattgatcgtatggattgatatggtgcacgagtaatgacatgttttgttgttattatgattgacatattctgataatgtattgtgagatgggtgagattgagcgtgtgcataatgagacagtgatcatctgtgacgcgattccgtatggatcccctccatacgcttgtttaggggaccgcaccctctgtcctgcctactgtcgcccacctcttatatcacacacaactggctgcctaactcgctctctttcgtcctcatgaggcttgccctatggtctctgcgttcttccaccatctgcccgagctgaaacaagcaagtcttgttttgtaaacgtgacctggaatgcagccaaattcacatccacacaattgctttacaaatgtacccacccgccccggaattcttgcagacggcgccccaagaaatattgcaaaagactgagaacaaaacaaaagaaaataggcagtttcggggatcgtcggggcattttatcatgtcggcgattcgatgtgaccgccagcactaaatgtgcgttccctgctcccgcgattttttaaattctaatcatggatttagagaccctcctgaacgaccgctagctggagacaacagccaacaagaatccaaatcgtactagcatggtcgcaccagtcaaatcggcggaggcaggaacgccattactacacaggattggtgtggcgtgatggggattatgcactcagacgtttacactcgttttagcggggacggcatctgtgtcgagacgagtcacagagtctacagaagtcacagagcgagccgacatctcacatcacgggcgggcgcgtactacggcagtgatgccaggcagtcacagagtcaaatggcgacagtacttggaccaatcac

SEQ ID NO: 197 - DNA, 22379 bp, unidentified
  misc_feature 1..22379: note = Fanzor polypeptide
  source 1..22379: mol_type = other DNA
taataaaaaaacaatcccatggtttatcagggttgtcttgtataatctcccatgtgatgctggggtttgcgctcaatccacaccagttccatggtttgtcggggttggctttgacaataaaccatttgacgcaagggtttttgctgatattataccaatcccatggtttatctgggttggtttgtatcatatcccatgtgatatgtgggtttgcgctcaattcacgccagtcccattgtttatcagggttggctttaataatatcccatatgaaatttgggtttgcgctcaatccacgccagtcccatggtttatctgggttggcttgtataatatcccatgttatgcaggggtttctgctgacccagtaccgattccatggtttgtctggatagcattcgataacttccagcgtcaaacatggattataactcaataaacaccaatcccacttgtgttccatacatttgacccgtctcgagatgtggctatttatttccgctgtaatcatattttatatggattatctcgtataatatcccacgtgatgttggggtttgcgcttatgtaaaaccaagctatttatttcggtattcgaaacccatgttgcctgccacgattcgcaagacgttgggtccgtgaaaaaacgctacacatgacatcatccatggcagcttggtgcgggctccttgacaccgtgagcttgccgggatgctcaaactcttcataagatatcataacgttttcgaaccctgtggagtgcgacgtaggtgtcgacagtgtcccgccgttttcgcggaggaggcatgcatcttattggacagatgatacatgtggtgggagaaaacgattggtattaaaatgtcacattccagcaaatcggcatcttcggacattgtcatggttgagaagatttgggtacattgcatgatttgattgcaaaattctgaaaggccatggttccgtacaaaacgttgtagtctgaaatgatttgatcgaggagttcaggtttgttttcgttgttttgataccatttgatgagccgttcgcaatttatttcaatatttggcggatacttgcctgttgagtgtatccattgcatgacaatgcatacaagttgtgtggcaagatttttgtcgattgatggagggtgttgcaaaacttgagttatatccattttaatatatgcattagcaaacaataatacattgtttgacgcattgtttcttatgcctcggttgataaacggacctcaaggtgtaccgtacactccagaaagcggtttcattttagtattccgtcgagtgtaaaaggatgtggtctcactccaaggccccccaaaatactcacatcccatgactgatttgaactgtaaaataaacactccagtgtgaccgtacacaacaagtttcacgccgagtgtaaagattgatcgattccctgtacttaaacagccccctattctcctctttttggaaaaccgctagtcatcggtggtggctcagcaaccaccacctcgaacgagaaaatgtcttcgtcttcgtcggtgtcttcttcatctttccacgttgagatgttaccgttcccgttgatccgttccatcgcgacgctctgcggcgagaccgcaattttttgcaccaacaaagccatccgcggcgggttcgcatggccggatcggctggagctcgccattcgagaggccaaaaccctcgacaagaacacactgttccgcatgcaatgcgacctcggtgccgtggggacttgcgaacggatgctggataacgagtccgatgcattttctagggctgcgatgcttcttgcgaagcctccgaactactctggggagacggcattgattggggggtgtaaacagggcaacgtctccctagtcgagattctcattaggaactctccgaacgagcaagtgcttgcgacgaataatcatgggatgtcggcactgatgcgtgcttgtggcattcagggggggcatgcgaatgcagcatgtgtcaatattcttcttggatactctccgaacgaacaagtgctggcgacagacaatcatgggatgtcggcattgatgtgggcatgtatccatggtcacgcggcctgtgtcaagattctgcttcgacattcccccgacacacaagtgctgtcgaccgatcatttcggattgtcggcattgatgatggcgtgtttccatggtcacgcggcctgtgtcaagattcttcttcgtcattccccctacacccaagtgttggcgaccgaatgtcatgggaggtcggcactgatgtatgcgaatgcgtcctgtgtcaagattcttctccgaattccatcatgatttgaatttgtgacgtgacagtattgatgagctcctcgacatctgatgaaggcaacactttgtaagctttctttccccattctctagcctggtttgctgcatctttgttaaaaaaaaatatcaaatttcaccaaggtattaaggaacaccattgttattatgaaatagggtgtggtatttcatccgtgaccaaaggcgaattgaatcaacatctcaactgtcaccgaggtattatggttcaccattgtgatttcgaaggaggatgtggtaaatcattcgggacgaaaggcggattgaatcgacatctcaaaggtcaccaaggtattaaggatcaccattgcgattacgaaggatgtggtaaatcattcgtgaccaaatgcgaattggaacaacatctcaactgtcaccgaggtattcaccattgtgattgcgaaggaggatgtggtaaatcattcgggacgaaaggcggattgaatcgacatctcaaaggtcaccaaggtattaaggatcaccgttgcgattacgaaggaggatgtggtaaatcattcgtggacaaaggcgaattgaatcgacatctcaaatttcaccaaggtattaaggatcaccattgtgactacgaaggagggtgtggtacatcattcgtgacgaaaggcggattgactcgacatctcaactgtcaccgaggtattaaggatcaccgttgcgattacgaaggaggatgtggtaaatcgttcgggacgaaaggcggattgaatcgacatctcaaaggtcaccaaggtattaaggatcaccattgcgattacgaaggaggatgtggtaaatcattcgtgaccaaaggcgaattggaacaacatctcaaatttcacaaaggtattatggttcaccattgtgactacgaaggagggtgtggtaaatcattcgttaccaaaggcggattgactcgacatctcaactgtcaccgaggtattcaccattgtgattacgaagaaggatgtggtaaataattcgggacgaaaggcggattgaatcgacatctcaaaggtcaccaaggtattaaggatcaccattgcgattacgaaggaggatgtggtaagcatccccgggggagttgacccctatgatatccctagctgtatggataaaacacaccatatctgaacataaaaggaaaccccaaacagtaatataaaagtattattaacttacaattatacaatgggtagcaagcttgataggattcgtgcagatattatatcggccattaaatctacacaagcagatattaacgatgaaacattgtcccgcaatagaggcaaagttgcctttaatgttgattgtgatgtaatcaatagtatgaatatcattcaaatcaaatcattgatacatagcccggaagttaaaagcgatctaggtggttattgtaacagtttcataaacaaagcaaataacatcattgaaacagagccaccggcagcgaggactccagaggtcacagacgatgccgaaggctcctccagcgtgggcggagaaatagggcgatgaaatggccggccagaactacttgactacgaagaaaaaataagaatcatccatcaatcaatccctattttaaacgtgttcacatgaacacctctgaaaagaagaacaacaattatttcaacaacaaataaatactgaagaatgccggaggctcgatagcggattttttgatggctttgactgcatggggggtataaaaaagtctccattcatgttccttatttaagttcaatggatggcgacgctgaactagatgctttgctttctcaacacccggctgcaagagcggcatatgattgtcgcatcgagaggctaaggtttgtaaatgcttgcctgatgatagccgaacgatatgtgttacgccacactacttgccgtgtacaacatgctagcaaatgacacacaacattcgtttatctcttgctgttgcagtccgacgcgtacttggacggatgttgtcattcgagctcttgccactcgtgtgaactctcccattgatgagcagcaatttgccaaggagctcttggaagagtttgtaatcggtgccaccacccaaaatattgatgccatgaatggtcttgtgcgtgggatgttcactggtgtgaggaaaaattgcagcacgaccatgctggaggtggatgatgcctgatacattcgacagtgttccgccgtttgcgtgtgatagagtgcgtgcgtgagaatgagtgagtggttggtgggtatcaacatctcgacagcagccgcagcgacgcgtgtgtgaggatgcggcatgtgtcgtgataacataatgcataccgccaggcaagttcctcttacactcaccgcttgcagataccgccaggcaagtgcctcttacagcttgccgcttgtcgctttcattccaggcaagtgccgcttgcagataccgccaggcaagtgcaaccaagggtttatagggtttatcccaactcattgtttatttataccatcctgtacacacatgttcatcgaacatgcagtcgaacacgcgatcatcgtttccactccttacgtgtccccatgacattcttggtcgtattgccctattctcttccaacccaaagattgtattagtgtgtaaaactctgtgcaaaagtatttctggatggccccttaccggactgatccaaccaccacagcgagttggagagatgatggcaaaaggggggcgcgccgaccttctagcagtatgcttggtgtccaatcctcttgtacaggttaaggggggcctacaattgagggcgaaccaaaatgaaaacaagcttctctatgtggctgccaaggccggtcacgcagatgtctgcaagctgctcatggatccagcgatggctggaattgagttcagggcccgggctaactctgtcaacagctgggccttgcgtgaggctgcctatggaggtcacgcagatgtctgcaagctgctgatggatccagcggtggctggacttgagtttagggccagggcgaactctagagacagctgggtattgcggctggctgccaatgcaggtcacgcagatgtctgcaagctgctgatggatccagaggtggctggaattgagtacagggccgtggcgaactctagcgacagctgggccttgcaggtggctgccaatgcaggtcacgcagatgtctgcaagctgctgatggatccagcggtggctggaattgagttcagggctagggcgaactctctcaacagcagggccttgtggctggctgcgaaggaaggtcacgcagatgtgtgcaagatgctgatggatccagaggtggctggaattgagttcagggccctggcgaactctaacgacagctgggccttgggggcggctgcgaatgccggtcacgcagatgtctgcaagctgctcatggatcctgcggtggctggacttgagttcagggccagggcgaattctagcgacagctgggcattgtggctggctgcccatgcaggtcacgcagatgtctgcaagctgctgatggatccagtggtggctggaattgagttcagggccagggcgtacactttcgacagcagagcattgtgggcggctgccaaggcaggtcacgcagatgtctgcaagctgctgatggatccagaggttgctggagttgagttcagggcccgggcgaactctgtcaacagctgggccttgatggtggctgcgaaggctggtcacgccgatgtctgcttgcttttgatggatccagatgtggctggccccgagtacatggccattgtgaatcttgacagtgcgtccgtagttcctctggcagcggcacgcccctctccgagaggaccctgacgcaggtccggctatgcagtgccatgccctgcatggctctgaaggtgacggagccggcgcctccctggatccgtggagagattcgcgtgtgtaaggctgtgtgaggatggatgatgcgtcatgtgtcgtgacaatacgagtgcgagtgggtgcgtggccagcaacatccgccgccgtgcgtgcgttatccgatcatgtttcctccgttcgcctaaccaactcacaattaatttcattggacgagacatgcgacaccctgccgattgcaagtcatggactgaattggctaacacgttcactaaactgtgatatggtatgaaaggaacacccgtaaatttgtaattttaatcttactcactactattttgcttaatgggtttaagtaaatcaggtcaaaaagcataaggcgatgataattataaaaagaaaactaatatgaacgattgtcgcttggttattcaggcatccactcaccccgtgtctgatatagatagagttgtttctcgtcaagactgctacatacatgtcgatctgaacagggagatatgtgaagacttcaacgaaatacaagttgatttaccttacatgcaaacaactagagaaccggggagattgctggtgttcaaagaaaatgatttcttgcatgcaattaataacatgagtcaaacgcgtccacatagtatcgagacagccctccgatttgctaacttattcggactacattcaactgagctgcactttcttagaatttgcagtaaacataaactgcacttgaacaagtatctatttaccgattaataatccggtgataccaggatgcaaagtagtaccattccctattaatccaattatcatgtacaactccatgacgcaatggatcaacccccaaccccatgcctgccttccaatccctccctgaaccagagcggcatggccacttggttgaagtttttatctgcataccgtttgcaattatatgtttcataatgtcgccagtcaaatcgagactgtcatgtggcttacattcgcaagtatagccactctcctcaaactttgcagcaatgtgtacatgtgtaccacaatagaccgtctgtccaagttgtacatagagaattgtaattgattcaatatactgtaacattattgaccggtctgagtgtaacaaagggtttttgaggccattggaagtctgatcaaaaagacacagatgttggttgtctcaactcagctgtactcggtgccagccgcatctgaatccatgagcagcttgcagacatctgcgtgacctgccttggcagcctcacgcaaggcccagctgtctctagagttcgcccgggccctgaactcaattccagcaaccttcggatccatcagcagcttgcagacatctgcgtgacctgccttggcagccgcccacaatgctctgctgtcgaaagtgtacgccctggccctgaactcaattccagccaccgctggatccatcagcagcttgcaaagatctgcgtgacctaccttcgcagccagccgcaaggcccagctgttgacagagttcgcgcgggccctaaactcaagtccagccacctctggatccatgagcagcttgcagacatctgcttgacctgccttggcagcctcacgcaaggccctgctgtcggtagagttcgccctagccctgaactcaattccagccacctctggatccatgagcagcttgcagacatctgcgtgacctgccttggcagcctcacgcaaggccctgctgtcgctagagttcgccctagccctgaactcaattccagccacctctggatccatcagcagcttgcagacatctgcgtgacctgcattggcagcggcccacaatgcccagctgtcgctggtgttcgccagggccctgtactcagggccagccacctctggatccatcagcagcttgcagacatctgcgtgaccttcatttgcagccgcacacaaggcccagctgtcgctagagttcgccctggccctgaactcaattccagccacctctggatccatcagcatcttgcagacatctgtgtgacctgccttggcagccgcccacaaggcactgctggcggtagagttcgcccgggccctatactcgagtccagccaccgctggatccatgagcagcttgcagacatctgcgtgaccttctctagcagcggcccacaatgccaagctgtcgctagagttcgccacggccctgtactcaattccagccacctctggatccatcatcagcttgcaaacatctgtgtgaccttccttggcagccgcccacaaggcactgctgtcgctagagttcgcccgggccctgaactcaattccagccaccgctggatccatgagaagcttgcagacatctgcgtgaccttcattggcagcctccaacaaggcaaagctgtagctatagttcgcaagggccctgaactcaagtccagcaacctctggatccataagcagcttgcagacatcggcgtgaccggccttggcagccacatagagaagcttgttttcattttggttcgccctcaattgtagggcccccttaacctgtacaagaggattggacaccaagcatactgctagaaggtcggtgcgcccccctttcgccatcatctctccaactcgttgtggtggttggatcagtccggtaaggggccatccagaaaatcttttgcacagagttttacacactaatacaatctttgggttggaagataatagggcaatacgatcaagaatgtcatggggaagcgttaggattaacgatgatcgcgtgtgcgaatgcatgttctataaacatgtgtgtacaatgcatgcaagcgcacaggatggtctatagccttttataaaatcccaactcattatttatttatactaccgaggcccatgcacctcccttgtgacgcttgcgcaagtatttattcccccacttattgcagttcctagacctcggtgttgtcctcctgctccatcattttagtacgcacatggctggcggcttctacagtcggcggaacagtaaaatgaaatgcacaaccgcaagaggcgttgttgcttttttcaaaagtactcacaatgtacgattatcaactaaaacagtgtatcgtttcataaaactcattggttttacaagaaaaaggagcaaattccgttgacagtgcaaaggggacttagttccacttgtcaatgaattttgtagtaggtacaaggagacaatcaatgctgggaaaattttagtatcagttgacgaatgtgggtttagtgagcgtctcaagccacattatgggtattcccctgtaggaaaacctgttatcgttaaaaagtagttttttttaaaaagtagtgggtgggtacaccacagtttgttgatggcagttttttcagatggtaggaaagagttcgttgtgaagaaaggatctgtgaagaagacggacttcgttgcatttattgaatcattgagtttgtgcaataattcagtagcaataatggacaatgccagtatccataagaaattggtcctcagtcaccccgtcaatatttgttacacacctccttacagtccagaattcaatgctattgagctatgcttcgctaaggtgaagagagactttcgtcgtttgaactacataccgaatgaaacaaagacgcacgtgtctgatatgatttccttagcattcggcaacctcactgataaaattagtatgggttgttttgaacacgtttggaacacttatgtgtataaagcggtctgtgacgtattgattatgaaagatggcgacgaaacctccgacagtcgcgaaattgaaggagctactgaaattggctgaagtaccatactcgtcgaagtccaacaaggacgatcttgtccgtttatgcgaagacaatggtctcatctccagaccccctccagaatacaagacggtggaaaagatgtgtgtagtgaaatgcgccctgaagaaggcaatgagtcttgacgatgaagaattcggtaagtttagggagcatgtggaccagctcgtcaatgtggtgagccgcattttacggcggtccagtctggtgctgactttccacatcacgagtctcttggagaaaggtctggagattccagacctgtacaacatgaaagatacctactggaaggattggctccgtatcggggtagacggaatcttccctgatgaggaaagcaagatatcgtacgaagctgtgaaggactccatcggcgatgtaattggtaatgacgacgctgactacatcaagtcttattcgatctatttcgatcaggtattgaactatgcaggtcacacattgagcactgtcgtgtcaaacaacgcatgggttcctttgataccacgtctggccagactcacttccaccactttaaataaattaaattccccgaagacgctggacacatcgaagatcattcggggatacgacgtgatgcaggctattcagcaagaagtccaaaacatggagggatggccagagtctgttcaagagtacgtcaatgaagttagggagatgctgagtgttccagatggaagtcgagtttatgataactatggcaaagacatggactttccgaccatggtccggtttaattattggatacagacacggttggaggatatggatgcacgtcgtatccgattgatgcccatctttaatgtccaacgggtgcatgttcgccttgacctgaagaccctcgtgaacctgttcaggcacatgttccccaatgaccagaacatcgttgagctttccaagtgggaacatgtaaagaatcccgacagcttcatgttgccccagaggcctgcacagaagaagaaaaaatcatgtggtcctggtgaatgggaggcatacaagtcggtcctgaagcagtacgatgatgatgttaaggatatcaaggctactgacgagtacagacatgcaaagtgtttgtatgacacgcttgtgaacgcccgaaaaacagtcgcaggttccttcttcagaaaaccacctgtcaagaatgggtgggttttcgactgcagcatctgtactgacggagtctctttgagcatgcagtacagcaagacagtacaggtccttgtctcagatttgaagaagacctgtaagaagcctcgtaaagaagaaggtatcaagatcgcagaaaaatacgacggctcacttaaaacgatattgcccgatatgggtatcgtcgtcctgggtgtggacccaggacggagcaacatcgctacggtaacgtatttggcagacgataaaaataagacatggaagctgacacgtggtgcattttaccacaagtcgggtatcaagaagcagacaaggcagaaggaactgcgttttgctgacatgattcctatgtgggagtctctgcgtgaaaatggagcagctttgagtacatcgaggacggataagatctccgcgtacttgtcaaattacgctaagttttctgacgagtggtggagattggctttgcgacgccgagaatcccgtgacaacttgcagcgttacatcggaaaacgaaaggtcaaagactctttctgggcgggtatcaagcggtgcatgatgaaagaacttcctgatatgaaggtttgcgtggcctacggatctgccatcacgaaactgaagcctactggaccgggagaagttgcagttcccactggggccatgttcgcatcgtgtaaaagaatttccaaagaggacgtttctgtgacagatgagttcaaaacgactcttatgtcgtgggagacgggtaaagaaaaagaacgtgtttacaagatcccaagtgtttgttcagcagacgtgaagcttaggttgggtggtgaacgttttggtcacacgaaatcgaaaacgatgccaaaggtcgctgattgcgaccacttaggggtaaggttgtacaaaaaacgtaaacgcgcacaagagaagcacaggaggggtggcttcgccacttcccttgtcgattctcaaaaatcgatcgagcggtacccagaggtacgaggactgcgattctctccagaaacatgcatttactcggaccgggatcgctcttctgctctcacaatcgcaaggctgcactgcatggaattgatgggtctaggacgacctcttccatttgcccacagcagctctgttgttgttgatgaataaaaactcgtattgttgtagacaccactcggtccccctccggtggtcgcgacaacattaggttacaccgcaaggtgtaccgtacaataccgtacaatactgaccaccaggccgaaactggtgcctataactccgtacttgaacacctctctagaaaaagccgccccctcatagcaccagctaccgaagtgctgacagttccttcccaacacattgtaatccgccctgccgagctgcgagcgtgcccttttgaccacctccaacggtgagaaacgacacctcgcattcacaacccgtgcagagctgccaactaccaggaactctgccagagtagtctctctgataaatcgctttccatggggctctgaccccgcatagtggatgaccttgatgtctgctgcagaggaatacccttctgggggggcgctcacaatgccatcgtgctcgaacttgatgccgatggggttgacgcaatccacatgaagccacatgccagcctcgatgctcgccatgttcaacttcttagtacccatggcagactttttctgcgaggggtggcatacgcaaccaggggaaacatgtcagcatatctgacacgtgtgttcgcgcgcccatgaaaatacgagtgtaaacgtggcatttctgccacgttttcgcgctcctcgaagtcagcgaaagccgccttggtgtgtgtgaggatggtacgggtctgcgaaatcacagtgtgctgtgactcgactcgacagtttccgccgtgatgcgagaggtcgccatgtgatgtgatgtgactcgactcgacagataccgccgtccttgatgagagtggtctgtcggtctccgttcctcgaaacacgagtgtaaacgttgttgtgaaccatgtacgtaattcccttgtccgattgtacaaaaagcaaccatgcaggagtcggaaccatcccagcaagtgaagaactactacatcgatgtaaaacgcgaagatgcaattgctggattgaatggcctgttcggagtgtcacgcgaggactcaggtgcacgcctggtggagtacatgccatcccatgaccaaccaggtcccccgcatgcaaaacacaaatacacaaaaacaaaaaaaatggcgaaactttgactggttctcttttcacagagtgagtgtgtggacgagaaagaggctacaggtttccgccgtgatgcgagaggtcggtcgccatgtgatttgactgcttttgcagtgtacgaaacttattcgtaaaagagcatccaacagtgcatatcgtcgtcgccgtttatccaacggttttgaggatacacgcatgctaagtaaccaatgccaaagttagtcattgtgaccatgtgtgagtagcctaagctgctgctcaagaggatgcgtattcccatagcggtgctgatacggtcgataattggcttgaactctaaagcaactgtgcagagccatataaggagttgggcaccaggatggtgcgctccatgttggttgaccatttcacacaacaaatttgtagccgcctgaattttcgctttacttgtatcgcacacatggtcgcaaagtctattttgcagtccatccacgccgtttatgtccactaacctaccatcactatgcgagggcagtgtctgcgtgagtggtagcactgcttccgcagggacatccaaggtaatcaattcgcatactatgcgtaccctgtcatgaagagactggcgcatccccaattgtctcagtgcataatcgtgtaaatgaatagagcatggattcagaagcagatcacgagcaagcttacgcgttggcgcgacagccatgtgcggttcaagtgctgttgccatggcctgggcgtaagcaggctctgctattgctacacgcagcatcatttttgaaattgaagcaacagtggcccccgctgtctcattgtctagcagtatgacaatcgcggaccggataaagagatcctccacccctgctggcagatgtgctgtcgctacacattcattggccacatggatgaacacatcgatgcatggtatgggtatcttagctggtagttcagctaaaagtcgaaacagattcccaagaccgtcttgactgagtgcatctatgacggcaagcatatgggactgggaacgagttgcaatgaagagactgaccagtccgaccagatgacagtgttcctgcgtacgatcattacatgtccgaatgaacatgtcggtgtacagttggttgaactgtgggctgaccttgtcggtacctatgctgacctgccgaccacacgcattaagcgcaacgctcagaaagacggtgggcatgctggcgatcaagcaagcaataccgttcatgtccaatgtaagctcagtcgtaatgtcgttgtagtactgtagcatcctcgcaaccccctttgatgctttgcgcataatcacaggtgatgcagcatacggtgtggctgtctcgagcaaaactagcaatgccctagtagcagtcttgaaatcaccgtgtccagagcagcgtctaatcctagaagaagctagcatcaatctgatactcagtggtagtaagcaaccgcacatccacattgtgcaatgaactacagtgatatgatgacaacacgccttctctgccagcgttgcagcggccgcagttgacatcatgaacttagaacccttttatgcacctgaaaacagttaaactcaatggaatgagacagatcgggaaaaagctacccccgaaaacaactacaaaaagccctgcaaaaatctaccccccgaaaacaactacaacgatacgccaccgcattgccgtgtcatgtggatgatgttggtcagcttaaatgctgaaatgtctatgattgtacgagaggcgttttgggctactactacttgtacttacattgtactcaccaacgggagtgtaatgaattctttcaagagtctgcgtcggcacacaacataactcgggtttgtattcacgtgtctccatgtttcctgaatagtcgctgcggctctgcgtcttcgcactaaacggcacgcgtcttggacggataccaacatgttgcggtttctactcaataaatgccagtcccatggtttgtccgggttactcgagacaatgtcccaagtggctactccgggattcgcactcaatccaagccagttccacggcttgtccgggttactcgagacaatatcccaggtggctacactggggtttgtgctcaaataataccaatcccatggtttgtccatgttactcgacacgatgtcccatgtggctacactggggggtgtgctcaaccaataccaatcccatggtttgtccgggttactcgagacaatatccagggtggctaccccgggattcgcactcaatccacaccaatcccacggcttgtccgggttcgtcacgacaatatcccaggtggctacactagggtttgtgctcaaataataccaatcccacggcttgtccgggttcgtcacgacaatatccaatgtgactactccgggattcgcactcaatccacgccagttccacggcttgtccaggttactagacacgatgtcccatgtgacattggggtttgtgctcaaccaataccaatcccatggtttgtccaggttactcgacacgatttcccatgtggctatggtgtttgtgctcaatccactccaataccatggtttgtccaggttactcgagacgatgtcccaagtggctactccgggattcgcactcaatccacgccaattccatggtttgtccaggttactcgatacaatgtcccatgagatgacactggtgtttgcgctcaaccaataccaactcaatggtttctccaggttactcgacacgatgtcccacgaaatactcgcgtttgagctcaatccactccagtcccatggtttgtccgggttactcgacacgatgtcccacgtgacgacactggcgtttgtgctcaaccaataccaatcccatggtttgtctgggttactcgacacgatgtcccacgtgacgacactggggtttaagcacaaattactccaatcccacggtttgtctgggttactcgacacgacgtcccatgtcaggtatggattatcactcaattgaccccaattccatttgcattctccggcttttactcgatccagtatgtgactaatttcgatgtcgagcattatataaattctcacggttgtgttgtcctcaaataaagtaaagtgggaccattcttttacattacagtctacggaatactaaaatgaaaccgcttcgtgtacggtataacctaaatgtgtagaaatccacggggtagtggaacaccaatacgattgtgaatcaacaaattgcaagatgttaacgagaatatccattgaaggaccagccgcacttaagcgatcgcctcttccccggtaccgtggcccaaaagaacacggggtcttgatcgtgctgagttttccgttgaaatattcgcatgtcttgaagcgttctttggcctccttcagcagaaatgcgctgtccgggccgttcacatttccaaaataattttgagcatgcagggaagggaggatgagtgactttgataatcgtttgcagcagcttgaggcggactacaaagtgttgttcgaggaacaggcaaaccagcgtcaggagatccagcgcctggacaaggagatccaagcagtgcgggatgccacgtccacccagatcgagcgtgagttggaaagggcatgggccgaggcgtaccatgaactgcaagggatgttgaccgatgctcagttgacccaagttaaactggcaacattcggcatgcacaaactcacaccccatcttgcttgttgaaaatccttgcttgccatctcatggagcagcctcctgaacgactagctagcttgagacatcagatcacaaatccgctccataccatgtttcgcaaccagtcaaaatcggccgggaggcaggaacgcccattcattgtcaaagctttgcatggggggagttcatgaatttgcttggtgtgtttgccttgccataaaaataatgagagcggtaggtaatatacctgaaaaatgcatacgtattacgttcgtgctatatgcacgttgcaatatgatcaattgatagattggtttcgatcgcatcctaaaaacatatgctggcctcagcagatgatggactggggtgatgtgtttccagatctgtacgatgttctagacattgatgagggtgctgttgatcaagaaattctgagggcgtttcgcattcaagtggtcagggttcatcccgacaagctaggtcctttggcatctgaagatgaacgaacagcagctggccctccgcacacgagttattctgcaagcgaagaacgtgttgatgaacaccgaaagccgcaaggaatatgacagtgagcggcgaatgagaaggcaaggggatcagcaatccaagtctggttttagtgcgccggaggaggcatctgctggcatggcgcatgtttgggaggtctgggccaatgttgttgtagaagggtttgccaagcagtttgaggcaggagctcgaggagagcgagtggtgcagcttttggaaacgattctgctgccagccataggggtgggcttgggtggggagagaggcttcaagctagggctgacactgtctactgttttcaataccggatgtatttctgtggtcgtgaaggcgctctctgccgaggaccaaaagttgtttttccaggctctggaagtgttgtgtaccaaaatgccttgagtaatacagttgttgagaaaagtccgcagctgaattcccctgccccactccgtggggtcccgcgattcctctttcatacttgccatttcccgacatatttgagaattcccactttatttcagaacaacataaaggagtttcttcattgatctaataataattttgacgtgaactgtcaaaatgttgcaagaagaatatgaaagagaattacgtgtgttggtggaaaaaacatcgacccccgtccgaagcctggtaggttccatcaccaatgacttaactgtaacatggtttagcttgaaatggaaaatactcgaaattcttgggtatgacgtccaggtcattcatgcatgcgagtatggttgcggtagagtttcccctgcccactttcgtcaatcacccgcccctctctccccatccgtgttcatgtggttcagcctctgttaagttcaccacccatgtcatgcattcctttgtgtgtgtgtgtcagtcagtcagtctcagtcggaaccatcccagcaagtgaagaactactacatcgatgtaaaacgcgaagatgcaattgctggattgaatggcctgttcggagtgtcacgcgaggactcaggtgcacgcctggtggagtacatgccataccatgaccaaccaggtccctctcatctgaacatggccaccatcaagcaaatatttggatgacatgggggcgctcgtgaatggaaggaatagagagagagggaacgttacatactcagcaaaacaatgccgagacctgtactgatcaaagttgtttacactcgtttttattaaaacaattgtttagttgctaatctgtcatcggggttgtagctcagtggtagagcgtgaggttaagccaattttcttcattccttgatcatgtcgcccactaattggttcgaatctcggtacctccagtgtttttccaaagttccaccttcagttaatcaatttcctggcttcggatatcttgactgaagacgcgtccaccgtgatccacagctgtcacgatcatacgacgaattgtcacagatccaagtgttgttccgtctttcatgtcaatgttgatgagatgctgtatccatgacgaaagtctactcgcgcacataagtggcctgctgtatggctttcaaacaccttggcatttccagttttggcatgggctttgaggattttcgtctccaccacgaaaagtgtgttgatagcatgtgagaatacaagggcgtccccgttggcgcgcttgaagcagccgtcatcgaagacgtactccacagcgacgaggaacaaacgtgacgatggggatgtgtggtgtttttgtttaattaagtggcgcaatgcgttatactccaagacgcgtggatcgccggaagtagccgatgacgtccgcagtgcattgagacggctgacattccggcagtggaggcgatcaagaaactttgatgtgtcgagactgtccatgtccagcgcccttcctagttggcggactggatttgaaatgggctgacaaggttgtggcggcatcgcgtcgatgaagactcttttcttcgcgcatacgtggatgtggcaatgactccaatctcaaaagaaggctttacatatccgtctgtgtggcgtgtggaaagagcgagagagcgagatagaaagatagagagagagaaagagagagagagagagagggatagatattcgcgtgtgtatgtattttgcgttatttgtagatggaagaaaggaaagagtagggtggtgtgcgaatgacgagctagtgaagagctagtgatgaggagaataatagaaaaatatgcattctcggggcgaggagggtcttttatgatgcccggctatcgtacctccagcaatacacaaggattgggcatgcctataaattcgacagtgttccgcatcttgcgtgtgtcctccgatacattggacagtgttccgccgtttgcgatgacttgacgcaggcgttccgaatgaatccggtatttgagtattttcccttacaagtctgatgcttgatgtgaactgtgggctcccctccggtcgcccccggtcgctccgctggggggaagaggtgaaaggggctctgccgcttgtttatacagcccgcaattctgcggcgtttacggatatgtcactacactcgacggaatactaaaatgaaaccgctttcttgagtgtacggtacaccttgcggtgtaacctaatgttgtcgcgaccaccggagggggaccgagtggtgtctacaacaatacgagtttttattcatcaacaacaacagagctgctgtgggcaaatggaagaggtcgtcctagacccatcaattccatgcagtgcagccttgcgattgtgagagcagaagagcgatcccggtccgagtaaatgcatgtttctggagagaatcgcagtcctcgtacctctgggtaccgctcgatcgatttttgagaatcgacaagggaagtggcgaagccacccctcctgtgcttctcttgttcgcctttacgtttattgtaaactaccccctaagtggtcgcaatcagcgacctttggcatcgttttcgatttcgtgtgaccaaaacgttcactatatcctcatatttggctccttccttgccgatggatcctatctgtagctggacacggtctatttcttttccggagcttgagcgtgagggtgctctgagcagcaatttgacgaagaacctcatactctgccatatgctgcttatacacgcgagcctcctccaactcctccttcttctgttcaatgtcagcatgggcctgagtaatctctgcctgaagtgcctcccgcttctcttggtaccctcttctgctcaacaactgtttgatcacaacagccttcattttcaaaccctgcatctcgactgctgctatttctctcatgagatcgttcagtgacttgtctgcatcctcgccactgcccttctcagcctgcaggcaagctccatgaacctctttgctactttcttgaaaggaggtctcctcgagggacagatgcctgagcaagataatctactcctgatgatggccttcctcagcaggtcgaaacgccgctgctttcgacatatagctactaattatctgttgtttgatgccttgatggctcgccctgggcaaaactttgatcgatggcttcttctgggcgtggattgccagtgaagagatcctggccgggcggaattcacggatctagctcaggcatgcaatggaaaacagtaggcacgttgtggctacggaagattagaaagatagaaagcaaagaatgcgctggatcaaaaggagataaagcaacccacagttgcgttgtttgaggaacgggtcgcgatgaatcacatgtgcagaaagcgaaagaacgcatagtggcgtggcttattaaaagcggtacattccaatgcagctgaaagctttggtatcaaacagttgtatcaacctgcgagataactgcacaccaacactgcagttaccggattgtcgcttggttatcaggcatccactacccgtggtctgacatagaagagtgtttctcgtcaaaggactgctacaacatgtcgatcgaacacgggagatatgtgagacttcaacgaaactacaaggttgatttacctacatgcaaacaactagcgaaccagggaggacttgctggttgttcaaagaaaatggatttcttgcatgcaattaataacatgagtcaaacgcgtccaccatagtatcgaaacagcctccgattgctaaactatggactacattaatgaggagctgcactttcttagaactttgcagtaaacataaactgaacttgaacaagtagtatctatttaacgattaatacatccggtgaaccaggaggccaaagtagtaccattcctattaatcaaattatcatgtacaacatcctgacgcaatggatcacccatgcctgccttccaatccctccctgcacaagagcggcatggccacttggttgaagtttttcatctgcattacgtttgcaattatatgtttcataatgtcgccagtcaaatttgcatgggtggataacaaaggatttgaggccattggaagtctgtcaaaaagacacagacgttggttgtctcaactcagcgtgtaccggtggccagccgcaatctgaatccatcagcatcttgcagacatctgcatgaccgccttcgcagccagccgcaatacccagctgtctctagagttg

SEQ ID NO: 198 - DNA, 22376 bp, unidentified
  variation 21967..22376: note = n is a, c, g, or t
  source 1..22376: mol_type = other DNA
  misc_feature 1..22376: note = Fanzor polypeptide
aagggcatgttttcattgatcgatagcgggcgcgatgacattgcgtgcgatgacattgcgtgcgatgtcaccacctcccccatcgtcgtgaacaatgttgattaattttgaatggaattgattggattggattgtgtgtaaagaattgaatcgtccaacatacaaaataaaaacaaacaaattgtaagatgaagaatccttctaattccaatactgacggtgatctacggtccgagttccgttccttcgcattatcagagggtgttagtgagagctctatctccaactaccttaaccgattgtctactttggaaacatctgtgttccctgaattgagcttggatataatagttcttggaggacgacgttctgttgtgaagaagtcatctgcgaagaagtctttggtggtatcatcatctccgaagaattcatctttcacaacggtagatgacatcgacgctacgtacgacgtgttgcgtgtgcgttactctaacatgtctacgcgacgtaactttttgaccgccatattggcctttctgcggtacactccttccttacgtgacgacccccgcgctgcatctgcacgtgctcgttggacagaatttcacggacatgctcgcgcgtttcaagagtctcgttacaaacagcacatgccttcggagcggcaactcgagaagtacgtcggcctcgaccaaatcgattccaagtaccaagagctgaagggcggagatgttactaacactactcttcaagattcccttgacattttgttgttgtcattcgtcctttcgatgcctcctaaacgcgctgacatgggagctttgcgcatctacgaggacactgaccctcgtttgtcttcagaaaactaccttgtattgcgccgggcgtcttctgcgtcatccgttaatgccaccgcctacatcgtattgaacaagtacaagacgtccgcgtcatacggtcgtgtcgagacggatcttcctcatagcgccaccgcagacctcctggacagtctgcgtcactggccacgcgactacgtgttcgttacccgccgtggacacaacagaccgttcgcctcgaacaatgcgtacggacggtgggtgcagagcgtgttttctcgtctgttcggacgtgcgacgggagtgaccatgctacgacatattttcatcactgagaaggtaaaccctggttcgatgaacgatgacgagttggaagacatagcgcgtcaaatgttacactcgaccgacctgcaacggaagtataactgggaccgcgcgaagatctgcgagacgctctctcaaatgtgtgagcagtgtactggaggtaaagtacggacaaaatcaacgaagaagaggaagttcggatccgttgtgcatcttcccatcaagtaaattattccactggctaaataaattattatgaactattacaaccactcaaacaaaactatggcgactgggatacctttggcgacattaacgatcgctccattttcaggatatcagttcactaactctgcagttggagatttgctgatccacggtatcaacggaggcccttctcaaaagattctggtaggaacacaaagcaacaatcatgcgctagtttcgtttgagcaaaccgaggtcactgtgagggatgccaagttgtccatgatgaacgactcaggcggagtgcagctctccgcagagggggatgtaatgtacaccacagggtccatcatcccagcatcgacatgcaacgtgaccatcggatctgatgcatctcgatgggaaagtatgtacgtcaataacttcaccatgagcgggaaggcccagctggggtccaatgtgtccatgtccaatgctacaggtaaggcaaacatctggtcctcagggacctacttgggtgttaacacccccaacccgacccaagaacttgacgtgaacgggtccatcaacgtgtcatctaacgtcacaatcagtgagacgctagatgtcgggctatcaaccaccttgcaggacaccctactagtaaatggtgctgccaccctctccaattctctgactgttgacggagccaccaccctcgataataccctactggtaactggtgctgccaccctttccaattctctgactgttgacggagtcaccaccctcgataataccctgctggtaaatggtgctgccaccctctccaattctctgactgttgacggagccaccaccctcgataataccctactggtaactggtgctgccaccctttccaattctctgactgttgacggagtcaccaccctcgataataccctgctggtaactggtgctgccaccctttccaattccctaacggtggacggtgctaccattttggacgacaccttgctggtcatgggtgcgtccacgttttccaacgaggtctctttcgcggacagttccaccttccttagtaacgtgattgtcctcgggcagctcagcgtcgacaccgtcacctacaatgtgagcaacatcgttgtctttgcatccgaggagttgcgcagcaacttgcttgtggagggtgtcatggacgtgcggagcaacgtgttcttgggtggcaaaaccttgattggcgacgaattgactgtcgatagcaacgtttttatacagggggtaaccaccatgtccaacgacttgatcgttacaggcaacacattcttcctatctagtggtgcgcagacattcgaaggcgcggtcataatcaaagatactctggatgtctatagcaacttggtagctaagtccggtctccaggtggatggggtggcgtcattctccaatgacgtttacgtgtcgagcaactttgcggttcaaggagtcaccacatttggggacgcactcgaggtgaccggtgcatccaccctctctaacaccctcattgtggacggagccactattctcgacaataccctgttcgtgaccggggcatccaccctgtcaaactctgttgacgtgtacggtccagccagtcttcggaatgacctcttcgtcgcaggagcatccaccctctccaacaccctaactgtcgacggtgccactattctcgacaactccctgtttgtgaccggcgcatccaccctctccaacaccctcattgtggacggtgccactattctcgacaataccctgttcgtgaccggggaatccactctgtccaactccgtcgacgtgtacggccccgcaagtcttcagaatgacctcctcgtgatgggaacgtccaccctctccaataccctaactgtcgacggttccactattctcgacaactccctgtttgtgaccggcgcatccacgctctccaattccctcactgtgtccggagcagccactgtcgacaactcccttctggtgatcggggcatccactctgtccaacaccctaacggtcgacggtgccactattctcgacaattccatgctcgtgactggcgcatccaccctctccaattccctcacagtggacggcgccactattctcgacaataccctgtttgtgaccggggaatccactctgtccaactccgtcgacgtgtacggccccgcaagtcttcagaatgacctcctcgtgatgggaacgtccaccctctccaataccctaaccgtcgacggtgccactattctcgacaactccctgtttgtgaccggcgcatccacgctctccaacaccctcatcgtgtctggagcagccactgtcgacaactcccttctggtgatcggggcatccactctgtccaacaccctaacggtcgacggggccactgttctcgacaactccctgttcgtgaccggtgcctcgactttctccaacacaatggccgtgaccagctctgcaagcttcctgagcaacgtgaccatccttggtgaactgagtgtggactctatcacttacaacctgagcaacatcgtcatctactcgtccgaggagattcgcagcaacttgttggtggagggtatcctagatgtgagaagcaactttagggtggagggaactagcatgctctccaacgagcttcacctgttttcatcggcgaccctgtacaacgaagagtccactgtgactctgagcaacttgggaggatcagcgactctgtccgcaagctccaacaactttggttttaacatgttccctaccagcaatgcggagtataccgtagacattaacggtgacatcaacttctcaggagagatctaccaaaatggggccgtttttaagtggctggaactccaaccagtggggcaactacatcaactcgaacgccgcattcagaggcccctcaaccgccaccgacgcgttgctagtgtaccagtctaacaacctcgcattctcattgagcaacacctcaggcttggtgtcaatgtatacatcgaacaaattcgtcggcatgggcacctctaatccatcgcacgagctagacgtggtgggatctgtgcgcgcaactgatggcgtctacgtgaacagcaacgagtccttcttcaggggcgtgcgatctgactgtgtggcaggagttgcaggcgcttccgtcttccgcggcgacgtgtgggcgagttctactacctacacaaccggcaccggtatcctcaacaaggtgcagctgttgggcagtggtgcaattgtcgacaacctcgcattggagaaatccgtccctggcacttctaacaggaatctcccgcttgtatgggacgagtttatcacctgcgcggggggtgacgttgttgccaaaaaccttttcaccaccggctcctcgatggtcgacggctcattgtccgtcatagggagtctgacaggaaatagtgcagttcttaagtcagtggtcatcagcggaggacattccaacttccacactgacgcaggatcaatctcatccaacacgaccaccgttctttccggtacattaccgatggcttcttcaaacgttgcattggggtctgtccttttcgaggtcaatggagacactgccctaaacagttctcttgccttgcgttctaacgcttttgttggcggcgctttgttcgttggctcgaacatgaactcgaatgctccttctctgcctaacgcccttgcccccgagttttctaacgttcaccttgacgttcagggtgacgtcgtgatagaggacggtctgtttgtgcgtcgaactgctgctttcgacgggcgtgtgggtgtgggtattcacgagcctggctaccccgtggacgtgcagagtagtgtggaaggtgtttccatgaactgttctgcgaaggtgatcgcctcagagttcgttgtcttctcagacgcccgtatcaagactggcattgaggcttatgttgcggacgacttgattgagcgtctgtccgtgaagcgattcgagtacgttgacaccgtggagcaccctggttccatggtcggtttcatcgctcaggaggtcgagagcgtggctcctgaatgcgtgagcacgacctcgtctttcgtgacagacatttatagctccctcccgattgtttctcgtgacgacagggagtgtgtggtctccatatctaatgtgtctctctccgctgagacgaacgcgcgcatcgtcgatgatgcagtgcttaagtgccgtgcccagggtggcgagacattcttcgtgaccgtattgcatcgtgagggtgacctggtgaccgttttgtcttctatcgcgatgcctggtattgaggaagaggacgtcctcttcgtgttgggaacacgtgtggatgacttcaagatggttcgcactgatcagattaacgctatcgccgtcgctacattgcagagccagaacaagcgaatcggcgcactggagtctgaggtccgcgcccttgtggagagtctcaagaagtaacattttcttggatacacttggttgttgtccaaaaaaagtgcattaggtttatgggttgggaaaaatatgagatcccaaaagacatgcaacattcgtacggggatattctccgggtctattattttagctatcttcgtcattgcattactgattgcattactctaccagaggatgttaggggcaagatatcgtgagacattcgaagaatcctcctctaacaaccagaagtacttgtctgtcgttcatacccagccttcgcatcgtgtgtttatcgatgacattgaagagtcaattacgaccgacgtcatgtctgtgttggccccattggatgcttatggtcttacggttgtccgtggttcgaagggacctgatgcgcttcgaaaactcgaaaaagaacgtgggtacactcacgtcacatatagcaaattgatcgttgcggatgctctctccgcttcgatatctttgcctacaggttcacttttggtcgttaccttgttcgactcttacagcatcttgttgttgtttgcgggcccctcgatgtcttctgcgtcatcctcatcaacgctccgtggaattgccgccgagaaggggtcatcatccctagttgtccattgtgtggggcaagtttcagctggagctgtgagtattctcgagaagctaatgcaacgccaaaataacacgaaacctgttgtgcccgcaatgacactaattaccggacctagaaatatagatccgatgctgactgctgctgatacttcatctaaacttcataaatacgacgttctggtagtatgggggtctcctgagttcattcgtgtgacggtgaatgcaatgggtagcaacactagcgctggtgttaggtgtttgcagtacacggacgttgatgacacggctgatttgatggcggtgtctccgtctgtgctcccatccgatgtcgatgtgaagaacattctgcctgatgcccgtatcggagtagagccatcgacccgagtgatggcggtgttcaagagctatacgtccatactcacgccaccaagcatctctacgtctgcttctgaatccgcatcgacttcggcgtctgcctccgcatcgacgtctgcttctgaatctgcatcgacttcgacttctggctccgcatcgacttcggctcctgtttctgtattgagtgctgaccctgctttgtccgcgcctatcatcagatcaacattcctgtctctgtctaatagcgaggatggtgccgaccacgtgggcatgacgaacttaactctttggcaagagtctttaaagatttctcctgctgtgaaggatgcgcttgcgcatgcgaacgagaagcttatgggtgggtccgtgtcccaagaaaaaacgaccgagacgtttgatgttggtgaaggtcgtcgtcagcctgattctattggaggttattatgactcagacgacactccattactgattgtgcctccttcgaatctcgagatgcgtttggtgcgcacggagttattgtttcaccgggggcggcgtgtggaccgtcaccgtacgtggcttgcttctgtgggtggcgacagcgccattgtccgtgctggtgacgtcgttgtcctagagcaacaggttgatgcgaggaggaatgggtcttactatgtgttggatgtgacctcttccacctggctgttgacgacacactgggtcttgcgtgaggagaattcaaattcagattcaaatgaaaaatcggactcagtttcggtggttaatgttgacctgcgtgcgcggcgcgcccaggttatagtgaataggggtgggcaccgtgttcggtggtggcgcggttccccatgcataatccgcttgcgttcttcctcctctgcttctacttcacagacttttctggtgggacgcatcgattcgtttgacatggttaagaacacccttgtcgtggatatagtatcggctcagccgacggaccgtgtgtccgacgaggatgccgttgtggaggacgatatgttcgggtctgggttcgtttgctccaccacggcgtcgtcttcgggtgtttttaatacgcgttttgcgtgtatgaattcaggtggtgtgtgggacagaccgtgcacggaaaacgaggattgtcccttttttcgtttgggtaggggtggcagcgtgcttggggggtgtcaagttccgtcgggggggacatgcgagataccgctaggagttcaacgcgaagggtttcgaaaatacaaagggaagcctgttgacacccccccattatttgcattcgaaggcttggctccgttgaattttagttagaatttcttttacgaacagggaatttctgttcgaactccgcagtggtaagttttgcgtttaacgatcatgtattttattgttccgttgactataggataatggagacgtcagaggatattctccaaattgctatagatcttattcgccgtagccagacctacgaacctaagataaatctggttaaaccagaaatctctgaaaaaccagatgtcggtcaaactataatttcaaacacaaacaacgagcccgaaaacacagatcccgacgggttcgtgcacgttgacgcttcttcgtacgctgtaggtacattcaaaggatctccagaaaaggatcaggttagcagagatcctctggatccggtcagcagagatcctcatgatccttattattgtggtagcaatcctagcgtatccggaagtagtcttgtaaacacgacagggagttcggcgttactttccatcgagtacgctgaattcgcccagaagtatccgtacctcttccgcatgtgcacgaacgttccttctccagaatcagcagataacttgatcaagattctgcctatgatgctgcgtcaacgagaccgtgtcattgttgcagaaggaaaaggtgatggtgacaataataataatagtaataatgttttatccgaccgacttaagtcggctacggagatggtcatgcagcgattgaatgacacgtacattgcccctctgggtatcaagcccgtcaaatcgagtaagaaaaagtaggtctctgactgtaattttcaataattaatgaaattgaataatctccggacctgtttctggtttaaggggatagggtgtcccaaaaatagttacaactattatgtacacgaaaaacccatgcattgacgtttttctcacggcaggaggcttaaaaggttcgtaccaatacgggttcttcaaggagttaataaatgtatgacatcgccgttagaaaattggcgttaagaatggtttccgaattgggtgtgttaaaaacttctgtgtttacgaacatcagtcgttctactctgtggagatggaaacgctttggtgtaaatcgaaaacgacgtgaatttgtaagcaacctttttgagacgaataaggatttgttaaaatcgtttttattgtcaactcaatgcacaaccgcaagaggcgttgttgcttttttcaaaagtactcacaatgtacgattatcaagtaaaacagtgtatcgtttcataaaactcattggttttacaataaaaaggagcaaactccgtggacagtgtaaaggagacttagttccacttgtcaatgaattttgtagtaggtacattttaggtaaatcaatgctgggaaaattttagtatcagttgacgaatgtgggtttagtgagcgtctcaagccacattatgggtattcccctgtaggaaaactactggtgggtgggtacaccacagtttgttgatggcagtttttttagatggtaggaaagagttcgttgtgaagaaaggatctgtgaagaagaaggacttcgttgcatttattgaatcattgagtttgtgcaataactcagtagtaataatggacaatgccagtatccataagaaattggtactcagtcaccccgtcaatatttgttacacacctccttacagtccagaattcaatgctattgagctatgcttcgctaaggtgaagagagactttcgtcgtttgaactatataccgaatgaaacaaagacgcacgtgtctgatatgatttccttagcattcggcaacctcactgataaaattattatgggttgttttgaacacgtttggaacacttatgtgtataaagcagtctgtgacctattgattatgaaagatggctacgaaacctccgacagtcgcgaaattgaaggagctactgaaattggctgaagtaccatactcgtcgaagtcaaacaaggacgatcttgtccgtttgtgcgaagacaatggtctcatcgccagaccccctccagaatacaagacggtggaaaagatgtgtgtcgtgaaatgcgccctaaagaaggcaatgagtcttgacgatgaagaattcggtaagtttagggagcatgtggaccagctcgtcaatgtggtgagccgcatgttacggcggtccagtctggtgctgactttccacatcacgagtctcttagagaagggtctggagattccagacctgtacaacatgaaagatacctactggaaggattggctccgtatcggggtagacggaatcttccctgatgaggaaagcaagatatcgtacgaagctgtgaaggactccatcggcgatgtaattggtaatgacgacgctgactacatcaagtcctatccgatctatttcgatcaggtattgaactatgcaggtcacacattgagcacggtcgtgtcaaacaacgcatgggttcctttgataccacgtctggccagactcacctccaccactttaaataaattaaatgccccgaagacgctggacacatcgaagatcattcggggatacgacgtgatgcaggctattcagcaagaagtccaaaacatggagggatggccagagtctgttcaagagtacgtcaatgaagttagggagatgctgagtgttccagatggaagtcgagtttatgataactatggcaaagacatggactttccgaccatggtccggtttaattattggatacagacacggttggaggatatggatgcacgtcgtatccgattgatgcccatcttcaatgtccaacgggtgcatgttcgccttgacctgaagaccctcgtgaacctgttcaggcacatgttccccaatgaccagaacatcgttgagctttccaagtgggaacatgtaaagaatcccgaaagcttcatgttgccccagaggcctgcacagaagaagaaaaaatcatgtggtcctggtgaatgggaggcatacaagtcggtcctgaagcagtacgatgatgatgttaaggatatcaaggctactgacgagtacagacatgcaaagggtttgtatgacacgcttgtgaacgcccgaaaaacagtcgcaggttccttcttcagaaaaccacctgtcaagaatgggtgggttttcgactgcagcatctgtactgacggagtctctttgagcatgcagtacagcaagacagtacatgtccttgtctcggatttgaagaagacctgtaagaagcctcgtaaagaagaaggtatcaagatcgcagaaaaatacgacggctcacttaaaacgatattgcccgatatgggtatcgtcgtcctgggtgtggacccaggacggagcaacatcgctacggtaacgtatttggcagacgataaaaataagacatggaagctgacacgtggtgcattttaccacaagtcgggtatcaagaagcagacaaggcagaaggaactgcgttttgctgacatgattcctatgtgggagtctctgcgtgaaaatggagcagctttgaggacatcgaggacggataagatctccgcgtacttgtcaaattacgctaagttttctgacgagtggtggagattggctttgcgacgccgagaatcccgtgacaacttgcagcgttacatcggaaaacgaaaggtcaaagactctttctgggcgggtatcaagcggtgcatgatgaaagaacttcctgatatgaaggtttgcgtggcctacggatctgccatcacgaaactgaagcctactggaccgggagaagttgcagttcccactggggccatgttcgcatcgtgtaaaagaattttcaaagaggacgtttctgtgacagatgagttcaaaacgactcttatgtcgtgggagacgggtaaagaaaaagaacgtgtttacaagatcccaagtgtttgttcagcagacgtgaagcttaggttgggtggtgaacgttttggtcacacgaaatcgaaaacgatgccaaaggtcgctgattgcgaccacttaggggtaaggttgtacaataaacgtaaaggcgcacaagagaagcacaggaggggtggcttcgccacttcccttgtcgattctcaaaaatcgatcgagcggtacccagaggtacgaggactgcgattctctccagaaacatgcatttactcggaccgggatcgctcttctgctctcacaatcgcaaggctgcactgcatggaattgatgggtctaggacgacctcttccatttgcccacagcagctctgttgttgttgaataaaaactcgtattgttgtagacaccactcggtccccctccggtggtcgcgacaacattaggttacaccgcaaggtgtgccgtacacgaagcggtacaatcggttcttagttcaaggcaaaaattcttacactttaaaggataatatttggcgtgttcttcgtaatggaagtattttcacgtcattgcgcatcgatgaggtagagaagttctggtggagatatgttcgcccttacggaacgcctggttggtcagaatgcgtggagatcgtttattaaacggcatattcgtgggccgcgaggatgtaaaacgtcacatccgtgcaaccagggaccaagaggatgacatgctccttgtcctcgacacgtgctcggatttgttaatttatgctgacgatagttactgcactgtcacgttcggtcctcgggttaccaaatcaaaagcgatgtcattttgcgcgtcagagatggacatcgatgccctcattgacgagggtgaacgggacgcgcgccgttttgacatacttttatcttgtacgaccaaccgcttcaatgagtgagtgcggtacacggggtggggagggccattgaagcggggaagaacgcggctagaaagataattgtcctcaataggagctcgatgttccttgcaagtgctggtgaagtggttcctcctgtgatctttgtcggaagaaaacggactagaacacgtgtccatgatgccatgggtaacaaagtgacgagtgcgaagacgaggcctgccactaatgatatcatgatcgctccccatggcacactcgtagtagtaggagtattggatttttgaatctgaggcatctttacctctttctgtagatcttgaagagacgcgtcagttggatcatggttgacatggttcatatttccggtattagtggggtagttgttgacatgatccacgcttccgttattattagggtcatacgtagcggtttgttgcaacgcaacttgttgttgttgatgttgattctgcataggttgcataggttgcatattttgcagaggtatgttgggggtgtacattggtggtggaggtgtctgcattttgttgtgttggttattactattattgttgtttgagttgatgaattcgagtgtttcgcggacggtatcttcgtcatcttcgtccaggtctgcgtccttcattttcgtagaatgcgggatgggcatgaacgtcgttgccatcgggttttgttgttggtggtggttgggatggggtggagatgcgttcagcatttggatttgaattgggatacaaaacgattcgtcacgaatcaacgcatgagaaaaaataggaacaacccggttgtcattgcggatagcgtgtggaatacctgcgtatcctttatcgtatcctttaacgtattgtggaatacctgcgtattctttatcgtattgtcgaatacctgcgtattctttatcgtattgtcgaatacctgcgtatcctttatcgtattgtggaatacctgcgtatcctttatcgtattgtcgaatacctgcgtatcctttatcgtattgtcgaatacctgcgtatcctttatcgtattgtggaatacctgcgtatcctttatcgtatcctttatcttattgtcgaatacctgcgtatcctttatcgtattgtggaatacctgcgtatcctttatcgtattgtcgaatacctgcgtatcctttatcgtattgtggaatacctgcgtatcctttatcgtattgtcgaatacctgagtatcctttatcgtattgtggaatacctgcgtatcctttatcgtatcctttgtttttgtataaggcgcgttgttgtacccgatgtgtatgcggaccgcattgtctattatcattgaaacgtacaatgcgaacatggtgactatcgttggggatataacgttcagcttccagaccttttttattatgcgcattgatccaatgtacacgccaactgcgatacatgtagcgacagtttgtatcagggcgatcgctccttgatgtaatgggcgttccttgatgtaattgatctttgatgaaaagaggagcgttgttgcgagtcctgccgttaccacacaaacgtacacgaacagttgttctccaatcatttgacaactacttgtgttttttttgcagtgctctgagcacgagtttctttccaccgccccacacgatacctcttgctccttgaagaaaagatatcgttatgacgaggagacatgtcttgaataggtataacaacacgatgtattgttgttgcgttgctaggaactcgccgatttcatttacttgcacgtgttgatgtttgcaaaacgcgtgcagagccatgaatgcgattcctgctataccggtgattacgtaaggaagaattgtctctgatgttgatcctgctgcaatcatgtttacaattactttacaaaatcgtacatcttactttatcatgtgcacatgaagggtcgcgcgtgattctcttggaccagtatgtcgttaacgcattgtgttgttgtacatttctcgtctaggaatacgcgtgctaggactcgtccgtacttgtcggacttattcggagtgcactctgcccatgcgaagtacgacgacgtaccgtcgttgaaacgcttcttcagtcttccttcatcgaggatgggtgtttccgaacggatcaagagttgcgctagacggttgcgggcatgtcgtcctcttactcgatcttccccgcgcatttccggagtgtcgatgccgaatagacgaaacctgaactttgcaaaacaggcagacgacgcctctaagttcccagatggcacctccgtgatagcggttattgtgtcaccgtcatacacgtcaacgacctttatgagaacgcggcctgtgagcgcgaagtaatcgcaattgtttgaccaaagcgattccattttgtacaaatgtttactttagatacatttataaaatactttatactttacattcaacgaaatactaaaatgaaacctaagaaatccacggggcagtggaacaccaatacgattttgaatcaacaaattgcaagatgttaacgagaatatcgtttttttttttagtattgaaggaccagcctcacttataagcgatcgcctcttccccggtaccgtggccaaaaataacaccgtgtattgggatgtttcattttaatgttccacagactgtagatacatttacacatgttcgcgattcccaagtatgtgatcctatcagttgtggccgccatgttatggggttcttcgcatgtcatcgacaaactcgccctgtctcacatgcctcctatctccgtaactatactcaaatatattggttgtttatttgtatcgttggttgcatttgcactattttttagtaattgtgtgaagtctctcagaaaaaataactcttcagagaataatattggcgttgtccgcatcccctcgcgcggtgtcgtattgtctttgatatcaggggtggtaggtgccataggtatgttcatgtttgtgaatgctctcctactgagctccgaaccccatctcgtctcatccatcgtgagcatcgtgccagtattcagtctgatcattgggttcttatttatcaaaggagtgcgcataagattaaaacaagtgattgcgatgatggtcattctagcaggggtggtgatgctggcgacctattcctgagaaatttaaaaaagtccgcttggaggcaggaaattttaaaaaaatcgccgagaggttgcaacgcccatttcatgtttaaattgcgtataaggattttcttctctcaatgataaacccaacatggctcctgtatatgccaaccatgcgtactcgtccgctcgagcgaaggaactgtacatagccttctaccatgatgccaagaccattttgcgaacgataacgaatgacgttcctcagatggctgcggaactaagcatcgttctcgctttgatgaaggtgttgaagaaggtgaatgttcgcttgccgttcaagtactactatgttatgatggagggtcccttcggggaccatttgcgcacgtgtgacaataaattcttcatggaggacccgcgtttcgctatcgatggatacgatgcgctgacgcaactcatccgcaagcagttgaatcttgtagacagtgagtacgtgtactccatttttgtatcgttatccaagttgtcggctcgatgcaatgatatcatcgagcataagaaactcaagtacgataactggaagccgcgggtagatatggaacagttggaagagaaccaccagtagaactacactcaaaatattgttttattgtacacattttacactcgacggaatactaaaatgtagcaacccaagggaacaccatcatgtttctttgtagcccatcaacaacacgcatccctgcaaaatggaagcggtctcccttgacccaacagttccatgcagtgcagccttgcgattgtgagagcagagtagtgtctccaccgccccgtccgtggtcgcgacaacaggtcttcggagccggcaatcaaggggtttctgcatacagttgttctaaaatatttctgaaatgtccatatctttatacgttaaaaaaagagaatgcaaatccgaatgacacgcctgtgacgactgagatcgtcattgcgttgcgcaggatggacaccatttctttatttttcccctcttctggagagtaggaaagtgtaaataccgctgtcactcctacggctagtactagaaactttctgaagaattcgaacgtcgtccacgaatcgtgtccgatagtgagccaacggatatttgtatatttctgatcgattttaccaaggacaaagctgataacggctactatcccgatctgcaaagcggctatgattactttaatgttctttatgttcgttttgggtaagacgtactttgcgagggaaaacattaaatgaataggcaagatcatagcacccacgaaccacggtacggcacggatgtctatgggactgggtacaatccatggaatcttacaaaagatattgtacaccaaagattggggtttcgatagaactatggacaatgccatagccggtgtttggcgtaaccgcctgaacacagaggccacatggcacttgttcgtgtccagtacgaacgatacaacgtaaatgaaggcagatatgcacaacactttaaatgaaaaccactctgcatcctccaggattctcgaaacttttttcttatcatccttgtggtaaacgtggatgactatatatagtagaacgattgcaatacatagtatcaggatggcatataactccatggcgtatgtgttattacaacgcgccataagatttaggcaacggcgaccggcttgtctgcaggttgttggtgctgccccttaataacggtgaaatgggggttgatgtacctctgcatgttgaagtagttaagaatcacgtcgtcttcgatattcagcagagccttcagctttgcgtcgggtacgataatgcgtccatcatttggagactgtaacttgttctccttgatatataggttcaacccctgtacgacatctttcctggagacctgattatcgaccgaaagacccaggaactgtgccatagactctgacattgagcctagggcgaccttgcgaggaacggtgctgcttggcgaagccttcttcttgcgtccgcttgaaatagaagcactgtgcaccttgcagatgcgcacatactccttttgcaggatcttggtaatagcgacggcgtccttcataacaatcgagatgctggcgatcttgtcggcgagctcacccaacttagatgtcatgacatccacctcagcgactgaggttgaggttgagggggtcacggtctccgtagttgtaatggtctctgcagtggtctccgcagtggtctcaggaatggtaacaggaatggtaacaggaatggtaacaggtggtgtggtggtagacgatgatgtggcaatgtcgccctttttgatatttgccatcttggtgactttcttgacgttgttggagttggagttggatgtggtggtggccattgcgttttcttttttgtttgggtagatgaagtattgcagaggaatttctttataccacttttcgggtgttgtcgggtcctgttttcataatgacgggatgaagtcccacctgacatcctcgcaaatttttttccatatctggtcttgttggtagagtttctctctggacttcagcagggggaagttcacgagatattgatccttctctagaagctgcatcatcttgtgtaggcagtacgagtacgacaagaagttctttctctttgggggctggtacttaaggaacgggatttggatggcgcagaacatacatcgtaccttgtcttccaggtcggggggcatgtggatagtggggattccgttaaggcggtgcattatgtgcgggatgtgttcgtagtacttgttgctatcgatcttcttgagtatagctcggatccgtttaggtgtcagtgtggccatgttcgtgatcttctgcttttttatctccatgatgatgttcatgaacacgtcctcggggatctccgttgtctccttcccctgaacctggttaagccactcgttcaagtgattgatgcgtttgtaggcaaagcacgcggcatccttgggagggtccttgtatgtcggtttgtcgtgatcgatcaatatgtattcgacggatctacactgcatgcacacgatgcacccgtcctgcatattcagcatgtgctgggtcgattcgcagtgagggcacacgcgatcaactcctgaggttccaaatgctcgtgtactatcatcctgttgaaccgtaggggtgcgcatagggccgtcatcgtaggctatcgctatgtatcggtccaataaggtagcacggtctgtgtcgttgggggaaatttggttgacgcgccctcgtgactcgatatggatggtgatgaggagactggtgaaatattgtgcgaataagaaagtgatgtcgctgtcgaaatcgatgttaaagatgcggatgtcgaaatcgtcgatgttggtgacgaggatgatccgaccttccccaaaaagtacgtcaaaataccagatgtagatgacgagtacgaattgagtgacgacgacggcgacgacacaaccgtgcttgtatccgatttctttggaaattgactctcaagaacgtcgttcccatcttttttggagtcgttcttgttcgagtcgatgatttcgtagtatttgtatagaatgtctcctgtgcggagaaagtagtcgttctcgtcaccactgttttgcaagtatttgacttgttgacgggtggtgtgcagacggtcggacagcgtcgcgaaacgctcgaaatcgtggtctgcccatgcgctcctcggcgtgttctccgtcattttatttagttcgctttggatgcaatcttggtcggaacgcattgacgcaagttgcgattgtttcatgcgcatgtgaccaagatgttttgtgtgcctagcatcaagggtcctctttacgtccacggatgatgatgatgcagaggaagaaataccgtgaatgttgcgtccgggcttgacatttttgtaggtacacgaagcaatgttgctattcgtgcggtggatgtcagaagtcatcacacagagcacatacagtataaaaaaaaatgtgcttatgcattattttggtcctttttaaacttagtggttggtaggagatcattgcaacaatgaacaatgtaagacgaaatgctatcgtgttgagaggtacagcgcctcgtatagaagctgacgccgcatctcttaacattattgtagcccaacacgacaacacattggtaggcagtaacatcagcagcaacattgattacaacaacaacactgcatctttcgtcttctcccgagggagcaatgtgacctacctcatagagagtcaatctaatgacggagttcacgtctgtgtcacagacctgaagtcgtctgaactcgggcctaccacatggccacgagcggatccttacatgtccttcaggactacatatgaccaagaggtcatgcgcattaacgcaggtgggctcaaatgcacgacgttcaacgccgacgtttacgcatccctatcgagctcattcaacagcgctaacgtgttccgccctcctagcgagtacgcgctatcggaagcctacatcaccctatcaaacatggtcgtcaaacgaacggtatcactttcaagcaacgctgttctggatgacttatcgattgtggactcttacatttcagaatctgtattggaggcgcctactgcatccgcccttagaggcgcctactactcgctcagcaaccaaatggctttgaacttcgctcatcaagccatcgctatgaaactcgactccaatctatttgaagctgcgtcgtcgatccctccgttccctgccgacggatatgtggctgacatcaaccgacgtgcaacccgcgtttccgattcgacaatgacggaagcacatggatagcgacctcgtccaacttgacatttttcgacaacgtgatgcagagacagatcgcaacactgtcaagcgacggctctctttttctgagaaaggacgcgaatttttgcggcgacctcacagtcgaagggggcgttagtctggggtcggatgtcgtcatcacacacgatggagcaacgtaggtgtcaacatgccgcacgggactgtgccggacatagcacgttccacgttaacggaagcgtattctctacgcaacaaattttcgcattgtccgacagacgtgttaagactgatatcaagcggatagatgacccattggatattgtagaagcgatcaaagggtacacgttcaaaatgaacggaaaacgcgtggtgggtgtcatcgcgaggaggtaaacactgtcatgcctgaagccgtctcgatggtcaataacggtaaggatgactcatgtccgtactcatacgacggttctcgtcggggtccttttcgaggcagtgaagaaactgtcattggatgtgcaggagctaggtgtcaaagattgtcacaagactctacgacactgccacaagactctacgacgttgtcacatgacctacgaagccggcttatgttcgttgcttgaatcggtaataccgttgtgtgtgtttgtgttgtttagtctcatgttcatattggtgtgtctgaggaatcaagttacgggacttgtgaagaacattcggttgttggacactttgtgttgttgttgttgtgttctgtgtatagttgagttgttagcagagttggtgggtacatcgtacttctcaaatgtcttaattatttcagtgaggtacgcgagcgaggactgcagctagcgatggcgcattcgacacgaaatagttgttgctgatggctatgaagttgatgttgcaacctggcgtctgaattcctctggaaaaccgtaagtggggtgctacattgagattgactgtctcggatggagattgtgatctgctacgcttggagacgcgcggttaaacgcgtactcccatgatgcaggttcgggtacatggtacatgtttacaaaagcacacaannnnnnnnnnnnnnnnnnnnnnnnnnnnnnnnnnnnnnnnnnnnnnnnnnnnnnnnnnnnnnnnnnnnnnnnnnnnnnnnnnnnnnnnnnnnnnnnnnnnnnnnnnnnnnnnnnnnnnnnnnnnnnnnnnnnnnnnnnnnnnnnnnnnnnnnnnnnnnnnnnnnnnnnnnnnnnnnnnnnnnnnnnnnnnnnnnnnnnnnnnnnnnnnnnnnnnnnnnnnnnnnnnnnnnnnnnnnnnnnnnnnnnnnnnnnnnnnnnnnnnnnnnnnnnnnnnnnnnnnnnnnnnnnnnnnnnnnnnnnnnnnnnnnnnnnnnnnnnnnnnnnnnnnnnnnnnnnnnnnnnnnnnnnnnnnnnnnnnnnnnnnnnnnnnnnnnnnnnnnnnnnnnnnnnnnnnnnnnnnnnnnnnnnnn

SEQ ID NO: 199 - DNA, 22379 bp, unidentified
  misc_feature 1..22379: note = Fanzor polypeptide
  source 1..22379: mol_type = other DNA
cattcaaatccatgaccgtgccgaacgcgatcatccccccccaacacaggaagagagcagccgaaaacaaaagcgagtgccaccatttttgggacacagggggctcaggcgattccgaaacaaccgcgactacagtgcccatcgtcagatttgtcaatcatacagctacaatacagctacagggacattttacagtcggagacgcaatttgtgggacaccctaccggtgacccttgaacctgctcgtaccgcttgcgcatcgagtacgagtaaaaaagaatctaactggcaacttgaatgcgaatacgatcaagcttggggataagtggacttaaagcggcgtgggtgacaaacatggcaatgacgactggttgcgactattcaataaagatgggactggatactacgggggtctggctgccgggctacgcaactcaacggtcccacgtccacgagagacatcaacgccaacggaaatgtgaatgtaacaggcaaattgaatgcgaatccgaatggaagaacagggaactcgaccactttttcgttcctgtaattcaagggtcaccggtaagggtgtcccataaattatgtctctgactgtaatattacgaacacatttcccatggaaatgaaagacatgctatcatcgtcatcttctcgctcggtctcagacgttgtggttgcttggtacaacgaaccgggggtggaacgatgggtatccgcgctggcttttgcgttttcggagcgtcctgcaggcgagcggtaccggatattcgtgttccacaagggtagtactgccgaagatgcaaagcaacgtttgttcgatgtattgggtacaaagtgtagtgatgtcgatgtctttttcgagcatctggataatgtgggtcgtgaggcagatacgtggttgcattacacggtggcgcgtttgcgtgctggcgacatgcctgtgaaccgtgtggccttcttgcagggtgatccttgggaccattttgggacgccgcatggtggcagggagaggaatctagatgtgttttcatcaaagcttgtgacattgcttgcgcctaccgctcatccgatggcatcgaaccctgagccattgttttgcaacctgatgagcgagtcgcgtgtcatgcggagagggctctcgcaccctcaacgtctggaccttgagcgggtttgggttgaggccttcggatgcgaatgtaaggtggacagttatgtgttcgctgcgggggcgcagtaccttgtggacgccatgcgcctttctcaagaaaagccattgtcttggtggacgtcccttcatcataaattgcgtgctgacgagatcaatgcttgggagatcgagcggttttggttgcatatttttggtgatggtgtataaaaacaaaatgcatgcttggaataagcatttcactccgctacagcatacagctagggacatttgattgtgggacaccttttattttgaaaagttgattatgggtataaggaaatgtgagtgaaatgttgtatcaccatgagaagaataagtagtgtcagacaaaggagagggggctaaaacgtttgagaagcagaagatggttgtaaataacgtcaaggtccactaagtactgcactgtcacaacagtgtcaaaagcgcatccaatgtggctatagtgcaacctggaacctagacgtgaactttgctgaaccttcttctgcttctgataacgtggagcgaccggatgtattctgtgttccctcgcccccccccctaaaaccccagcttccggagaggcaaatgtgagcgctcaaccaaccgacccacctgggtcagttagcagcttacaattgttatcctctgggccagcttaaatgctgaaatacgggatgaaggacacgaaggattgggaccttgatacaaaacctttagctgacctacccaatcaattgggttcaagggtcaccggtaagggtgtcccacaaattctgtctctgactgtatacattacttgtgtcgtacactcggacaagggaattatgttacataatatgccgagtcccccaaaatcctcttgtatgtgtttatcttctacacttcgctcgacactgcgttctgtaaggaacctgtcagattgtaatcaattgtgcgtcctaccacaacttccagttttcaatatttctttggcctcgcaagaattccggggcgggttgggtacattgtaaagcaattaatgggcgttcctgcctcccggccgattttgactggctgcgaaacatggtatggagaggaattgtgattccttggtgatgatgtctcaagctagagagtcgttcaggaggctctaaatcctgattagaaatttaaaaaaatcggccgggaggcaggaacgcccattaattgtggatgttaatggatcgttcagatgaagaggacacagaatggaaacatacaaaaaatgatttgttcgcgtttacattttcctggtaattgttttttcactgctggagacggccaaattgcaggcaaaagctatgtaaccaagttaagttcaagaaccactcttacaaaacctacagtcaatcttatttaagtacctatcactaaaatttaaattttctctattatttcgttcgtgttctgggcccgtgaaagagatcaggaattgcctttcacgtcgtcagaatgttctgttcaaaaacgtcgacgaacgcaacacttcttgtacttgccacggctgcttccagaagctcgtcaacatgaaggcagacagcgtcgtctggcgcagagttcaaaacgagccctccgccctcatcgacggggctcctacaacaacaacgattgagaagcagaagacggtggtgaagaacgtcaaggtccacaaagtactgcactgtgttgcaacagtgtcaaaagcgcatcatccaatgtgcgctgtggtgcaacctggaaccgagacgtgaacgctgccaagaatcttcttctgcttctgacgacgtggatggacgggaaagagcgaccagcggcattttgtgtgccctcctcatcgcccaccccaaaaaccacagtttccggcgtcttcgccaccggcgtctggccttgccgagtcaaacccgaagggtgattcgtcatcatcatagttctccggcaaatcttctgtttctggatcaaacacccggagtgaagtgtcgacttcgcgcgtgatactttgaagtcccgaccgccgcatgtgctcaaggcactggttgacgaggagatgggacatgtgcgcagattccaactttgcgaagtaattgactttgtagcacactgcgtccttcttgtatgcaattttcacagagttagacatcttggtcatgaagtcatcgcatacgccaggctcgaacaggtgttcgtgcatgacgtgcgccactgcggtatgaacaaatatcgtagacgtccgcccgcaaaagtgatagtcgagttcatccagaacgcacaagactacaccacaaatcgtcttggcaatcatgtgtgcacgtctagtgtcgatgccgtcgatgagcggttgtgccacttcgtgaagcatagtcttgacttcttcaatcacaatcctcttgagatgcgagctcccctcctccttgaacaacgcaggtgagagatcatccttcatcttgttcattcctttgtcctcagtattgcgaaaaacatacttcttcaagttgagtcgatgcgtagatgatgtcatctatctaaaattactatgagtcttctgtgaaagacaacctatttatactatttttcttgttgtccggggtttagggtttatttttaaatgcgggttgggggggcgcccaatgaatgcacatcccatcgaatacagtcagagacagaatttatgtgaccttaccggtgatgggtaggttgatgcagaagtaagacacaacgcatgtcatcaagcaatcgtgatctccacattcgatcgcgatgacgttgaaccaatggaagtgaagattgcgcgcgtgttcatcgacgaggctgatacaatctccgcctgtactgtcgctagggacgccggcttccactggtacgttacctccgacacaatttaagtacctatcactacatgtatcaagttgtacatagagaattgtaattgattcaatatactgtaacattattgaccggtctgagtgtaacatcaaacgaataccattaaaagatgatggcgctgtagaacattcaaaaaatccgcagtgaggcaggaacacacattctgtaccgcttgcagataccgccaggcaagtgcaaccaagggtttacagggtttatcccaactcagtatttatttataccatcctgtgcgcttgcatgcatgtataatcgaacatgcattcgcacacgcgatcatcgtttccactcctaacgtgtccctatgacattcttgatcgtattgccctattctcttccaacccaaagattgtattagtttgtaaaactctgcacaacagattttcgggatggccccttaccggattgatccaaccaccacagagaattggagagatgatggcgaaaggggggcgcgccgaccttctagcagtatgcttggtgtccaatcctattgtacagcttaagggggccctacaattgagggcgaaccaaaatgaaaacaagcttctctatgtggctgctaaggaaggtcacgcagatgtctgcaagctgctgatggatccagaggtggctggaattgagttcagggccagggcgaactctagcgacagctgggcattgtgggcggctgcaaacgaaggtcacgcagatgtatgcaagctgctgatggatccagaggtggctggaattgagtatagggcccgggcgaacactagcgacagctgggtcttgtgggcggctgccaaggaaggtcacgcagatgtctgcaagctgctcatggatccagcggtcgctggactggagttcagggcccgggcgacctctagagacagctgggcattgtgggcggctaccaaggcaggtcacgcagatgtctgcaagctgctcatggatccagaggtggctggaattgagttcagggccagggcgaacactttcgacagcagggcattgtgggcggctgccaaggcaggtcacgcagatgtctgcaagctgctgatggatccagaggtggctggaattgagttcagggccagggcgaactctaacgacagcagtgccttgtgggcggctgcaaaggaaggtcacgcagatgtctgcaagctgctgatggatccagctgtggctggaattgagttcagggcccgggcaaactctagcgacagcagggtcttggtggcggctgccaaggaaggtcacgcagatgtctgcaagctgctcatggatccagaggtggctggaattgagttcagggcccgggcgaactttagcgacagcagggccttggtggaggctgccaaggcaggtcacgcagatgtctgcaagctgctgatggatccagcattggctggacttaagtacagggcccgggcgagccatatcaacagcagggccttgggggcggctgcggccaatgcaggccacgcagatgtctgcaagctgctgatggatccagcagtggctggactcaagtacagggcccgggcgaacgctagcgacagctgggccttgtgggcggctgccaaggaaggccacgcagatgtctgcaagctgctgatggatccagcagtggctggaattgagttcagggccagggcgaactctagagacagccgggcattgtgggcggctgcaaaggaaggtcacgcagatgtctgcaagctgctcatggatccagaggttgctggacttgagttcagggccaggccgaactctaacgacagcagggcattgtgggcggctgcaaaggaaggtcacgccgatgtctgcaagctgctaatggatccggcggtggctggaattgagttcagggccagggagaactctaacaacagcagggctttgtgggcggctgcaaaggaaggtcacgcagatgtctgcaagctgctcatggatccggcggtggctggaattgagttcagggccagggcgaactctaacgacagcagggctttgtgggcggctgcaaaggaaggtcacgcagatgtctgcaagctgctcatggatccagaggcggctggcttgccaccttagagcaagtatttatccactctcctcaaacttttcagcaatgtgttcagtttgctaaagcgaaaatatatcgctgcgtgtgcccaattattccagataaatatttgattatgaggcaggaactctttaaaaatgattattgattcgcacgatgtgagccagcactttgacttttcaggctactttgaagatgtaacttctatatctttacagtccttgaatgtttctctcctgaagacaatatctgttgtattgacaagatcggttacaaaacttgatgaaacttgtcaatttgcaccagtacatttgttcctgcctcccggatggattttgactggtttcggagccttgtctggtcggaatcgcaattccgaggagagctaaatatctagttggcgagtgagtgagtcgttcgtacggctctaacttctgcttggaaaaatcaaaaaaatcgccgggagacaggaacacccattctgtaccgcttgcagataccgccaggcaagtgccgcttgcatgccaggcaagtgcaaccaagggtttatagggtttatcccaactcattgtttatttataccatcctgtgcgcttgtttgtacacacatgttcatcgaacatgcattcgcacacgcgatcattcctaacgtcggttccccatgacattcttgatcgtattgccctattctcttccaacccaaagattgtattagtgtgcaaaactatgcgcaacagattttcaggattgccccttgcccgactgatccaaccaccacagagaattggagagatgatggcgaaaggggggcgagccgaccttctagcattatgcttggtgtccaatcctcttgtacaggttaagggggccctacaatttagggcgaaccaaaatgaaagcaagcttctccatgtggctgccatggcaggtcacgcagatgtctgcaagctgctcatggatccagaggtggctggacttgagtacagggcccgggcgaacaatgacaacagcagggccttgcgggaggctgcacaggaaggccacgcagatgtctgcaagctgctcatggatccagcggtggctggacttgagttcagggccagggcgaactctagctccagcagggccttgtgggcggctgcctatggaggtcacgcagatgtctgcaagctgctgatggatccagctgtggctggacttgagttcagggcccaggcgaactatggcgacagctgggcattgtctcaggctgcctatgcaggtcacgcagatgtctgcaagctgctcatggatccagaggtggctggaattgagttcagggcccgggcgaactctagatacagcagggccttgggggcggctgcccatgcaggtcacgcagatgtctgcaagatgctgatggatccagcggtggctggacttgagttcagggccagggcgaactctagcgacagcatggcattgtgggaggctgccaaggaaggtcacgtagatgtctgcaagctgctcatggatccagaggtggctggaattgagttcagggccagggctaactccagcgacagcagggccttgcttgcggctgcacaggaaggtcacgcagatgtctgcaagctgctgatggatccagtggtggctggaattgagtacagggccagggctaactccagcgacagcagggccttgtgggcggctgcaaagaaaggtcacgcagatgtttgcaagcttctgatggatccagcggtggctggaattgagtttagggccagggcgaacaatctcaacagcagggccttgcgtgaggctgcacaggaaggtcaagcagatgtctgcaagctgctcatgaatccagaggtggctggactcaaattcagggccagggcgagccatatcaacagcagggcattgtgggcggctgccaaggcaggtcacgccgatgtctgcaagctgctcatggatccagaggttgctggaattgagttcagggcccgggcgaactctagcgacagcagggcattgtgggcggctgccaaggcaggtcacgccgatgtctgcaagctgctgatggatccagaggtgactggaattgagttcagggcccgggcgaactctgtcgacagcagggccttgatggcggctgccaaggcaggtcacgcagatgtctgcaagctgctgatagatccagcggtggccggaattgagttcagggcccgggcgaactctgtcgacagcagggccttgagggcggctgccaaggcaggtcacgcagatgtatgcaagctgctcatgtgatccagcggtagctgtccccgagtttagggccattgtgaaacttgaaagcaactgggtcttgtgttaggcaagacacgtttcttgccaccgtagagcaagtatttatttactctcctcaaacttttcagaaatgtgttcagtttgctcaatcgaaaatatcgctgcgtgttcccaataattccagatgtagcataaatattatttgattatgaggcaggaactctttgaaaatgattattgatgcgcacgatgtgagccagcactttgactttgcaggctactttgaagatgtaacttctacagtcggcggaacaataaaatgaaacatatatcagatggaaataaatgtacgacatcgccgttagaaaattggcgttaagaatggtcgctgacttgggtgtgttaaaatcttctgtgtttacgaacatcagtcgttctactctgtggaggtggaaacgctttggtgtaaatcgaaaacgacgtgaatttgtaagcaacctttttgagacgaataaggatttgttaaaatcgtttttattgtcaacttaatgcacaaccgcaagaggcgttgttgcttttttcaaacgtactcacaatgtacgattatcaactaaaacagtgtatcgtttcataaaactcattggttttacaagaaaaaggagcaaactccgtggacagtgcaaaggggacttagttccacttgtcaatgaattttgtagtaggtacaaggagacaatcaatgctgggaaaattttagtatcagttgacgaatgtgggtttagtgagcgtctcaagccacattatgggtattcccctgtaggaaaacctgttatcgttaaaactactggtgggtgggtacaccacagtttgttgatggcagttttttcagatggtaggaaagagttcgttgtgaagaaaggatctgtgaagaagacggacttcgttgcatttattgaatcattgagtttgtgcaataattcagtagcaataatggacaaagccagtatccataagaaattggtcctcagtcaccccgtcaatatttgttacacacctccttacagtccagaattcaatgctacagtcggcggaacagtaaaatgaaacatatatcagatggaaataaatgtacgacatcgccgttagaaaattggcgttaagaatggtcgctgattacaagacatcggatttctttaatcttagcgatgggtgcgtagaaagaacaggctttgcgttgttgcaatagattcaaatctttgataaatcacatggcaacttttgacaagaaaaataataggttacaccgcaaggtgtgccgtacacgaagcggtttcatttaagtattccgttgactgtattgagctatccttcgctaaggtgaagagagactttcgtcgtttgaactacataccgaatgaaacaaagacgcacgtgtctgatatgatttccttagcattcggcaacctcactaataaaattattatgggttgttttgaacacgtttggaacacttatgtgtataaagcggtctgtgacgtattgattatgaaagatggcgacgaaacctccaacagtcgcgaaattgaaggagctactgaaattggctgaagtaccatactcgtcgaagtccaacaaggacgatcttgtccgtttatgcgaagacaatggtctcatcgccagaccccctccagaatacaagacggtggaaaagatgtgtgtagtgaaatgcgccctgaagaaggcaatgagtcttgacgatgaagaattcggtaagtttagggagcatgtggaccagctcgtcaatgtggtgagccgcatgttacggcggtccagtctggtgctgactttccacatcacgagtctattagagaaaggtctggatattccagacctgtacaacatgaaagatacctactggaaggattggctacgtatcggggtagacggaatcttccctgatgaggaaagcaagatatcgtacgaagctgtgaaggactccatcggcgatgtaattggtaatgacgacgctgactacatcaagtcttatccgatctatttcgatcaggtattgaactatgcaggtcacacattgagcactgtcgtgtcaaacaacgcatgggttcctttgataccacgtctggccagactcacttccaccactttaaataaattaaattccccgaagacgctggacacatcgaagatcattcggggatacgacgtgatgcaggctattcagcaagaagtccaaaacatggagggatggccagagtctgttcaagagtacgtcaatgaagttagggagatgctgagtgttccagatggaagtcgagtttatgataactatggcaaagacatggactttccgaccatggtccggtttaattattggatacagacacggttggaggatatggatgcacgtcgtatccgattgatgcccatcttcaatgtccaacgggtgcatgttcgccttgacctgaagaccctcgtgaacctgttcaggcacatgttccccaatgaccagaacatcgttgagctttccaagtgggaacatgtaaagaatcccgacagcttcatgttgccccagaggcctgcacagaagaagaaaaaatcatgtggtcctggtgaatgggaggcatacaagtcggtcctgaagcagtacgatgatgatgttaaggatatcaaggctactgacgggtacagacatgcaaagggtttgtatgacacgcttgtgaatgcccgaaaaacagtcgcaggttccttcttcagaaaaccacctgtcaagaatgggtgggttttcgactgcagcatctgtactgacggagtctctttgagcatgcagtacagcaagacagtacaggtccttgtctcagatttgaagaagacctgtaagaagcctcgtaaagaagaaggtatcaagatcgcagaaaaatacgacggctcacttaaaacgatattgcccgatatgggtatcgtcgtcctgggtgtggacccaggacggagcaacatcgctacggtaacgtatttggcagacgataaaaataagacatggaagctgacacgtggtgcattttaccacaagtcgggtatcaagaagcagacaaggcagaaggaactgcgttttgctgacatgattcctatgtgggagtctctgcgtgaaaatggagcagctttgagtacatcgaggacggataagatctccgcgtacttgtcaaattacgctaagttttctgacgagtggtggagattggctttgcgacgccgagaatcccgtgacaacttgcagcgttacatcggaaaacgaaaggtcaaagactctttctgggcgggtatcaagcggtgcatgatgaaagaacttcctgatatgaaggtttgcgtggcctacggatctgccatcacgaaactgaagcctactggaccgggagaagttgcagttcccactggggccatgttcgcatcgtgtaaaagaattttcaaagaggacgtttctgtgacagatgagttcaaaacgactcttatgtcgtgggagacgggtaaagaaaaagaacgtgtttacaagatcccaagtgtttgttcagcagacgtgaagcttaggttgggtggtgaacgttttagtcacacgaaatcgaaaacgatgccaaaggtcgctgattgcgaccacttaggggtaaggttgtacaataaacgtaaaggcgcacaagagaagcacaggaggggtggcttcgccacttcccttgtcgattctcaaaaatcgatcgagcggtacccagaggtacgaggactgcgattctctccagaaacatgcatttactcggaccgggatcgctcttctgctctcacaatcgcaaggctgcactgcatggaattgatgggtctaggacgacctcttccatttgcccacagcagctctgttgttgttgatgaataaaaactcgtattgttgtagacaccactcggtccccctccggtggtcgcgacaacattaggttacaccgcaaggtgtaccgtacactcaagaaagcggtttcattttagtattccgtcgagtgtatgtctttacagatcggttacaaaccttgatgaaacttgaagaaacgtaagaaagaaagacaatttgcaccagtacatttgttcatgcctcccggatggattttgactggtttcgaagcctggtctggtcggaatcgcaattccgcggagagctaaatctctggttggcgagtgagtgagtcgttcgtacggctctaacttctgctttgaaaaatcaaaaaaatcgccgggagacagaaacacccgttctgtaccgcttgcagataccgccaggcaagtgccgcttgtcgcttgcatgccaggcaagtgcaatcaagggtttatagggtttatcccaactcagtatttatttataccatcctgtgcgcttgtttgtacacacatgttcattgaacatgcattcgcacacgcgatcattcctaacgtcggttccccatgacattcttgatcgtattgccttattatcttccaacccaaagattgtataagtgtgcaaaactatgcgcaacagattttcaggattgccccttgcccgactgatccaaccaccacagagagttggagagatgatggcgaaaggggggcgagccgaccttctagcagtatgcttggtgtccaatcctcttgtacaggttaagggggccctacaactgagggcgaaccaaaatgaaagcaagcttctccatgtggctgccaaggcaggtaacgcagatgtctgcaagctgctgatagatccagcggtgaccggaattgagttcagggcccgggcgaactctagcgacagcagggccttggtggcggctgccaaagcaggtcacgcagatgtctgcaagctgctcatggatccagctgtggctggacttgagttcagggccagggcgaacaatgacaacagcagggtgttgtgtgaggctgcctatggaggtcactcagatgtctgcaagctgctgatggatccagctgtggctggacttgagttcagggcccgggcgaactctagagacagctgggccttgtgggaggctgcctatggaggtcacgcagatgtatgcaagctgctgatggatccagcggtggctggacttgagttcagggccagggctaactctaacgacagcagggctttgtgggcggctgccaaggaaggtcacgcagatgtctgcaagctgctgatggatccatcggtggctggacttgagtacagggccagggcgaactctagcgatagcagggccttgcttgcggctgcccatgtaggtcacgcagatgtctgcaagctgctcatggatccagaggtggcaagacttgagttcagggcccgggcgaactctagagacagctgggccttgttgtatgctgccattaaaggtcacgcatatgtttgcaagcttctgatggatccagcggtggctggaattgagttcagggccagggcgaaacatctcaacagcaaggccttgcgtgaggctgcacaggaaggtcacgcagatgtctgcaagctgctcatgaatccagaggtggctggactaaagttcagggccagggcgagccatatcaacagcagtgcattgtgggcggctgccaaggcaggtcacgcagatgtctgcaagctgctcatggatccagaggttgctggaattgagttcagggcccgggcgaactctagcgacagcagggcattgtgggcggctgccaaggcaggtcacgccgatgtctgcaagctgctgatggatccagaggtgaccagaattgagttcagggcccgggcgaactctgtcgacagcagggccttgagggcggctgccaaggcaggtcacgcagatgtctgcaagctgctcatggatccagcggtgactggacttgagttcagggcccgggcgaactctgtcgacagcagggccttgagggcggctgccaaggcaggtcacacagatgtctgcaagctgctcatgtgatccagcggtggctgtccccgagttctgggccattgtgtaactgttacactcgacggaatattaaaatgaaaccgctttctgtagtgtacggtacaccttatggtgtagcaacccacggggcagtggaacaccatcatgtttttttgtagcccatcaacaacacgcatccctgcaaaatggaagcggtctcccttgacccaacagttccatgcagtgcagccttgcgattgtgagagcagaggagcggtcccggtccgagtaagtgctggtttctacagagaatcgcaattccgcggagagctaaatctctggttggcgagtgagtgagtcgttcgtacggctctaacttctgctttgaaaattcaaaaaaatcgccgggagacaggaacacccattctgtaccgcttgcatataccgccaggaaagtgcagcttgcatgccaagcaagggatttatagggtttatagggtttatcccaactcagtatttatttataccatcctgtgcgcttgtttgtacacacatgttcatcgaacatgcattcgcccacgcgatcattcctaacgtttccccatgacattcttgatcgtattgcccttttctcttccaaccccaagattgtattagtgtgtaaaaatctgcacaacagattttctggatggcccattaccgtactgatccgaccaccacagcgagttggagagatgatggcgaaaggggggcgcaccgaccttctagaagaatgcttggtgtccaatcctcttgtacaggttaagggggccctacaattgagggcgaaccaaaatgaaaacaagcttctctatgtggctgccaaggcaggtcacgcagatgtctgcaagctgctcatggatccagaggtggctggacttgagttcagggccagggcgaactctaacgacagttgggcattgcgggtggctgcacaggaaggtcacgcatatgtctgcaagctgctcatggatccagaggtggctggaattgagttcagggccagggcgaactctagagacagcagggcattgtgggcggctgcgaaggacggtcacgcagatgtctgcaagctgctgatggatccagcagtggctggacttgagttcagggcccgggcgaactatggcgacagctgggccttgtgggaggctgccaatgaaggtcacgcagatgtctgcaagctgctgatggatccagcagtggctggacttgagttcagggcccgggctaactctagagacagcagggcattgtgggcggctgcgaagggcggtcacgcagatgtctgcaaactgcttatggatacaaaggtggctggacttgagtttagggccctggcgaactctaacgacagctgggccttgtgggaggctgcaaaggcaagtcacgcagatgtctgcaagctgctcatggatccagaggtggctggaattgagttcagggccagggcgaactctagagacagctgggcattgcgggtggctgcacaggcaggtcacgcagatgtctgcaagctgctgatggatctagaggtggctggaattgagttcagggcccgggcgaactctagcgacagcagggccttgtgggcggctgcgaaggacggtcacgcagatctctgcaatctgctcatggatccattggtggctgggcttgagttcagggccttggcgaactctagcgacagcatggcattgtgggaggctgccaaggaaggtcacgcagatgtctgcaagctactgatggatccagaggtggctggaattgagttcagggcccgggcgaactctagcgacagcagggccttgtgggtggctgcacaggaaggtcacgcagatgtctgcaagctgctgatggatccatcggtgactggacttgagttcagagccctggcgaactctagagacagctgggcattgtctctggcttccaaggaaggtcatgcagatgtctgcaagctgctgatggatacagcggtggctggacttgagttcagagccctggcaaactctagcaacagctgggccttgcgtgaggctgcaaaagaaggtcacgtagatgtatgcaagctgctcatggatccagcggtggctggaattgagttcagggcctgggcgaattctagcgacagctgggcattgtgggtggctgcacaggaaggtcatgcagatgtctgcaagctgctgatggatccagaggtggctggaattgagttcagggcccgggcgaactctagcgacagcagggcgctggctgccagggcaggtcacgcagatgtctgcgtgctgctgatggatccagaggtgtctggaattgagttcagggcccgggcgaaccatatcaacagcagggccttgtgggcggctgcaacgaaaggtcacgaagatgtctgcaagctgctgatggatccagcggtggctggaattgagttcagggccagggcgaactctagcgacagctgggccttgcgtgtggctgccaatgcaggtcacgcagatgtctgcaagctgctgatggatccagcggtggctggacttgagttcagagccctggcgaactctagcgacagcagggcattgtgggcggctgccaaggaaggtcacgcagatgtctgcaagttgctgatggatccagaggtggctggacttgagttcagggccagggcgaactctagcgtcagctgggctttgtttacgtctgcgaatgaaggtcacgcagatgtctgcaagctgctgatggatccagcggtggctggaattgagttcagggcccgggcgaaccatatcaacagcagggccttgtgggcggctgcgaaggccggtcacgccgatgtctgcaagctgctgatggatccagcggtggctggaattgagtacaggggcagggcgaactctagtgacagcagggccttgtgggaggccgcgaaggccggtcacgccgatgtctgcaagctgctgatggatccagcagtggctggactcaagcacatggccagggcgaacaatatcaacagcaggcccttgggggcgtctgccaaggcaggtcacgcagatgtctgcaagctgctcatggatccagaggtggctggacttgagtacaaggccagggcgaactctagtgacagcatggccttgtgggcggctgccaaggctggtcacgcagatgtctgcaagctgctcatggatccagaggtggctggacttgagtacagggcccttgctaactctagcgatagcatggcattgtgggcggctggcaaggcaggtcaagcagatgtctgcaagctgctgatggatccagaggtggctggacttcagtacagggcccaggcgaactctagctacagcagggctttgggggcggctgcgaaggctggtcacgcctatgtctgcttacttttgatggatacagaggtgtctggccccgagtacagggtccttgtgaatcttgacagcagctaggtcttgtgttacactcagacacgtttctttctagccaccgtagagcaaacttttcagaaatgtgttcagtttgctcaagcgaaaatatcgctgcgtgtgcccaataattccagatgtagcagaaatatttgattatgaggcaggaattctttgaaaatgattattgatgcgcacgatgtgcgccagcactttgacttttcaggctactttgaagatgtaactaacttctgtatcttcacagtccttgaatgtgttgtgtcaatctcctgagttgacaagataggttacaaaacttgatgaaacttgaatttcttcgtgtaagaaagaaagacaatttgcaccagtacatttgttcctgcctcccggagggattttgactgttttcggagcctggtctggtcggaatcgaaattccgcatagagctgaatttctggttggcgagtgagtcgttcgtacggctctaacttctgctttgaaaattcaaaaatatcgccgggaggcaggaaaaccaattctgtaccgcttgcagataccgccaggcaagtgcctcttacagcttgccgcttgtcgcttttattccaggcaagtgccgcttgcagataccgccaggcaagtgcaaccaagggtttatagggtttatcccaactcattgtttatttataccatcctgtgcgcttgtacacacatttacatcgaacatgcagtcgcacacgcgatcatcgtttccactccttaagtgtccccatgacattcttgatcgtattgccgtttctcttccaacccaaagattttattagtgtgtaaaactctgcacaacagattttctggatggccccttaccggactgatccaaccaccacagcgagttggagagatgatggcgaaaggggggcgcgccgaccttctagcagtatgcttggtgtccaatcctcttgtacaggttaaggggggactacaattgagggcgaaccaaaatgaaaacaagcttctctatgtggctgccatggcaggtcaagcagatgtctgcaagttgctgatggatccagcggtggctggacttgagtacagggcaagggcgaaccatatcaatagcatggccttgtgggcggcggccaaggcaggtcacgcagatgtctgcaagcttctcatggatccagaggtggctggacttgagttcagggcccgggcaaactctagaaacagcagggcattgggggcggctgcatatgaaggtcacgcagatgtctgcaagctgctgatggatccagcggtggctggacttgagttcagggcccgggcgaactataacgacagctgggccttgcgtgaggctgcctatgcaggtcacgcagatgtctgcaagctgctcatggatccagaggtggctggagttgagttcagggccctggcgaactctagcgacagcggggccttgcgtgaggctgccagggcaggtcacgcagatgtctgcaagctgctgatggatccagaggtggctggacttgagttcagggcccaggcgaactctgtcaatagctgggccttgtgggcggctgcacaggaaggtcacacagatgtctgcaagctgctgatggatccagaggtggctggacttgagttcaggtcccgggcgaactctatcgacagcagggccttgtgggcggctgcctatgaaggtcacgcatatgtctgcaagctgctgatggatcaagaggtggctggaattgcgtttagggccctggcaaactctagcagggccttgtgggtggctgccaaggaaggtcacgcagatgtatgcaatctgctgatggatccagaggtggctagacttgagttcagggcccaggcgaactatggcgacagcatggctttgatggcggctgccaaggaaggtcacgcagatgtatgcaagctgctgatggatccagatgtggctggacttgagtacagggcccgggcgaactctagcgacagcagggccttgggggcggctgccaaggcaggacatgcagatgtctgcgtgctgctgatggatccagaggtggctggacttgagttcagggccagggcgaactctagcgacagctgggcattgtggctggctgccaaggaaggtcacgcagatgtctgcaagctgctgatggatccagcagtggctggacttgagttcagggcccttgcgaactctagcgacaactgggccttgcgtgaggctgccaaggaaggtcacgcagatgtatgcaatctgctgatggatccagcggtggctggaattgagttcagagcccgggcgaattctatcgacagcagggccttggggtcggcggccaatgcaggccactcagatgtatgcaagctgctcatggatccagaggtggctggacttgagttcagggccagggcgaactctagcgacagctgggcattatggtatcagcttggataacactccggagagtggacttagtgtgtgcagcacgccaatctataaatgcggagacgagaataaatattacaaaagatagtggaaccataaagggacaccagcggaggaaaggggggcggtagcctggaacctgatcagggtacaggttagacagcgcgtgtcagaagaaccgatgacgcagtcaacagtaagctgacatagtactgtcaggaccgatagttctaaggaagtacataagtagtcaccaagtcataaaacgcgtgagagcaccgcaattcatgctgacactccacctatgacacaggtgacatacaatactacttctccacctatggcactggtgacatagaactatatgtaacagattgaaaaaaaaaaatcaaagaactccgaaaattcgagagaacttcaaatggaaacccaaaggtttataggaaggaatgaaacacggcaaaaaccaaaatttgccaagttagaaaaggatgaaaaccgaatatcaaagatgggtaacaacggtatagaaaacccgatccgggaataggaacctaatgccatacaatgataaccaaagaaaccgatgtaacaaaaaaaaaaaaattatataccctaagaagaagcggtcatcccaagcatccgcataaacctccagaacacagcaggatcaaggggcttggtgaaggggtcagcacagttgtccttggtgttaacataggcaacatctagtgaaccgtcctccaccagctccttgatgtagtgatgaataacatcaatgtgcttgctgcgagggaggagctgccagtcattggcccatctcagagaccctatgttgtcaccctgaatggtaactaaatcacaaggcagacccagatccaccctcaacttcttcaaccattgcacctccctggcagcctgagacagggcctgatactcagcctcacaagagctaatggcaactgtaggctgcctcttgctcatccagttcactatgcaccctccagccaggacagcaaagccagtctgagatctcctgtcagacccatcatcagcaaaggatgagtcactaaagacagtaaaagagaaatcagggctgtgtgtgtaagtgagtcccaggtgggaatgtgacctcaaatacaaaagcaaacgcttggctgccccccacagggggacggtagggtgagcagaaaacctggacaggtagctcacagcaaaggcaatatcaggcctggtgcaagtagccaggtatagcaaagcaccaacaagagagaggtactggctattagaggacaggggttctccaggtgggtcagtgacggtggacttgtccatgggggcaccaaacctgggcttggcagcagcagtcagaccaaactgctccaccagatcaacaatgtaggagtgctgggagaggttgatctgaacacacctgccgtcagagtcaagtgtacaagccatgtccaaggagaggaactgaaccggcacacccatctctttgacctcccagccagctttctccatagccttgatcagcaaaacatacctatccagctcactaaaagcacagataaaatcatcaacataggttaggacatagctccacccaccattagaatccctcctaaaatacagagcaggttccgccttgcacataataaaaccatgtgcaaccaaaacccgcttgacatccatactccaagccctgggcgcctgtttcaaaccataaagggacttgatcagcttgcatacaaggggaacaccgttaggaccaagtaacttaaagccctcaggctggtggcagtacaggtccagaccaggttcaaggggagcattcagaaatgcagtcttgatgtccagctgccgaacaaacatcttcctatgagtgatggcagccaggagcaccctcagacctgctttagaagaaacgggggcatatacatcatgaaaatccaacccaggacgctgcagaaaaccacgaaccacaaaacgtgccttgaagcgaataga

SEQ ID NO: 200 - DNA, 22379 bp, unidentified
  misc_feature 1..22379: note = Fanzor polypeptide
  source 1..22379: mol_type = other DNA
tgacgaatgtgggtttagtgagcgtctcaagccacattatgggtattcccctgtaggaaaacctgttatcgttaaaactactggtgggtgggtacaccacagtttgttgatggcagttttttcagatggtaggaaagagttcgttgtgaagaaaggatctgtgaagaagacggacttcgttgcatttattgaatcattgagtttgtgcaataattcagtagcaataatggacaataatgggcgttcctgtctcccggccgattttttaaaatttctaatcaggatttagagcctccggaaagactcgctagcttgagacatcagcaccaatgaatcacaattccgctccataccatgtttcgcaaccagtcaaaatcggccgggaggcaggaacgcccattcaatgccagtatccataagaaattggtcctcagtcaccccgtcaatatttgttacacacctccttacagtccagaattcaatgctattgagctatgcttcgctaaggtgaaaagagactttcgtcgtttgaactacataccgaatgaaacaaagacgcacgtgtctgatatgatttccttagcattcggcaacctcactgataaaattattatgggttgttttgaacacgtttggaacacttatgtgtataaagcggtctgtgacgtattgattatgaaagatggcgacgaaacctccgacagtcgcgaaattgaaggagctactgaaattggctgaagtaccatactcgtctaagtccaacaaggacgatcttgtccgtttatgcgaagacaatggtctcatcgccagaccccctccagaatacaagacggtggaaaagatgtgtgtagtgaaatgcgccctgaagaaggcaatgagtcttgacgatgaagaattcggtatgtttagggagcatgtggaccagctcgtcaatgtggtgagccgcatgttacggcggtccagtctggtgctgactttccacatcacgagtctattagagaaaggtctggatattccagacctgtacaacatgaaagatacctactggaaggattggctccgtatcggggtagacggaatcttccctgatgaggaaagcaagatatcgtacgaagctgtgaaggactccatcggcgatgtaattggtaatgacgacgctgactacatcaagtcttatccgatctatttcgatcaggtattgaactatgcaggtcacacattgagcactgtcgtgtcaaacaacgcatgggttcctttgataccacgtctggccagactcacttccaccactttaaataaattaaattccccgaagacgctggacacatcgaagatcattcggggatacgaagtgatgcaggctattcagcaagaagtccaaaacatggagggatggccagagtctgttcaagagtacgtcaatgaagttagggagatgctgagtgttccagatggaagtcgagtttatgataactatggcaaagacatggactttccgaccatggtccggtttaattattggatacagacacggttggaggatatggatgcacgtcgtatccgattgatgcccatcttcaatgtccaacgggtgcatgttcgccttgacctgaagaccctcgtgaacctgttcaggcacatgttccccaatgaccagaacatcgttgagctttccaagtgggaacatgtaaagaatcccgaaagcttcatgttgccccagaggcctgcacagaagaagaaaaaatcatgtggtcctggtgaatgggatgcatacaagtcggtcctgaagcagtacgatgatgatgttaaggatatcaaggctactgacgagtacagacatgcaaagggtttgtatgacacgcttgtgaacgcccgaaaaacagtcgcaggttccttcttcagaaaaccacctgtcaagaatgggtgggttttcgactgcagcatctgtactgacggagtctctttgagcatgcagtacagcaagacagtacaggtccttgtctcagatttgaagaagacctgtaagaagcctcgtaaaaaagaaggtatcaagatcgcagaaaaatacgacggctcacttaaaacgatattgcccgatatgggtatcgtcgtcctgggtgtggacccaggacggagcaacatcgctacggtaacgtatttggcagacgataaaaaaagacatggaagctgacacgtggtgcattttaccacaagtcgggtatcaagaagcagacaaggcagaaggaactgcgttttgctgacatgattcctatgtgggagtctctgcgtgaaaatggagcatctttgagtacatcgaggacggataagatctccgcgtacttgtcaaattacgctaagttttctgacgagtggtggagattggctttgcgacgccgagaatcccgtgacaacttgcagcgttacatcggaaaacgaaaggtcaaagactctttctgggcgggtatcaagcggtgcatgatgaaagaacttcctgatatgaaggtttgcgtggcctacggatctgccatcacgaaactgaagcctactggaccgggagaagttgcagttcccacaggggccatgttcgcatcgtgtaaaagaattttcaaagaggacgttttctgtgacagatgagttcaaaacgactcttatgtcgtgggggacgggtaaagaaaaagaacgtgtttacaagatcccaagtgtttgttcagcagacgtgaagcttaggttgggtggtgaacgttttggtcacacgaaatcgaaaacgatgccaaaggtcgctgattgcgaccacttaggggtaaggttgtacaataaacgtaaaggcgcacaagagaagcacaggaggggtggcttcgccacttcccttgtcgattctcaaaaatcgatcgagcggtacccagaggtacgaggactgcgattctctccagaaacatgcatttactcggaccgggatcgctcttctgctctcacaatcgcaaggctgcactgcatggaattgatgggtctaggacgacctcttccatttgcccacagcagctctgttgttgttgatgaataaaaactcgtattgttgtagacaccactcggtccccctccggtggtcgcgacaacattaggttacaccgcaaggtctaccgtacactcaagaaagctgtttcattttagtattccgtcgagtgtataagatcgacaacctgggccttgagattcgctcaattgacctcggctgccagcagtagattctgcccccttaaattcagtgacaagtggaactaagtcccctttacggagttttatttttcttgtaaaaccaattagttttatgaaacgatacgaagagacacgtacgaccgtcattcaagtaatcatcgttccaatgtaaaacacttcaaacgtcatcatcccacagggtgatacaagggaattatgttatctaccggtacaggtctcgtcgtcttcgcccccgaactcttccgcatttcgtggaaaaagtgaataacgtgttatctttcggaccacactttgacaaccggccggttcttgaacgtgcctgtattctgcatgtaattctcaaaggtcagcttgaatggcataggatgattcaaaaaatgtccccaaacaccgaatactcacatttcgaatacacacggttgtcgacgacttgtcgtcgtttatgatcattagcattaaggggatgactctctctaggccactgcgcatgcttctagtattgacagtcgcggcgagtttggtgatgcccgaaaaccgtgtctctatactatcgaatgcgtctagcgtgacgtacatagcggtgccgaagcaccccaaccattcccccccattattgtacacacgcatgatctccttttgcgtttccgaagatagagcgcccatcgtctgcatagtggcctcctcgtgtctgaagttgctcgaaaagtgccacaggaacctgaagccgggggtgtgtagggcaatagactcaggtataggttggttcaggaacatagcgtcgtgaatgaccagcgccgtctcgaacaagcgcttagtgaacatgtagtacaacggaatgatctcaccagcccccgcctgcaagtccgattcaatcacggtaagatgaggtatcgtcccttcgatgggtatgcatgctgcgcgcatgtccgggtccgagtggtcgtctacgatgaccaccggcatggtcgggtgcaccgctcggatgcggtgcacgcacgtgtgccaataccacatgtgcaccggttttttcatgcatcgcagaatcacgatgccatccacacttctatgaatcatcatttacagtaataccggtacatctttttaagcattttggatcaccggaaatggtgttgactgtctcctctcctactacagtcggcggaacagtaaaatgaaacatatatcagatggaaataaatgtacgacaacgccgttagaaaattggcgttaagaatggtcgctgacttgattggctttgcgacgccgagaatcccgtgacaacttgcagcgttacatcggaaaacgaaaggtcaaagactctttctgggcgggtatcaagcggtgcatgatgaaagaacttcctgatatgaaggtttgcgtggcctacggatctgccatcacgaaactgaagcctactggaccgggagaagttgcagttcccacaggggccatgttcgcatcgtgtaaaagaattttcaaagaggacgtttctgtgacagatgagttcaaaacgactcttatgtcgtgggagacgggtaaagaaaaagaacgtgtttacaagatcccaagtgtttgttcagcagacgtgaagcttaggttgggtggtgaacgttttggtcacacgaaatcgaaaacgatgccaaaggtcgctgattgcgaccacttaggggtaaggttgtacaataaacgtaaaggcgcacaagagaagcacaggaggggtggcttcgccacttcccttgtcgattctcaaaaatcgatcgagcggtacccagaggtacgaggactgcgattctctccagaaacatgcatttactcggaccgggatcgctcttctgctctcacaatcgcaaggctgcactgcatggaattgatgggtctaggacgacctcttccatttgcccacagcagctctgttgttgttgatgaataaaaactcgtattgttgtagacaccactcggtccccctccggtggtcgcgacaacattaggttacaccgcaaggtgtaccgtacactcaagaaagcggtttcattttagtattccgtcgagtgtacatcaatcagtccgtttcattttactgttctgcctactgtagaatgcgtcgctctgttcatcattgcgacgagatatggtgcgtccaattttgacttttctaccaatattttttccgtagcatccaattcgttgtacatcgcttcccacgcctcctggttggtgttcgagaacgcgggcggtccttcgtcgttcgaccgcggatgcatgagggctgtgacggagtgggcgaagtactctgcgtgaaggctcttcgcgaagtcctgcagcgcaccgaacgcggtggcggatgatgcattgcgtgtcttcagggatgaaatacccgcctgggacgcgatgtaggtggtgtacgccttgggtaatggggcgtgcgctccctgctttcgtacggcgtcgagcgcggcgttccagtggggcgagagggtggcggcgtgcgtggcgaagaaggcttgggtgtctgggtcagagtcggcgttatcatgccatattttttcgacctgcgagacggcggctgctcccaatagcacgacgaggtgaagcacatgatcgatttggtgcgtgggcatgttgtcgatcgctcggaactcgatgccgacgagttccttcccccaccgcctcgcgtcaataggcgcgttccgcgacaccttgaccttaggcgtcccctctccatgcacaaaccggagttccagtgtgtcgcggacgcggagccagaggggcacccaacccttcttcagggacatgtctaaagagtcgcagagcctgctgcggatgtcggcccccgtccctgcctctggactcctatgtaatgggatattccaagtgtaattagggtaataatacccgttccgcatatgtgagccaatgcatgctgtgaacgggacctttttgccatcgatccacacgaatagcttggacatgtcgtcgcgctgcatgcgtgccccgcgtcttgccagcatgtccgactcgttttcgaaccacatgacctggaacccggtaatcgaatcgacgtccggccctcgtgcgatgtacttcacggctgtggtgccatatccggcaaagttactggtgtccgcgcgcatactggcgcggttgtgcgtgttcttgtcgtcgccaagggcgcgggggtcgcccgagaaaagactcatgagtaatggctcaaccgtctgcagcagatggcccaggtacgcgtgctgcagttgcagcagcttgtactcgcgcaaggtcatgtctacattgcgatcgtgcgggagcgtcacccagacgtggaagctgccctcgtataaggcgtctccctgtggggtgattctgccgctccacggaaatatctgcgcgccggtgattccctcctcgttcgcgcgtgccaggaccgctgcttcggcgtcgtgcagctgtctcgccacgccggcaacggtcgcgtttttgtgctttgtgctgcgagtctccaggaatgggccgtccacgtcgtaagttttgtttatttttgattgttgttgttcttgtttttgttgttgggatttcttcgataccttgactgcgcggagcgcgcacaggctgcgcagtgtgtcctcatcggacagcggtgtgctaggtcgcttttcgttagggatcaccgtgatcgaatatatgtcgtcatagcagcaggtgacaaacagtgtgtccccactgtaaatgctcgtctgtacggtatccttgccttgcttgcgcatgaaggttttaatcgacaatgacctggacgcgttagactttgctttttcggagtccaagaaaagcccgtccagtcctgcgatgtgctgcaggtgctcgcggatcgcctttgtgtccaggtcgacgcctgcgggtgcgcgcacggcagacacgctctcatcgttttttatcgaagagtaatacgacccgccttggccgtactcggggaggacctttgacggaaggagcgtttgcgcacgcggggaagaagatagagagacgttgaactcgtgctcaacaccgagtccccactgcattatatgtattgttatacactcggacaagggaattatgttacgtaataatcctctaaaagtcctcttgtatgtgtttatattctacacttcgatcgacactgcgttctgtaaaatttacacatcaatacaatattgcaacagttgtctttacacatcaatacaatattgcaacagttgtgttaacttgtattccgccaccgcatcgtgtgtaatgaatggacggacggatggattcgacagttttctgccggttattgtaggtttctgcaactgaatccatcttcctgctccacgggacattcgagactactttaccgtttttccgtcattttcagatcaatcaacgaagtgagcccggaaatcggtgatatgtcgcccacgtcggtgttcgaaatgtccaggtgcaccaatgaagtgagtcctgccagtggtgatatgtcgtccacgtcggtaccctccatgttcaggtgaaacaatgaagtgaggccggaaagcggtgatatgtcggtcatgtggaggtgcgaaatgtctaggtgaaccaaagcagtgaggccggaaagcggtgatatgtcggtcatgtggaggtgcgaaatgtctaggtgaaccaaagcagtgaggccggacagcggtgataagtcttcgatcctgtcttcgatgttcggaatgtagaggtgaagcaacgaagtgagtcctgacagcggtgatatgttgtccacacgtgtgtacgacatgttaaggtgcgtcaataaagtgagtccggacagaggtgatatggtgtccacaagcgtgttatccatatccaggtgaatcaacgaagtgagtccggacagcggtgataggtcggcaacgtagatgtgcgccatgttcaggtgcgtcaacgaaatgagggcggatagtggtgatatgtcttccacttcgttgaacgacatatccaggtgaagcaacgaagtgaggccggacagaggtgataggtattcgctagcggaggtgtacgacatatccagataaaccaacgaggtgaggccggaaagcggtgatatgtattccacacgtgtgtaagggatgtaaaggcgaatcaacgaagtgaggccggacagtggtgatatgtcaaacacgtaggtgtgctccatgttcaggtgcgtcaacgaagtgagtccggacagaggtgagatgtcttccacttcgttgtacgacatgtacaggttaagcaacgaagtgaggccggacagaggtgataggtcttcgcccgctgaggtgtacgacatatccagataaaccaacgaagtgagtccggacagcggtgatatgtcaaacacgtctgtgtgcgaaatgtctaggtgaaccaacgcagtgaggccgacaacggcgataggtctacgcccgctgaggtgtacgacatatccagataaaccaacgaagtgagtccggacagcggtgatatgtcaaacacgtctgtgtgcgaaatgtctaggtgaaccaacgcagtgaggccggacaacggtgataggtcttcgccctctgaggtgtacgacatttttttgtagggtacgacgtctttcccacgattgatacctattttcaactcttcgagcctgcaaatgcgtgagacatagtccaaacttgtataatgtctcaggtggatccttgtgatacaccggggtgcgacgcatctccactgtttgctaacgagagacacttgtttgaggtggcattcgttcgaaatcgcattggatagaatgatctccaatacatcttcattgatttcgtcaaaagaactcattcgtttgtgttactgaagaattaatggttgtttacacatcatttgatgacgagaagtcgccgtcgccctcccagaggacgacgaaaccaccgaggacgttggcacggggtgcatgaaacagcgtgaggcgtacctcgccaccaagctagctacgctctacgagcttgcaattgagcttcgctccatgtccctcgtcttcctggcgctcagttagtaaaacctctttttttgtctcattttgtatatttttgatatgcctctgttttttttcttcccgaccgtgacaacgatgggtgtatttgccttgtcacacggacgcagattcatcgaagatgttcagtagcaattttactgtgcggattaattacatgtgcaaggagatgtatgataacttgcggggcatcgagggattcgctacagtgcggtgcccatggagggattcgctacagtgcggtgcccattatgggtattcccctgtaggaaaacctgttatcgttaaaactactggtgggtgggtacaccacagtttgttgatggcagtttttttagatggtaggaaagagttcgttgtgaagaaaggatctgtgaagaagacggacttcgttgcatttattgaatcattgagtttgtgcaataattcagtagtaataatggacaatgccagtatccataagaaattggtcctcagtcaccccgtcaatatttgttacacacctccttacagtccagaattcaatgctattgagctatgcttcgctaaggtgaagagagactttcgtcgtttgaactacataccgaatgaaacaaagacgcacgtgtctgatatgatttccttagcattcggcaacctcactgataaaattattatgggttgttttgaacacgtttggaacacttatgtgtataaagcggtctgtgacgtattgattatgaaagatggcgacgaaacctccgacagtcgcgaaattgaaggagctactgaaattggctgaagtaccatactcgtcgaagtcaaacaaggacgatcttgtccgtttatgcgaagacaatggtctcatcgccagaccccctccagaatacaagacggtggaaaagatgtgtgtcgtgaaatgcgccctgaagaaggcaatgagtcttgacgatgaagaattcggtaagtttagggagcatgtggaccagctcgtcaatgtggtgagccgcatgttacggcggtccagtctggtgctgactttccacatcacgagtctattagagaaaggtctggatattccagacctgtacaacatgaaagatacctactggaaggattggctccgtatcggggtagacggaatcttccctgatgaggaaagcaagatatcgtacgaagctgtgaaggactccatcggcgatgtaattggtaatgacgacgctgactacatcaagtcttatccgatctatttcgatcaggtattgaactatgcaggtcacacattgagcactgtcgtgtcaaacaacgcatgggttcctttgataccacgtctgaccagactcacttccaccactttaaataaattaaatgccccgaagacgctggacacatcgaagatcattcggggatacgacgtgatgcaggctattcagcaagaagtccaaaacatggagggatggccagagtctgttcaagagtacgtcaatgaagttagggagatgctgagtgttccagatggaagtcgagtttatgataactatggcaaagacatggactttccgaccatggtccggtttaattattggatacagacacggttggaggatatggatgcacgtcgtatcagattgatgcccatcttcaatgtccaacgggtgcatgttcgccttgacctgaagaccctcgtgaacctgttcaggcacatgttccccaatgaccagaacatcgttgagctttccaagtgggaacatgtaaagaatcccgacagcttcatgttgccccagaggcctgcacagaagaagaaaaaatcatgttgtcctggtgaatgggatgcatacaagtcggtcctgaagcagtacgatgatgatgttaaggatatcaaggctactgacgagtacagacatgcaaagggtttgtatgacacgcttgtgaacgcccaaaaaacagtcgcaggttccttcttcagaaaaccacctgtcaagaatgggtgggttttcgactgcagcatctgtactgacggagtctctttgagcatgcagtacagcaagacagtacaggtccttgtctcagatttgaagaagacccgtaagaagcctcgtaaagaagaaggtatcaagatcgcagaaaaatacgacggctcacttaaaacgatattgcccgatatgggtatcgtcgtcctgggtgtggacccaggacggagcaacatcgctacggtaacgtatttggcagacgataaaaataagacatggaagctgacacgtggtgcattttaccacaagtcgggtatcaagaagcagacaaggcagaaggaactgcgttttgctgacatgattcctatgtgggagtctctgcgtgaaaatggagcagctttgagtacatcgaggacggataagatctccgcgtacttgtcaaattacgctaagttttctgacgagtggtggagattggctttgcgacgccgagaatcccgtgacaacttgcagcgttacatcggaaaacgaaaggtcaaagactctttctgggcgggtatcaagcggtgcatgatgaaagaacttcctgatatgaaggtttgcgtggcctacggatctgccatcacgaaactgaagcctactggaccgggagaagttgcagttcccactggggccatgttcgcatcgtgtaaaagaattttcaaagaggacgtttctgtgacagatgagttcaaaacgactcttatgtcgtgggagacgggtaaagaaaaagaacgtgtttacaagatcccaagcgtttgttcagcagacgtgaagcttaggttgggtggtgaacgttttggtcacacgaaatcgaaaacgatgccaaaggtcgctgattgcgaccacttaggggtaaggttgtacaataaacgtaaacgcgcacaagagaagcacaggaggggtggcttcgccacttcccttgtcgattctcaaaaatcgatcgagcggtacccagaggtacgaggactgcgattctctccagaaaccagcacttactcggaccgggatcgctcttctgctctcacaatcgcaaggctgcactgcatggaattgatgggtctaggacgacctcttccatttgcccacagcagctctgttgttgttgatgaataaaaactcgtattgttgtagacaccactcggtccccctccggtggtcgcgacaacattaggttacaccgcaaggtgtaccgtacactccaaaaagcggtttcattttagtattccgtcaagtgtaatgtaatgtaaggaggttcacgccatctttcgtgccaccgcatcctccttgcgtgtagacgcataacgaagtgaggcgtgacagcggtgatatgtcgtccacaagtgtgttcgaaatgttgaggtgaagcaacgcagtgagtccggacagtggtgatatgtcttccacacgtgtggacgacgacatgttcagatgaaccaacgaagcgaggccggacagaggtgataggtcggtcacgtaggtgtacgatatgtccaggtgaaccaacgaagtgagtccggacagctgtgatatgccgtccaccatgtttgtgtactccatgttcaggtgaatcaatgaagtgaggccggacagaggtgatatgcatcccacgtcgttgtacgatatgttcaggtgaaccaacgaagtgaggcaggacagtggtgatatgtcggccacacgtgtggacgatatgttcaggtgaaccaatgaagtgagtccggacagcggtgatatatcgtccaccatgtggacgtaatccatgttcaggtgaatcaatgaagtgaggccggacagaggtgatacgttgcccacgtcgttgtacgatatatccagatgaaccaacgaagtgaggccggacagtagtgatatgtcgtccacacgtgtggacgacatgttcaggtgaaccaactcagtgagaccggacagctgtgatatgtcgtttaccatgtgggtgtactccatgttcaggtgaatcaatgaagtgaggccggacagcggtgatatgtcgtccacacgtgtggacgatatgttcaggtgaacctatgaagtgaggcctgacagcggtgatacgtcgcccacgcgtgtgtacgccatgtcgaggtgaaacaacgcagtgagtccggacagtggtgatatgtcgtacacacgtggggacgacgacatgttcaggtgcaccaacgaagcgaggccggacaggggtgataggtcggtcacgtaggtgtaagatatgtccaggtgaaccaacgaagtgagtccggacataggtgatatgtcgagcacgtcttccgaccttttttcataggattcgtctttcccccgattgatacagattttcaactcttggagcctgcaaatgcgtgagacgttgtccaaactgttataatgtcttatttgaatccttgtgacacaccgtagtgcgacgcttctccactgtttgcttacgagagccacttgtttgaggtggcattcgttcgaaatcgcattggatagaatgatctccaatacatcttcattgatttcgtcaaaggaactcatggaaaattaaattcattcgtttctgtcactgaagaatgaatggttgtttacacttcattcgatgacgagtggacgagaaagccgtgacccttgaacccaatttgtttaagaacgtgcgtgcatgaatcagactccctcacagcgtgaggcgtacctcgccaccaagcgagctacgctcgacgagctacgctcgacgagctacgctcaacgagcttgcaattgagcttcgctccatgtcccgcgtcttccagacgctttagttacactcagaccgtgtaccgtacactccagaaagcagtttcattttagtattccgttgagtgtaaccaaaggtgtgtagtgtgtcagcaactcttgagagagagagtattgtgaactattaactttatttatggagtctttagcttgtaaacgcttgacatgaagagctagacataaggctagattcggcaattaaacaccgccgcattctccgtagtgtcgtgtggagacagatggacgatgatgacggagtctgcgaacgcctccgtgtccatgtgtacggacgatatcactattgggtttctgcttgtgattgtgcggtaactttggatgaccccattaccacagtgaaagcggttgcgtaagatgcggaggctcatgcaaaacacggaaacacaaaaacacaccaatttacctaagggccttgtctggtgcatttcagaatccccaaaatacaaggtgtcgtcaaaagtagtgatatttcaccggcgccgtaaagctcccacttattttacagcgtaaatatatattatttcttgcaggacgacgatcgccatgattaccagattttttgagtatggtgattcgtacgaattctttggtgtgcacaacaagtgctcaagggacggtttcgaattccacgaggtgtgggtgcccggattatcatccgtcattggtggtggggagaacattggatgaagcgattgaggcagctgcagtgatgctgacgattattcttacggggatgcaatcacatggagagatcatacctagaccgttgagccaggaatcggtaaaacaacgtggtttgatggaggagaaagtgcagatgaacgggttcgattctaagttttgtgatgttgtaacagtcaagtctgtgccaccgggttgtgtaccacagttgtcggagcaggaactgcaaattctggaggatgaggccagggaaatttgggccaccctgtcgactgaccgataggagtgtgatactggtgctttggagcttgtagtcaatttaagatgttttacaaaataatgagctaccggcggcaaaataatgaactaccggcaggaacgtccatttattcgcattgtcagtgaaatttggatatttaaacgtttgttgcgttgacaatatcctctgagacaagtgtcaccgatgtaaaaacttgcctcatcaatgctgatggcggaacaatcagatactctgtacaaaaactgtcgacagaagatttgtgatcattcatgtgtcgaacagttttgtctgcgcgcttacgggtgtatccaagtatgccaggacacttctgccaatacgcttttacaagtcagtgtccacccgcagttgtgtgccaggcaaatgtgaacgctgaactaacagcagtttactatttaatgagcgttcctgcctcccggccgattttgttaaatttctaatcaggatttaaaacatcttgaaccactcgttagcttgagacataagcagcaaggaatcacaattccgatccatatcatgtttagcaatcaggcaaaatcggccgtgagccaggaattaattattagcctctgggccagctgaaatgctgaaatacgggatgaaggatacgaaggtttgggaccttgatacataacctttagctgacctaccctatcaattgggttcaaggatcaccggtaagggtatcccataaattctgtctctgactgtgtacacattaattaggttgcttgtgtcaacgagtcgggtacatgacccttcgtcatcatatcaacattgtctttgataactgcatccagtgtgacgtaatcttctggacatctctcctgaaaaaaaccagatccaaatatttttctgtaatatgcatataaaggaaactcttccaatctttcgaaatcaaaagctaacttccaatttggtataacattgacaacactgtgaatccatcctggagccacatgaactacctgtccatggctttgggaaacaattcggaccaagttggggacttggcgatgtaattgaaacatttcatccgctgacaacaaggggaagtcagtttttagtctaatagcttcctcaaacttgtctctgactaccttcagacaattgccagactgcacaaaagctataaattcttcaaatccccaaggggggataaaaagccaatatgctaatggaccagtcacacctggggtcaatgagaaagcaacattaagtccccgggtaatatcccaatgtaaaccagttccatctcctccttgcgttgtaagaaacaacatagttttcatacgtatgttctggtcagggcggatatttactgcagaagcgtccataaatagagccttcgctatactatctagctgattgttgtgcaataaatccaatgtggtttggaagtatacacgtgcgatgaaatactcagtattttggacagtcaatttagtgacacgaggaatattaattcttattttctcggaaagcatgttaaacttctcttcagaatcgaaggagttctgaatgattctgaacagctcggatgctgtgggtaatacctcccacgatgttgagacaatagtgggagcgtatctgtgcatatcaatcgtaattgccgcattagaaactaactccatcaccttcctagctacagcagagatgtccttatccaaaaatatagtcacgtgaggacccaacactctcatatcccaacataatgggcacacaagatggttatcattggcgtatgtcagaatttcggttttaatcctgcaatacatacagcctgcacttgaatcggaattggacgccttcacgcgagcgtctctgatgtcagtctacaaaaaaaaggatacagtaaataagataaacgaaggagagtaaattaattttgacaatacaagtgcttgacatgacattaacagtacaatcaagaacaaccaatgaatttgacaatggcacaaccctgtttgaagacacatctcactgcaccagtcatcctacaagtaggtctgacaattgccaatgaattcgtcaattcatacataagtttatgccaaggcatcatccattaattgattcagtatgaccatacacaagtgcttgacatgacagtaacattacaatcaagaacaacctatgaatttgacaagggcacaaccctttttgaagacacatctcactgcaccagtcatcctacaagtaggtctgacaattgccaatgaattcgtcaattcatacataagtttatgccaaggcatcatccattaattgattcagtatgaccatacacaagtgtttgacatgacagtaacactacaatcaagaacaacctatgaatttgacaagggcacaaccctgtttgaagacacatctcactgcaccagtcatcctacaagtaggtctgacaattgccaatgaattcgtcaattcatacataagtttatgccaaggcatcatccattaattgattcagtatgaccatacacaagtgcttgacatgacagtaacattacaaaatgcaaaggtagcatccattacttgcatctgtatgaccatacacaagtgcttgacatgacagtaacattacaatcaagagaaacctatgaattaaacaagtgaagtacgtcacacaaatcaaactcactaggggttgcttgaagaaatcagcttctgggttgaatgtagcgtgcaggattcctttggtgttaacctcaatgaaggctgctcccatgagaattgagatggtcattatgcacatcaacaactctcctcttcgtgtggacttcagaatggacttcacagtcatccctgtgcaatggggttccatggggaatgcagtgtgtcggtttaaggacaacaacaattcgatttattgtgataacaggtgaatcccgaaaaagtattttgtgacggaaggacggacatagaggcatagttgatttttttgatacggatgggcgtttctattgtgtacgtaggattgaacacatagtcttgacagcctggacacgtggcatctgaattatggtcaaccgctacattaaagactcaaacggtgatcacacaaaacaactggctacacatacatggtcgcactgttatgtgctagtacatacacacatctggcaaacacaagtacatacacacacacatcaggcatccatgctatccatgtactgccacacagcaatgtgctagtacatacatacacatctggctatccatgcactacaagacaaccccatgcaaacatgaacacactcaaatacacacgctcgcatgcacaaaattgccatccttacacttccacacttcactgtgcattccccacacacacatctggatgtccatgcactacaagatgaccccatgcaaacacaaacactcaaatacacggatatgcaagcagaatacaaattaatacccatgcacttccacacagaactgtgcacacacacacacatctggctactaataaatcattattatcatttcaaattactcaccaagattggatgtgtcttctttaaaagcatcagcccccccacttccttcaactaccaaggctgatccgaacaatgaaggactacgcattgactcggaggctgcagcctttagctttgcagctttcctcacacctcttagggacttattcgagggtcccttactattctgggctacctgggttgacttgggcatgtttcctgtgttacgaaacaatggagcatataatcagtcagggaggaaggcggtgcagcagcagcatctaacaactatactgtaagctatatccgaccagctcgactcgatctagcatcctgtcagttatcgaacagtcgcaacatcgcatgcaggcattgcagcagcagcatctaacaactatactgtaagctatatccgaccagctcgactcgatctagcatcctgtaagttatcgaacagtcgcgacagtgcaggcaggcattgcagcagcagcagcagcatctaacaactatactgtaagctatatccgaccagctcgactcgatctagcatcctgtcagttatcgaacagtcgcgacagcgcaggcaggcattgcagcagcagcagcagcagcagcagcagcatctaacaactatcctgtaagctatatccgaccagctcgactcgatctagcatcctgtcatttaccgaacagtcgcgacagtgcaggcaggcattgcagcagcagcagcatctaacaactatcctgtaagctatatccgaccagctcgactcgatctagcatcctgtcagttatcgaacagtcgcgacagtgcaggcaggcattgcagcagcagcagcagcatctaacaatcctgtaatctagatccgaccaacttcacctggttggttgaacaaacacgattgagcgagcgagcaagcacttcctgagcaatgcgatcaagcacttcctgagcgatgcgagcaagcaattcctgagcaatgcgagaaagcacttcctgtgagagcgagcgagcacttcctgagcattgcaattcaaattagcgaacaggcgatgcaactcgtcgcgaaatcatgggagctatttcaaagacacctcaccttgggcttccgaatttccaggaattgagtggtatccagcgaaagatgtggtgcttcatcgctggaccgagcatatgaaaccctactaaacccttatcatgtttcagctcgcgcgacgtttgcggtcagccagcattccgacgaacccgtccttttcgtccttttcgtccttcgtctacttctaaaaactactattctactattcttaagtttcgatgaagaatgtgaggcacattcttctattctactccttttcttctaggactcctgcatcgagatggaaacttctatgcatgtggtgagtgcgcgtgtgttttcccagctactgacgactgcgtgcgcgcgtgttttcccagctactgacgactgcgtgagcgcgtgttttcccagctactgacgactgcgtgagcgcgtgtttttgttggggcactgatttcactgtttacactgctttttattgctggcgcagatcgtcatcgacctgacaaacttgtcgtcatcttcggatgatgaggacccccccttctccccatcggagttacttattgggggagctacttgcaactcccccaatgtggcctttaagcttgagggccatcatcccctgtccactggctctactcgctatcatcccctgtcccctctccctcgccctcctcccctgtcccctctccctcgccctcctcccctgtcctctctccatcgccctcatcccctgtccactggcgctactcccctgtccacaggcgctactcccctgtccactggagctactaccctgtccactggcgctactaccctgtccactggcgctactaccttgtccactggagctactaccctgtccactggcgctactaccctgtccactggcgctactaccccacgccctccgcacctgtcgcccacgtcatcctcgctggaagtcagcgtgagtacccccctgccttgcgtttttcttgagtcctggtgtcctgttgagacatgcagtgaagatggagaagactgagtgtatgtgtgtggtagtggtgtgggcaggggtggggttatgtgcatgagagagtgtcctgggggcactggttgttgacacatgcagtgaagctggagaagactgagttttaaattcaattcaattcattgggtgctgcaggttgatagtattcgactatcttgcaaaggtcgtcacgtaaactttttcagtgatgatacaagatactcggtccacagcattgtggatgtcaagatgagatttgggaacgattgcgttggtattatagaccatcactacctgtttatcccaatgttccaagtaagtaatgggtggtcctgcctcacggcggattttttgatattactgactgacttactgactgacttactgactgactaactgactgactgcttgattgatattactgactgactgacttactgacttacttactgactgaatgcatgatattactgactgacttactgactgactgcatgattgatattactgactgacttactgactgacttactgactgactaactgactgactaactgactgactgcttgattgatattactgactgacttactgacttacttactgactgactgcatgatattactgactgacttactgactgactgcatgattgatattactgactgacttactgactgacttacttacttacttactgactgactgcatgattgatattactgactgcatgattgatattactgactgacttactgactgactgactgacttactgactgactgcatgattgatattactgactgcatgattgactgactgactgactgactgactgactgcatgattgacacacattattcacgttgtgcgcaggtgcggtggaaatcctacactgaagagcacgacacctgggagccggtcgacgatctgctggacctgcaagtgttcgttgacttcatgcgcagcgacacctgggtggcgttcgtgaaggagaatgcggatgcggtcaaggggtgggagaggatccgtcaataatattttgctacacaacctgtgtccgcactagcacatgtgcggaggttgggaacgcattaatgaccctgaccctggaaaaaactatgttccgccgactgtagtggtggttatttgttttggtggagttggacacatgtctgtcgagcctcacacctgagatagtggtggtgatttttttggtggtgttgacacatgcctgtcgagcctcacacctgagatactggtggtgatttttttggtggtgttgacacatgcctgttgagcctcacacctgagatagtggtggtgatttttttggtggtgttgacacatgcctgtcgagcctcacacctgagatagtggtggtgatttttttggtggtgttgacacatgcctgtcgagcctcacacctgagatagtggtggtgatttttttggtggtgttgacacatgcctgttgagcctcacacctgagatagtggtggtgatttttttggtggtgttgacacatgcctgtcgagcctcacacctgagatagtggtggtgatttttttggtggtgttgacacatgcctgttgagcctcacacctgagatagtggtggtgatagctaattttggtatcatcgtatggtatatacctgaatgataaggacacaatttatttcattttgttgcatacacaaaatttgattatcgaatttgattacaccaaatttgtttcatttggtt

SEQ ID NO: 201 - DNA, 22379 bp, unidentified
  source 1..22379: mol_type = other DNA
  misc_feature 1..22379: note = Fanzor polypeptide
tctgacttgtttacactcgtttttcgaggcgcatgaggaacacttgtcggatctgacttgtttacactcgtttttcgaggcgcatgaggacactgtcggatctgacttgtttacactcgtttttcgaggcgcatgaggaacacttgtcggatctgacttgtttacactcgtttttcgaggcgcatgaggaacacttgtcggatctgacttgtttacactcgttttgaggcgcatgaggaacacttgtcggatctgacttgtttacactcgtttttcgaggcgcatgaggaacacttgtcggatctgacttgtttacactcgttttcgaggcgcatgagggaaacgtgttggatctgacctgcttacacgcgcgcttcgaggcgcataccacggcggctttcgcatcctcattgtctcgtccatttgtctccacaagacaccacggtggttttataaaaacgagtgtaaacggaggggggatcattccatccatccgttaatccaacagcagcaccatctgcggataatcgagtgaagatgatagcttgcagtctcacggaacgcttttcgcgcggcgcactagaacatgtcatggagcactgggagtcgtgggacttccgcccggataaggacaagtcgaaatcgcttgacaccatccaacgatactttgctgcagcagacggagactcggtacacgtggaatacgcaaagaataaacacggaagggggaggctgtttgcaaaacgcgggctttccatgcagtgtgtcatgcgggaggtcaggaacgcggtggcgcacccgttttatgtcgacctcgattttgtcaactgtcaccccacgctattcgcgcaacgctgcaggaaacggggggtggcatgtccgctcctcgatcagtactgtgggaaccggacggaggtcctaggcgacatcgatgcggacgcggctctggggaagacggctgttctatccgtcatgaatggaagcaagactgccgtatacaagcatcaggattcagtatggctgcgcgactttcagaatgagatgaatcaggccagggatgagatcatggctccgggaggagcggacgagttttacatagatattgcgcgcaaggacaggaacacatatgcatcggctgtcaatctaatgttatgcgatttggaaaacgagtgcctcatggcgatgctagaatacctagacaaaaaatcattcaaagtcggtgtgctggtatttgacggagcaatggtcgagaagaaaaaggagtttgcagactccaaggatggaggggtcacgcaggagatgctcgatgaggcgtcagattacgtgtgggacaggacggggtacaggcttcaaatcaagattaaggacatgacgatcgatatgctggacgtaccggcatctgcgtacatgggcgcacccgtacatgcacctaggtacgcaggaggagacgacgttgcagcaaagatactgctcaaggatttgggggggaagctggtcaaatccaaaggggtcgtctttggaaaacatggagacgtttggaccaatgacaaggatgtcgtcgaatccttcatgttcacggcgtgtcaaagggcgaacattaagtttgtcgacgaatctgggatttcaaggaagtacagctgcctgtacacaaaggctatcaacattgtgaagacggccaagcattacatcccggtagacgacaactttgtaaagaagatatgggagtcaaacctgggagtcctatgcttccgaaacggagttttcaggttccgggacaagtcattcgcccccttctcggagaggccggaggtaatgcccgtcattgtcatcgacagggactttccaagcgagaggccgactgacgaattattggaacacgtcaaggagaaggtactcgtatcgactctgggggaagaggggagggtcaatacctaccttcagatgatcgcacgctctatggcagcaaaacaccaagataaacagtggggaatgctaattggggagcgcaactcgggaaagggcctgttgcaggcgctgaatgagagggcctggggtcagtatgtcaacacgatcgattcaagcgtcctcatgctcaacaactttacgaacgacgtcaagtcgcagggttggatgatcgagtgtgagttcacgaggcagacgtacaccaatgaaatcaaggtggaccctgggaacaagcacatcaagctggacggggggctcatcaagaaatttcaatctggaggagacgtcctgaaggcacgccagttgtacgagaacgagagggcgctcaagagcgcttcacgattattcatgaacttgaatgacctccccgagatttcagcagtggatgctctggacacggtggttgttatagagttcccgcacaagttcgtcaatcctaaggacgtagatgaggcaaaatggttgaagttcttcaggcctgcagacccctcgctcaaggacggattctgcgcacgggaggacgtgagggatgcgttcatatggctcgtgatagatgccttcgatcaagagcagccactcaagatatcagatgtcgtccgtcgggacacagagaagctcaggatggatgagggggacgagctctcgctgatcaatgcgcacttcaagataacaacgaaccttgcagacgtcgtgacggtggctgatgtcaacgagtttgcaaaggataaaaagatgaaaacgcgcggattgaggggaaggttggagaaaatgggggcagtagcggatcgaatgcgtcaggagggggggatttcaagttcgtgtactcaggaagatcgtcttatctctacttggtgatgaagatgatggattacatgagagtatgattttacagagatgaagatgatgacaaattgtgacaatgtgacaaatgtgacaggttatagacataactattatctgatagacctcattaacaaaatagtatgccatatgtcaatttatagtttggtaaaataacagtctcattgtcacatctgtcacattgtagttgagattggggaaggattcaagttcgtgtactcaggaagatcgtcttatcgctacttggtgatgaagatgatggattacatgagagtatgattttacagagatgaagatgatgacaaattgtgacaatgtgacaaatgtgacaggttatagacataactattatctgatagacctcattaacaaaatagtatgccatatgtcaatttatagtttggtaaaataacagtctcatctgtcacatctgtcacatttgtagttgagattggggaaggattcaagttcgtgtactcaggaagatcgtcttatcgctacttggtgatgaagatgatggattacatgagagtatgattttacagagatgaagatgatgacaaattgtgacaatgtgacaaatgtgacaggttatagacataactattatctgatagacctcattaacaaaatagtatgccatatgtcaatttatagtttggtaaaataacagtctcatctgtcacatctgtcacatttgtagttgagattggggaaggattcaagttcgtgtactcaggaagatcgtcttatcgctacttggtgatgaagatgatggattacatgagagtatgattttacagagatgaagatgatgacaaattgtgacaatgtgacaaatgtgacaggttatagacataactattatctgatagacctcattaacaaaatagtatgccatatgtcaatttatagtttggtaaaataacagtctcatctgtcacatctgtcacatttgtagttgagattggggaaggattcaagttcgtgtactcaggaagatcgtcttatcgctacttggtgatgaagatgatggatgacatgagagtatgattttacagagatgaagatgatgacaaattgtgacaatgtgacaaatgtgacaggttatagacataactattatctgatagacctcattaacaaaatagtatgccatatgtcaatttatagtttggtaaaataacagtctcatctgtcacatctgtcacatttgtagttgagattggggaaggattcaagttcgtgtactcaggaagatcgtcttatcgctacttggtgatgaagatgatggattacatgagagtatgattttacagagatgaagatgatgacaaattgtgacaatgtgacaaatgtgacaggttatagacataactattatctgatagacctcattaacaaaatagtatgccatatgtcaatttatagtttggtaaaataacagtctcatctgtcacatctgtcacatttgtagttgagattggggaaggattcaagttcgtgtactcaggaagatcgtcttatcgctacttggtgatgaagatgatggatgacatgagagtatgattttacagagatgaagatgatgacaaattgtgacaatgtgacaaatgtgacaggttatagacataactattatctgatagacctcattaacaaaatagtatgccatatgtcaatttatagtttggtaaaataacagtctcatctgtcacatctgtcacatttgtagttgagattggggaaggattcaagttcgtgtactcaggaagatcgtcttatcgctacttggtgatgaagatgatggattacatgagagtatgattttacagagatgaagatgatgacaaattgtgacaatgtgacaaatgtgacaggttatagacataactattatctgatagacctcattaacaaaatagtatgccatatgtcaatttatagtttggtaaaataacagtctcatctgtcacatctgtcacatttgtagttgagattggggaaggattcaagttcgtgtactcaggaagatcgtcttatcgctacttggtgatgaagatgatggattacatgagagtatgattttacagagatgaagatgatgacaaattgtgacaatgtgacaaatgtgacaggttatagacataactattatctgatagacctcattaacaaaatagtatgccatatgtcaatttatagtttggtaaaataacagtctcatctgtcacatctgtcacatttgtagttgagattggggaaggattcaagttcgtgtactcaggaagatcgtcttatcgctacttggtgatgaagatgatggattacatgagagtatgattttacagagatgaagatgatgacaaattgtgacaatgtgacaaatgtgacaggttatagacataactattatctgatagacctcattaacaaaatagtatgccatatgtcaatttatagtttggtaaaataacagtctcatctgtcacatctgtcacatttgtagttgagattggggaaggattcaagttcgtgtactcaggaagatcgtcttatcgctacttggtgatgaagatgatggattacatgagagtatgattttacagagatgaagatgatgacaaattgtgacaatgtgacaaatgtgacaggttatagacataactattatctgatagacctcattaacaaaatagtatgccatatgtcaatttatagtttggtaaaataacagtctcatctgtcacatctgtcacatttgtagttgagattggggaaggattcaagttcgtgtactcaggaagatcgtcttatcgctacttggtgatgaagatgatggattacatgagagtatgattttacagagatgaagatgatgacaaattgtgacaatgtgacaaatgtgacaggttatagacataactattatctgatagacctcattaacaaaatagtatgccatatgtcaatttatagtttggtaaaataacagtctcatctgtcacatctgtcacatttgtagttgagattggggaaggattcaagttcgtgtactcaggaagatcgtcttatcgctacttggtgatgaagatgatggattacatgagagtatgattttacagagatgaagatgatgacaaattgtgacaatgtgacaaatgtgacaggttatagacataactattatctgatagacctcattaacaaaatagtatgccatatgtcaatttatagtttggtaaaataacagtctcatctgtcacatctgtcacatttgtagttgagattggggaaggattcaagttcgtgtactcaggaagatcgtcttatcgctacttggtgatgaagatgatggatgacatgagagtatgattttacagagatgaagatgatgacaaattgtgacaatgtgacaaatgtgacaggttatagacataactattatctgatagacctcattaacaaaatagtatgccatatgtcaatttatagtttggtaaaataacagtctcatctgtcacatctgtcacatttgtagttgagattggggaaggattcaagttcgtgtactcaggaagatcgtcttatcgctacttggtgatgaagatgatggattacatgagagtatgattttacagagatgaagatgatgacaaattgtgacaatgtgacaaatgtgacaggttatagacataactattatctgatagacctcattaacaaaatagtatgccatatgtcaatttatagtttggtaaaataacagtctcatctgtcacatctgtcacatttgtagttgagattggggaaggattcaagttcgtgtactcaggaagatcgtcttatcgctacttggtgatgaagatgatggattacatgagagtatgattttacagagatgaagatgatgacaaattgtgacaatgtgacaaatgtgacaggttatagacataactattatctgatagacctcattaacaaaatagtatgccatatgtcaatttatagtttggtaaaataacagtctcatctgtcacatctgtcacatttgtagttgagattggggaaggattcaagttcgtgtactcaggaagatcgtcttatcgctacttggtgatgaagatgatggatgacatgagagtatgattttacagagatgaagatgatgacaaattgtgacaatgtgacaaatgtgacaggttatagacataactattatctgatagacctcattaacaaaatagtatgccatatgtcaatttatagtttggtaaaataacagtctcatctgtcacatctgtcacatttgtagttgagattggggaaggattcaagttcgtgtactcaggaagatcgtcttatcgctacttggtgatgaagatgatggattacatgagagtatgattttacagagatgaagatgatgacaaattgtgacaatgtgacaaatgtgacaggttataaacataactattatctgatagacctcattaacaaaatagtatgccatatgtcaatttatagtttggtaaaataacagtctcatctgtcacatttgtcacatttgtagttgagattggggaaggattcaagtggttgttggttgccgcatgtgtggcgtgtagaaagagagggagagagagatctattgcatcatcattgtactcgttcgttgtcaatcatcagactctctcacacgtgtcatttcaaggcgacttcaagcatacctcaagatcgaaaaacgcggagattatgatcgatcgatatacattcttacacaggccgcatcatcattgtaatcgttagttcgttgtcaccgggatgataggagcccaccccgcacacacgcacggcgtgggattctgtcttgtcgttccatggccacccacccaccccctcaacaggacacggggggattctcactcacccctcccaaccccaaccggagtataaacactggggggcattcactgtatcaacaaatctgaatgagaataaaggacatgacgacgatcgatatcgatatcgtcacgccgtctgcgtgcatgatgggctcacacgtacgtgcacctaggtacgcaggaggagacgacgttgcagcaaagatactgctcaaggatttggaaggaaagcttgtcaagtccaacggggtcgtcttggtcaaatatggagacgtttggaccaatgacaagaatgccgtcaaagacatcatgttcagggcgtgcgaagaagcaaacatacatatgataaacgattcggggaaatcaagacagtacagcagcacgcgcgcaggtgcacaaaatattgtgaagacagccaaacactacatcacggtcgacgaaaacttaaacttgacacagaagatacatacatcatgatacatacatcatgtctgaagtcgtgcggattgcggggggggatcacgatgacttgcatatactcattctcacacgtgaattcaagcacactcttgctcgacaactctattggtttctgaagggggagactgccaatacctccaagcaagagtgataggcgaacggaggaaacatgtcgcatactcggtgcattagatagatcggatggattggataacgcacgcacgcacgcaatcacgacacacgcacggcggcggatgtcgaggtgatgctgttgatgttgccacgcacccactcgcactcgtattgtcacgaagcatgacgcatcatccatccgcacccactcgcactcgtattgtcacgacgcatgacgcatcatccatcctcacactttaatacctacgccaccaaaacggtggttgggagtttggtttgtttgtcctcgacacacccctgatgtaatgggtttttttgctttgtgggtgctttttctttttgtttaaagcacagagtctcatacaccctcgcggtgtcaagtagactttaacatgtaatgtaatgtaatgtaatgtaatgtaacagcctgggacgcagacgcggcgttggacgccggggtactctttttgaatgacatcagccaccatcgcattctcattgtccattaatgagcgttcctgcctcacggccgatttttctagatttctaatctggatttagagcctcctgaacgactcgctaccttgagacatcagcaccaagaatcacaattccgctccaagaccatgtttcgcaaccagtcaaaatcggccgggaatcaggaacgctcattcattatcacacatgacacgtcggctttcgcatcctcctcgactgtggtggtgcccatcctccattctctcacacgccacggcggctttcgcatcctcctcgattgtggtggtgcctatcctccattctctcacacgccacggcggctttcgcatcctcctcgattgtggtggtgcctatcctccattctctcacacgccacggcggctttcgcatcctccttgtccatacagctagggacatttgattgtgggacaccttttattttggggattctgaaaagttgacgtacatttattatgggtataaagaaacgtgggtgcaatattatatcaccatgagaaaaagaagtagtgtcagacaaaggagaaggggctaaaacgtttgagaagcagaagatggtggtgaataacgtcaaggtccacaaagtactgcactgtcgcaacagtgtcaaaagcgcatccaatgtggctatagtgcaacctggaacctagacgtgaacgctgccaagaaccttcttctgcttctgacaacgtggagcgaccggatgtattctgtgttccctcgcctccccctaaaaccccagtttccagagaggcgagtgtgaagaaaggatctgtgaagaagacggactacgttgcatttattgaatcattgagtttgtgcaataactcagtagtaataatggacaatgctagtatccataagaaattggtcctcagtcaccccgtcaatatttgttacacacctccttacagtccagaattcaatgctattgagctatgcttcgctaaggtgaagagagactttcgacgtttgaactacataccgaatgaaacaaagacgcatgtgtctgatatgatttccttagcattcggcaacctcactgataaaattattatgggttgttttgaacacgtttgggacacttatgtgtataaagcagtctgtgacatattgattatgaaagatggcgacgaaacctccgacagtcgcgaaattgaaggagttactgaaattggctgaagtaccatactcgtcgaagtccaacaaagacgatcttgtccgtttatgcgaagacaatggtctcatcaccagcccccctccagaatacaagacggtggaaaagatatgtgtcgtgaaatgcgccctgaagaaggcaatgagtcttgacgatgaagaatttggtaagtttagggagcatgtggaccagctcgtcaatgtggtgagccgcatgttacggcggtccagtctggtgctgaccttccacataacgagtctcttagagaaaggtctggagattccagacctgtacaacatgaaagatacctactggaaggattggctccgtatcggggtagacggaatcttccctgatgaggaaagcaagatatcgtacgaagctgtgaaggactccatcggaaatgtaattggtaatgacgacgctgactacatcaagtcgtatccgatctatttcgatcaggtattgaactatgcaggtcacacattgagcactgtcgtgtcaaacaacgcatgggttcctttgataccacgtctggccagactcacttccaccactttaaataaattaaatgccccgaagacactggacacatcgaagatcattcggggatacgacgtgatgcgggctattcagcaagaagtccaaaacatggagggatggccagagtctgttcaagagtacgtcaatgaagttagggagatgctaagtgttccagatggaagtcgagtttatgataactatggcaaagacatggactttccgaccatggtccggttcaattattggatacaaaaacggttggaggatatggatgcacgtcgtatccgattgatgcccatcttcaatgtccaacgggtgcatgttcgccttgacctaaagaccctcgtgaacctgttcaggcacatgttccccactgaccagaacatcgttgagctttccaaatgggaacatgtaaagaatcccgacagcttcatgttgccccagaggcctgcacagaagaagaaaaaatcatgtggtcctggtgaatgggaggcatacaagtcggtcctgaagcagtacgatgatgatgttaaggatatcaaggctactgacgagtacagacatgcaaagagtttgtatgacacgcttgtgaacgcccgaaaaacagtcgcaggttccttcttcagaaaaccacctgtcaagaatgggtgggttttcgactgcagcatctgtactgacggagtctccttgagcatgcagtacagcaagacagtacaggtccttgtctcagatctgaagaagacctgtaagaagtctcgtaaagaagaaggtatcaagatcgcagaaaaatacgacagctcacttaaaacgatattgcccgatatgggtatcgtcgtcctgggtgtggacccaggacggagcaacatcgctacggtaacgtatttggcagacggtaaaaataagacatggaagctgacacgtggtgcattttaccacaagtcgggtatcaagaagcagacaaggcagaaggaactgcgttttgctgacatgattcctatgtgggagtctctgcgtgaaaatggaaaagctttgagtacatcgaggacggataatatctcagcgtacttgtcaaattacgctaagttttctgacgagtggtggagattggctttgcgacgccgagaatcccgtgacaactttcagcgttacatcggaaaacgaaaggtcaaagactctttctgggcgggtatcaagcggtgcatgatgaaagaacttcctgatatgaaggtttgcgtggcctacggatctgccatcacgaaactgaagcctactggaccgggagaagttgcagttcccactgggcccatgttcgcatcgtgtaaaagaattttcaaagaggacgtttctgtgacagatgagttcaaaacgactcttatgtcgtgggagacgggtaaagaaaaagaacgtgtttacaagatcccaagcgtttgttcagcagacgtgaagcttaggttgggtggtgaacggtttggtcacacgaaatctaaaacgatgccaaaggtcgctgattgcgaccacttaggggtaaggttgtacaataaacgtaaacgcgcacaagagaagcacaggaggggtggcttcgccacttcccttgtcgattctcaaaaatcgatcgagcggtacccagaggtacgaggactgcgattctctccagaaacatgcatttactcggaccgggatcgctcttctgctctcacaatcgcaaggctgcactgcatggaattgatgggtctaggacgacctcttccatttgcccacagcagctatgttgttgttgatgaataaaaactcgtattgttgtagacaccactcggtcccccctccagtggtcgcgacaacattaggttacaccgcaaggtgtgccgtacacgaagcggtttcatttaagtattccgttgactgtatgagtccctagtcttcgatgacaacacactgccattgtatttcattcggtacaatccgcacgcattcagggtcggtggtgaactacaaaaaacaaagactgtctttcgtcaacaatacttagtggatgttatcaactccatcaattctacaactgttaaacgaatgaatatactgtacatgtattttgattgtgatacactcttagatggaaacattcgattgtctgttcacacagacccagagtataacgatacaatgaagaagtgctgtctacacccagtgtattagtagttacagagaactttcggtttctgaagggcaagggactgttgcaggcgctgaacgagtgggcatggggaaggtacgtgaacacgatcgattccagcgtgctcatgctcaacaacttcacgaacgatgtcaagttttcaagtacggatcgtacatcacggtatatcggatgagaagacactacaaggcgtcaagacttcgcctgaattttctacaaaaaaccattataagactacgactaccgttttccaacgggcatcatcgatgtttgcaagctttccgcagctatcacacttgtgccaccccccctttccatctttccacaaacgcaactgataccttaagttcactgcactaccgcatccatcgcacgacaatgttttcacacgcgaccatttagctccgcatgacacacacgttctgactcatgtgtccacgttgtgtgtcacaagagaggacgcgcacttaccacaacttacttctcggtccatacagttgttctcaaataattttgggacactcagtataatttgaatgatatccccttaaaccagatatgtgtcatggtccgttgttcactacaaataaatattcttttgaggagtctgaggaaggtttgtaatatattctctcgttacacctgtcggtcgacctgtccagaccatgtttcgcaaccagtaaaaaccgttcggtaggctgcaacaacgcccattaaatccttgttctcctcaactgaactcaatgcaagtgtttcttgatgacaagtaccttactgtgcggtcgctagagcgcacaaggatagtgctaccacatataagtcttgcatccaaagtgaacgcatctatacccccgctctgtactagcatcagaacatcctccatcgtgaagaagggtgcaggcgcggacagaccgtagtacacgccggtgctggactcaaacaccaccgagcacggagcggaacggaatacggacgagagacgcgggcagagcaagagggacacgaacactgagtccaacacaggcgccttaattatcacacgcaaatcggatgaagaatccaatgaaggatcaggaacaggaggagttttaggtggcggagacatatcaacgggagaaggaggaggatgtttaggtggcggagacaatgtcatatcaaccggagaaggaggaggatgtttaggtggctaagacaatgtcatatcaacgggagaaggaggaggagttttaggtggcggagacatatcaacgggagaaggaggaggatgtttaggtggcggagacaatgtcatatcaaccggagaaggaggaggagttttaggtggcggagacaatgtcatatcaacgggagaaggaggaggatgtttaggtggcggagacaatgtcatatcaaacgtagaaggaggaggatgtttaggtggcggaggcatatcaacgggagaaggaggagaaggtttaggtggcggagacaatgtcatatcaaccggagaaggaggatgaggtttaggcggcggagacaatgtcatatcaaacgtagaaggaggaggatgtttaggtggcggagacatcatatcaacgggagaaggatgaggaggagtattaggtggcggatacaatgtcgtatcagaaactggtgacgaaacgaactcgcatgttgggcaacacgcgtgtgtgaaaggttcgtatatggagtaagtgcatactgagttgttgccgcataacttaaatggagtattgcaagggggggtcaagtgtatgcagaaaacgctacccaatatactgtcgtagttagacttgatgcttgtcacgacgatctcagcgaaaccagtgtagttgcgaaagtaaattccgccacccttgcggacaccgttgatagacacaagatccacgctcccagaacaaacgtcaaccgtctttatggcaaccttctggaatgtccgacgaagggcagtgcagcagtcgacacctgtatcaggagagatgcaggaattcggtagtacagtgaaacacattaaattatcggaaaaagagggcgcaagaacgtatggactactgctcggtgagctgcaactcggcggtttgcaacttcctgcagggaacctcgtgtacgcgcacgcaggagataaagcagataatagggacgccaaagcaaagcaaactattgcaagtgatcttgacatcaatcaataagaagaaggcttacttacttacatacattttaaagtgggcgttcctgcctccctgcggatgttttggaatttctactccggaacgactcgatatcctgagatatcagcacagaggaacaaaaattacgctccataccatgtttcgcaaccattaaaaatccgccgggatgctggaacgcccattctgtgttaaaaacttatttggtgtaaatcgaaaacgacgtgaatttgtaaacaacctatttcgtttgaactacagaaatttttaaaaatccaccgggagtaaggaacgggcgggcgtgagctcttggacacgttgtttacattacaaaccttcctcatactcctcaaaaaaatatttgtagtgaaccaaaaaaaatattatagtgaaccacaaaaaatattgtagtgaaccaccaagtaaaggtcaggtggcgtgggttaaaggttgcaagggcaacatggagtggcacatggcaaattaggttaaagataatactgttctttaacctcgtgtgacaacatgactacagtcggagacgcaatttgtgggacaccctaccggtgatccttgaacccaatgggtagatcagctaaaggcgagcacatatttttgcacttcatctctgtatttcagcatttaagctggcccaaatgataacaaggcaagctgctgacaaacccaggtgggtcggtcggtttagcgctcacactcgcctctctggaaactggggttttaggggggaggcgagggaacacagaatacatccggtcgctccacgttgtcagaagcagaagaaggttcttggaagcgttcacgtctaggttccaggttgcactctagccacattggatgcgcttttgacactgttgcgacagtgcagtacttgtggaccttgacgttattcaccaccatcttctgcttctcaaacgttttagccccttctcctttgtctgacactacttctttttctcatggtgatataatattgcacccacgtttctttatacccataataaatgtacgtcaacttttaagaatccccaaaataaaaggtgtcccacaatcaaatgtccctagctgtatggagagtgatgtacgtggcaatagggagagtgatgtacacgtggcaagtgctgacgtggcaactgtaacgatagagctagggtaatataaggtaagccctaccaagcagtgccagcctggtagggctcgcctcatcgttcgaacggtgggcaaaaaaactaaaccgccaacaaaagcttttagcaaacatggcaatctccttgtctacctttagggttatcagcatataatgggcgttcctgcctcacggccgatattttaaatttctaatcaggatttagagcctcctgaacgcctctctagcttgagacatcagcaccaaggaatcacaaatccgctacataccatgttttgcaaccagtcaaaatcggcccattatatcagaatatcagcatataatgggcgttcctgcctctcaggcgatttttaaaatttctaatcaggatttagagtctcctgaacgactctctagcttgagacatcagcaccaaggaatcaccaattccgctccataccatgtttcgcaaccagtcaaaatcggccgggaggcaggaacgcccgtagctatctatcagatatcagagatctcagagaatcatcatcagttgattgaaggggggaaaaacgggatcattgatgtaaggaggtttttttgatggactggacattttgtagaaccatcaactcatactgttacgctgaatttagtgctccatcaagcagaaatcgttgaaatcatcttgtaaggatattttgtcaatttctccacaattcctcttgcagttctggaacatagtatacacagtcctgaaaccatcgtagtgggtttctgctgagacaacatggtcttcgtcatcacagaatggcgtcgtagcaacttggtcgatactcgaaaagacgtcgtcacggtcgagcacatagtctgttgttgcaggggtgggggcggttacggctgcagagacaacatggtcttcgtcatcacagaatggcgtcgtagcaccttggccgatactcgagaagacgccaaggtcgagcacatagtctgttgcagcaggggtggaggcggttacggctgcagagacaacatggtcttcgtcatcacagaatggcgtcgtagcaccttggccgatactcggaaagacgccaaggtcgagcacattgtctgttgcttcaggggcggctgcagtggcagtggcagtggcagtggcagtggcaggggcggctgcaggggcatgggtggctgcaggggcaggggcggctgcagtggcatgggtggctgcaggggcaggggcggctccagtggcggttactgcagcatcactacgaatagttcccacaaactttgtagcctcgtccgcgtagattgcgctccggattttacgaagattgaccatgaacacagtcactgcattcttaggagaattctcaatcaatcccattttgcgcatctctctagagacatgttgttgttgtccatggggtgtgccaccatagctttccagctctctgtacagaaccgccttgttgtacgttaacgtatcgtgtttgtacttgactggcaccacgtcgtccatctcgtcgatttggttcgttgtcacctgaatgagcgccagtattgtactgcgcaccatggattccctgctgacttgtccacaattaggcccaacgttcttgaatctcttgagaacaaacgattctcggacgacctccaataccagcatatcgtcggtcaaatcacatgggcgaggaaggtacacaagtgtagggggcggtacatcatgtgcagtagcagtattgcacgccgccttgcaagtgcaaaagtcgtccttcacatatggccatacaataagcatcatgctatcgccacaacgctgttctcctaccacgaagcagcagacttccttctccacatcattgatagtcttcccatcaagctcggccaacgcctccaatatcagagggttgcgtgacgcgtagtgtccaggagtaatatacgaagaagactcagcagccgcgttcatatcttcaggttgagccatgttgttaacccaggtatgttcgtatcacgacgccgggacttggacctgttctgggacagggaatccattgacgatggaagaagatgtatgtatgacgatggaagatgatgattatgcagtttatactaacaatacaacgaatatgggcgaaatgctgtgaatgtgactagtaatacaaccaatgcggttttgtgtatgggaccggcaatacaaccaatgcggttttgtgtatgggaccggcaatacaaccaagtcgattgtgtatggtggggatgcggcaatacaaccaatgcggttttgtgtatggtggggatgcggatgcggatgcggttgcggttgcgtttgcgtttgcgtttgcggttgcagttgctgttatcgatttccaccaccacacctttgtaagcaacagcgcccacaaccatccagcctttcggaagcccatgatggcggtctccacccaccggatgttgattcgcagtcgctcccgcgcatcgaggtgatttccatgggcgtacccgttagaagccgcagtttcgctcgcgtggaatacgcgcgtggcgaaaccgcttttcacacgcctaccatgcgcagtccactcacgtggcgtgaagtgactggaggagcgcataggcgttggccagatgcttactcgccacaagcggtcttcaccagggtagtacagacgcgtgtagaactcagccttcgcgcgatccagtgactccaaacaaggacgcacaacaagaggatattgactcagacccacatcgagtaaccttcccatattagttatattactagtactactaccaaacacagaccgcatctcggtcagcaaaacagcgaatgcaaaacgagccgcctgaggcacgatcgcatttcccaaggcctgccactgaagcgtcagagaccggacatcagcacgagactcggtgccaggcgaacgcgtcacgaggcgaggcatctccgcatccaattttgcaaatggataggacaatgactgagaaatcgaagaggacagacgggtcctgctcaagtaagggaacaacataccagcgtctttgtcacgagcagcgagtacccaaatacgagaccggacgtgacgggcacccatgtcagctgcagatagaataccatagcgcacactaaaaccacgagtctcgaaagcttcgcaaatcgcatccaacccacggtatctcaacgccggagagttctcaagaaagacggcccgaaccgaaggaagaccgtccaaaacatggaatacctcccacacaagtgaagaacgcgtaccggacaaaccaccgcccttcccagccatagaaacgtcctggcaaggaaatgatgctgtgatgagatcgggtccgagagcagctccgacacgagaagaagacgcaatcacatccaacgggtccagtgtggtgacatccgatatgatgggaatccccggaaactgagaggacaacacaccgcacgcgaaagaatcgatctcgcaaaaacaacaaggacgcgccaaccccttcaaagcaacagcatgcccaccgataccactgaacagatccgcgtaaacaagcatgtgtatcaataataaattcaacggcggtttttttcacacaaaatgtcacttgatcagattgaaccggccaaaacggttcagggaagtcttgtaaaggtaatgaacaaggcgatcgtagacctcgtcgggattgctcatgtgcctgctaccagaaccacgctcgaggtgagtacgcagacaattccaaatacattccacgaagtactcgtgacgcgaataccaatcgtcaagcgacatcacggaaggagacctggccatcttcggaaccaacggaggaggatcacgacgcacatgaccttgaacatgcaccatattattcttacttacacacatattgtcatggacccaaaaacctttatgcacgagttcgattattattacagttgtcaaaattctgggtagacatttcaaaaaatccgccatttgttctcaaattatttagtaatacagtaaatacgatgaaggaccttgcgattgcgcttgctttttacacgatcgcggaggccgtttggctcttcgggatgaagggattttacgtggcccaattcgcgcggttctctgtgaatcttgcggtgcaatcttggcttgcggtttgcatggtgtacgcgttgctcttagctgcagcatacttattgttgcgccctaatccatcggtcaggatgggcgcattgttcggggggaccgtgtacggcgtgtacaacctcacgaacaaggcgacgatacccgggtactcgtgggggatggtggccgtggacaccacatggggagccttagttttcgccacagtatcttacattttcaaacggttccgctgaaaaaaagtatgagaacaaatgtagacccaaaaacatgtcaacacacgtcatctcaaaaacaagagagttgctgcacgcgtgggaaaggttctgcgaccaacaatccaaaatgcacgatactgctcgagcacactacaagtttttacaactatatgatcgcaatacctgcaatcctacttacaacaataagcggagcaggaagtataggaatttcgagcaatgaagtagcactatcttacgtaatgggatcactttcactaaccgcaggggccatgttctcaatccatcgttacatgaacattccagaactacaacagttacacgatttttacagcgacgagtttctaaaactgcgcaataacattcgccttcatctagttatcacagacgacgaagacaacaaaacgttctcttcacttgtcgaattcagcaaacacataaataccattcttggacaactgcatcgacaaatcaccatcattgcccccccatggttgtcggtttgaaaaagaaaagtatggggaataagttctactcaaaaaggatgtttaacgatgattcatacgctttgtcgaacataaagaagatagaacaaacccaatgtacagtcgacggaatactaaaatgaaaccgcctcgtgtacggcacaccttacggtgtaacctaatggttagcaaccaatggcgttcctgcctcccggccgatttttttaaatgtctaatcaggatttatagccctttgacgactcgcctaagccttgagatcatcagcagagcaggaatcacaattccgctccatcaatgtttcgcaccagtcaaatcggccggatgcaggacgcccattaacccacgggcagtggaacaccaataacgatttttgaatcaagaatgcaggatgttaacgagaatataccgtggcccaaaagaacacgtggtctttgttgatgtgcaatgtcatgtttcattttactgttccgccgactgtagacatattcatatcaaaataagcatcctcatcatcccatacttgaaatgacactgttgaggacaagcgtgcgcttagccttaatctggatacgagtggaagcaatgtcagactcggtatccgacaactccttgtaaagactcgccaaaagaacatttgcacgtgtcaaccgattgtcccagttacaaacacatccttcaaaacacaaccttcaatggtcagggtgagatctggggtccgccatttgtgctcgcaatggaattcatatgtgcaactcggaccgggcacgctccagctcatactttgaatgccctctgttcattctgagctccgaattaagtcgtctccagctcagacttggaatcccacacgctcttgagctccgaatatacaatatcaatctcagacatcactcctgaaagctcggacttcgtgttcgcaagctcggacctcgtgtccacaagctcggacttcgtgttcgcaagctcggacctcgtgtccacaagctttgccaactcgtcctccaacgaagaaccatccgcccgcgcatgcacaaccttatgccgagtctcctccaccgacaaaagcgtacgctcaagatcagcattcgcatccaccagctccgcaaaccgcaccaaccgacgagcgtcgcgtctccccaaacccacaccgccactcgatctcagacgaggcgcacgcaaccgctccctaagttcttccaaaccagctcagcctcacacgagagcccccatcacggaaaccaaccaactcgtctttcatgacctaatctgtccggagcggcagaccgtgcttggccgacagcttggtccttggtgacgaatacgtttcatctccaacgaaatctctagtcaccgcgacgagacgacaagctcatccttccccttgcca

SEQ ID NO: 202 - DNA, 22379 bp, unidentified
  source 1..22379: mol_type = other DNA
  misc_feature 1..22379: note = Fanzor polypeptide
gcaaaaaacccagtgtagcctcgtgggacattgtctcgagtaacccggacaaaccatgggactggcgtggattgagtttaaaccccgggatagccacctgggacattgtctccagtaacccggacaaaccatgggaatggaattggttgagtgtaaaccccggggtagccacgtgggacattatctccaggaacccggacaaaccatggaactggtatgaattgagcacaaaccccagggtagcaacctgggacaatgtcttgagtaacccggacaaaccatgggactggcgtggattgagtgtaaaccacggggtagccacgtgggacattgtatcgagtaacccggacaaacaatggaattggtattggttgagtgcgaatcccagggtagccacatgggacaatgtctccagtaacccggacaaaccatgggactggcatttattgagtagaaaccgcaacatgttggtatccgtccaagacgcgtaccgtttagtgcgaagacgcagagccgcagcgactattcaggaaacatggagacacgtgaatacaaacccgagttatgttgtgtgccgacaccgactcttgaaagaattcagtacactcccgtaggtgagtacaatgcaatggtcgaaacagtagggcgtcccacaaatccgtacttggagctacagtcggcggaacagtaaaatgaaacatatatcagatggaaataaatgtacgacatcgccgttagaaaattggcgttaagaatggtcgctgacttgggtgtgttaaaaacttctgtgtttacgaacatcagtcgttctactctgtggaggtggaaacgctttggtgtaaatcgaaaacgacgtgaatttgtaagcaacctttttgagacgaataaggatttgttaaaatcgtttttattgtcaactcaatgcacaaccgcaagaggcgttgttgcttttttcaaaagtactcacaatgtacgattatcaactaaaacagtgtatcgtttcataaaactcattggttttacaagaaaaaggagcaaactccgtggacagtgcaaaggggacttagttccacttgtcaatgaattttgtagtaggtacaaggaaacaatcaatgctgggaaaattttagtattccgtcgagtgtagttagcatatttatatgggcggtaatagcttacccagatacagatacagatgtcgccgactgtccgcccaacaaaaatattccttcgtcatccaacttttccggtgtccgtgatgtacttgtaataagatccatggctcgcagcctgagttttactgatgcggcttgttgttgatggtctacaacaacataaacgaatggtcccactttatttaattgcacacaataatgctcgacgccgaaattaagagtcacatactggatcgagtcaaatccggagaatgcaaatgggattggggtcacttgagtaataatccatacctgacatgggacgtcgtgtcgagtaacccagacaaaccgtgggattggagtaatttgtgcttaaaccccaatgtcgtcacgtgggacgttgtgtcgagtaacccggacaacccatgggactggcatttattgagtgcgaatcccagggtagctacgtgggatattgtctccagtaacccggacaaaccatgggattggtattggttgagcacaaaccccagtgtagcatcgtgtgacattgtctcgagtaacctggacaaaccatgggactggtgtggattgagcttaaactcgagtgtagactcttgggacatcgtgtcgagtaacccggacaagccgtggaactggtgtggattgagtgtaaaccccggggtagacacatgggacattgtctccagtaacccggacaaaccatgggattggtattggttgagcaaaaaccccagtgtagcctcgtgggacattgtctcgagtaacccggacaagccctggaactggtgtggattgagtgcgaatcccagggtagccacgtgggacattgtctccagtaacccggacaaaccatgggattggtattgcttgagcaaaaaccccagtgtagcctcgtgggacattgtctcgagtaacccggacaaaccatgggactggcgtggattgagtgtaaaccccggggtagccacctgggacattgtcttgagtaacccggacaaaccatgggattggtattatttgagcacaaaccccagtgtagcctcgtgggacattgtctcgagtaacccggacaagccgtgggagtgggatggattgagtgtaaaccccggggtagccacctgggacattgtctcgagtaaccttgacaaaccatgggattggttttatttgagctcaaacaatagttgcgtggtcacatgggacaatgtcttgagtaacccggacaaaccatgggactggtgcagattgagtagaaaccgcaacatgttggtatccgtccaagacgcgtgccgtttcgtgcgaagacgcagagccgcagagacgattcaggaaacatggagacacgtgaatacaaacccgagttatgttgtgtgccgacgcagactcttgaaagaattcagtacattccctacactgcacacgtaaacaaatccaagaaaaacacaggaggggtggattgcccccctctcttgtcgacaacaactcgatcaagcggtacccttaggtacgaggactgcgattctctccagaaaccagcacttactcggactctactcgcacaatcgcaaggctgcactgcatggaactgttgggtcaagggagaccgcttccattttgcagggggtgcgtgttgttgatgggctacaaaaaaacatgatggtgttccactgccccagtgggttgctacaccataaagcggtttcattttagtatttgagaacaaccgtgagaacaataatgcacggcgacgaaattaacagtcacatactggatcgagtcaaatccggagaatgcaaatgggattggggtcaattgagtgataatccatacctgacatgggacgtcgtgtcgagtaacccagacaaaccgtgggattggggtaaattgtgcttaaaccccagtgtcgtcacgtgggacattgtctcgagtaacccggacaaaccatgggattggtattggttgagcacaaaccccagtgtcgtcacgtgggacatcgtgtcgagtaacccggacaaaccatgggactggtgtggattgagcacaaacgccagtgtagcctcttgggacatcgtgtcgagtaactcggacaagccgtggaactggagtggattgagctctaacgcgagtatttcgtgggacatcgtgtcgagtaacctggacaaaccatgggattggcggggattaagtgcgaatcccggagtagccaattgggacatcgtgtcgactagcctggacaaaccatggggttggtatttgttgagcacaaaccccagtgtagccacatgggacatcgtgtcgagtaacctggacaaaacatggaattggtggggattgagcacaaacaccagtgtagccacctgggacatcgtgtcgagtaacccggacaaaccatgggactggtggggattgagcacaaaccccagtgtagcctcgtgggacattgtctcgagtaacctggacaaaccatgggattggcgtggattgagtgcgaatcccggagtagccacctgggacattgtctccagtaatccggacaaaccatgggactggcatttattgagtagaaaccgcaacatgttggtatccgtccaagacgcgtgccgtttagtgcgaagacgcagagccgcagcgactattcaggaaacatggagacacgtgaatacaaacccgagttatgttgtgtgccgacaccgactcttgaaagaattcagtacactcgtaggtgagtacaatgcaatgggtcgcaacagtagggcgtcccacaaattgcgtcgccgactgtccgcccaaaaaaaaattccttcgtcatccaacttttagctacagccgggcattgtgggtggctgccaaggaaggtcactcagatgtatgcaagatgctcatggatccagttgttgctggaattgagttcagggcccttgcgaactcctacaacagttgggcattggtggcggctgccaaggcaggtcacgtagatatctgcaagatgctcatgaatccagcggtggctggacttgagttcagggcccgggcgaactctagagacagctgggcattgtgggaagctgtcaaagaagggcacgcagatgtctgcaagctgctcatggatccagatgtggctggacccgagtcaagggccagggcgaattctgacgagagcagggccttgtgggcggctgtcaaggcaggtcacgtagatatctgcaagctgctcatgaatccagcggtggctggacttgagttaagggcccgtgcgaactcctacaacagttgggcattgcattaaggcaggtcacgcagatgtctgcaagctgctgatggatccagcggtggctggccctgagttctttgcccgtgctaactctgtcaacagcggggccttgtgggcggctgccaaggaaggtcactcagatgtcttcttgctactgatggacgccattgtgaagcttgacaacaactggttcttgtcactgtaatcccccaaatacaaggtgttccactctcaaatgtccatacagctgtagtttagtataaagaatgaatggccaaataaaacacattcattggaatgaaaaacattgcattgcatggcatggcatgcctccccagggacatccagatcagaatattgtctcagtgcaatatggacatacgccgcatatgtgggataaaaccaggaaagatgcaactgccctcacaattgcagcagaagctagatgacatccttcagagacaaatacaatacgtagccaagtggaaaactgcttacaactaccttcgagcaggccatcataacctttttctaatgtgtttatgtagtctcacacaccatgagattactaaaaccaaaccctggtgagctcatgatgccccgaagtttgttggagaagcaagtcgccaaaaaccatccactgtaacgcaaacctcaaaattggttatgattcttaatgggatcaattaatgggcgttccttcctcccggcggattttttgaaacgtctactcataatttaaagccgttgcgacctccggaacgactcgtcacaagtccacctcaaagtacaactcagagctgggaaggtcaaggaagacatgctgtctccaaacaccttccatgggactgtctaccagtgctatttgtcgttcatctaccgacatactcatcaacatgcgaatagaaatttcagacggcaacaccataaagcgaaggccatcttcatgcggcgaggccgcaccaaagcctgattcatgattgcgggatacgactgcatcactcaacaagtagtcgtcagcagacgccaaggggactgccactcctacgggtccatcattgaaagcccatattgataatatcttgaatggtgagattggctccctcttgtacgcagccctcagctgcaggtgctcaccaagctttgcagatgctgttcgcatgatgtcagcaactgaagtcgtaccagggtcaagcgtaacaaaacaacggtggatggacttctggaacggatttccaggcgttgcaagtcgtgagaggtccaacttgggcacaaatgacaacatcattcttctggtatccatttggacaatctgtcggcaagacaaaccgcgggtgtcagtgccatctcatggagcatcatgacatcatcgcatgcacagctcagcgcaattccatgcagcatgaaattgccaacgaggcttcaaaagccaccgtgtcgtgggtgagaatgaatgaatgagaatgtacggacggggggatgcgcaagccgccatgtcatgtgtgtgtgtgcggtctggacacctctgaaaagaacgccgtgcggtgcactgagaaaaaataaatttaggtcaaaaaccttgaggaacccttgcttggctgatggtgccgccacagtgaggccagaaagtttgaggctttcggtgtaatcgatgcaacgtcggtcagtgtgtgggaagaacgggtcttcaaagaaattgcaagatgtgccgcaatatttgaagacaaaaatgaacaagctcagttttttttgcgagaggaactgaagtggaacaattttacaggacataaatacttccagtctttacaatcgaatgcaaaaaatgtttatgctaagcacaatagaccgtatctttgtatcaaggatgtctctggtaagaagcgggaatgatgcttgaatgttcagatagccacatgcatatgccgatcaaaccatacaatacaaacccgatttataatgcgtgtcgacgtagaatctttagggaatataatgaaatggacaaatcgggccattggccagtataaagatacttgtgggtatactattatttagttatcataaaatttacaatcataatttttatgataatgattacagcggaaataaataaccacatctcgagaaggctcaaatgcctagaacacaagtggaagtggagtttattgagttataactcatctttaacgtgggacattatcgaatgcaatccagacaaaccttgggactggtattggatcagcagaaacccttgcatcaaattggcgtttgtcaaagcaaaccctgacaaacattgggactggcgtgggatgagcggaaacccagatatcacatgggagattatacaagataatccaaacaaacaatgggactggtatgagttgagcgcaaaccccaacatcacatgggacattatcgaatacaaccccaacaaaccgtggaattggttttggatcagcagaaaacccgacatcacgtgggatattatcaaagccaaccccgacaaaccatgggactggcttggattgagcgcaaaccccaacataacgtgggacattgtcaaagccaaccctgataaaccgtggaatatgtataggatcagcagaaagcccaacatcacgtgggatattatacaagacaaccccgatataccatgggattggcgtggattgagctcaaaccccatcatcacatgggatattgtcaaagccaacccagacaaaccgtgggactgggactggatcagcagaaaacccaacataacgtgggatattgtccaagcctacccagacaaaccatgggactggcttggatttagcgcaaaccccaatatcacatgggatattatcctatccaatcccgacaaactatgggacttgtatgagttgagcagaaaccccaacatcacatgggatataatcgaagcctaccccgacaaacaatgggactggtttggattgagcagaaaccccaatatcacatgggatattgtacaagccaatcccgaccaaccttggtgttggtatgaattgagcactaaccccaatatgttgctatcttcccaagacatatatgatatcatacgcagatacatggcagtaagaactatacaaaaaatatggcgacatgtcatcacaaacccgagttatgttgcatgtcaaaacagactctatatggaatataatgaaatttacaatcttaattttttataataatgatatcagcggaaataatgtgccttgtaagaagcgggaatgatgattgaatgttcagctagccacatgcatatgccgatcaaaccatcgatgtcccagcagatggtgtatccggaatgttccaccagaaagcaaggagtctgcgaaatccgccgtggcgtgtgagagaattaatggacggatgtgaaaaaaaatgggtgcgaaagccgcatgtgaaaaaaaaattgactgaattgtcataaaagaaaccgataaccatctacaaaatacccacaaacacaatggcaaactttactgaattatacaacgatgttgccaatgacacttcgggcattccgtcggatccattttgcgatcgcgcaagagaactcattccgcccatggcgcgcgtttggaaggtacttgcaaagctcgccgttcaatcgtgggacaacgaaatacaacaggtctgccaatggtcaactgctatgactgccaaagacttcacagacggaaaccacgccaagctgtttatcaaccatctgattacagaaccgccggccggattcacatgctatccccgcttccaaggcatgtttcttggtttggaagccgtcttcccgtacacttcttggtgttccgtagattacattaccctcacaagcaatattttaagcagcctgttcattgagttggatgagttcagtatcaattgtgtggcatctgatggattcgccaatcatgaatgggacattgtacagaacatagcgtcccagtggttgcgagcgtggtgctcggcgcgcaagatccagcgcacgtaccgcaagtacatcgagtacaaagagatccagcgccaaaagcgccttctcatcacaatccccaggatcgtgtcattgctcaaggattgcatgggtcgcgaataagtaattattcgagaacaactgtttttttttaaccttcgatgatgaagacaatatccggtttaatgctcagaaaatgtagaaatgttctgtgaaagtgtaccgaagatctctctttcatcctcgaagtccagacactgcatcacccggctcggatgccaggtccgacgaatgagctcctccctgatgacgtccagtgacgctttcttcatccggaccatgacgcgccagtcgggccattctgtcgctatgaagatcatcactttgtcgtctgagtgggaagtgtagttgagtaccaagcatgcaaacggtacattattaatctcgtcgagcgcttcgcaaaaaagattgaacgtggggaatatcccgccgtataaattgtacaatcgcttccgagtgctctcgatcatctccctgaagataaatatatagtcgacgctcatgatgagatagggtggcactactacagtcggcggaacagtaaaatgaaacatatatcagatggaaataaatgtacgacatcgccgttagaaaattggcgttaagaatggtcgctgacttgggtgtgttaaaaacttctgtgtttacgaacatcagtcgttctactctgtggaggtggaaacgctttggtgtaaatcgaaaacgacgtgaatttgtaagcaacctttttgagacgaataaggatttgttaaaatcgtttttattgtcaactcaatgcacaaccgcaagaggcgttgttgcttttttcaaaagtactcacaatgtacgattatcaactaaaacagtgtatcgtttcataaaactcattggttttacaagaaaaaggagcaaactccgtggacagtgcaaaggggacttagttccacttgtcaatgaattttgtagtaggtacaaggagacaatcaatgctgggaaaattttagtatcagttgacgaatgtgggtttagtgagcgtctcaagccacattatgggtattcccctgtaggaaaacctgttatcgttaaaactactggtgagtgggtacaccacagtttgttgatggcagttttttcagatggtaggaaagaattcgttgtgaagaaaggatctgtgaagaagacggacttcgttgcatttattgaatcattgagtttgtgcaataattcagtagcaataatggacaatgccagtatccataagaaattggtcctcagtcaccccgtcaatatttgttacacacctccttacagtccagaattcaatgctattgagctatgcttcgctaaggtgaagagagactttcgtcgtttgaactacataccgaatgaaacaaagacgcacgtgtctgatatgatttccttagcattcggcaacctcactgataaaattattatgggttgttttgaacacgtttggaacacttatgtgtataaagcggtctgtgacgtattgattatgaaagatggcgacgaaacctccgacagtcgcgaaattgaaggagctactgaaattggctgaagtaccatactcgtcgaagtccaacaaggacgatcttgtccgtttatgcgaagacaatggtctcatcgccagaccccctccagaatacaagacggtggaaaagatgtgtgtagtgaaatgcgccctgaagaaggcaatgagtcttgacgatgaagaattcggtaagtttagggagcatgtggaccagctcgtcaatgtggtgagccgcatgttacggcggtccagtctggtgctgactttccacatcacgagtctattagagaaaggtctggatattccagacctgtacaacatgaaagatacctactggaaggattggctacgtatcggggtagacggaatcttccctgatgaggaaagcaagatatcgtacgaagctgtgaaggactccatcggcgatgtaattggtaatgacgacgctgactacatcaagtcttatccgatctatttcgatcaggtattgaactatgcagctcacacattgagcactgtcgtgtcaaacaacgcatgggttcctttgataccacgtctggccagactcacttccaccactttaaatagattaaatgccccgaagacgctggacacatcgaagatcattcggggatacgacgtgatgcaggctattcagcaagaagtccaaaacatggagggatggccagagtctgttcaagagtacgtcaatgaagttagggagatgctgagtgttccagatggaagtcgagtttatgataactatggcaaagacatggactttccgaccatggtccggtttaattattggatacagacacggttggaggatatggatgcacgtcgtatccgattgatgcccatcttcaatgtccaacgggtgcatgttcgccttgacctgaagaccctcgtgaacctgttcaggcacatgttccccaatgaccagaacatcgttgagctttccaagtgggaacatgtaaagaatcccgaaagcttcatgttgccccagaggcctgcacagaagaagaaaaaatcatgtagtcctggtgaatgggaggcatacaagtcggtcctgaagcagtacgatgatgatgttaaggatatcaaggctactgacgagtacagacatgcaaagggtttgtatgacacgcttgtgaacgcccgaaaaacagtcgcaggttccttcttcagaaaaccacctgtcaagaatgggtgggttttcgactgcagcatctgtactgacggagtctctttgagcatgcagtacagcaagacagtacaggtccttgtctcagatttgaagaagacctgtaagaagcctcgtaaagaagaaggtatcaagatcgcagaaaaatacgacggctcacttaaaacgatattgcccgatatgggtatcgtcgtcatgggtgtggacccaggacggagcaacatcgctacggtaacgtatttggcagacgataaaaataagacatggaagctgacacgtggtgcattttaccacaagtcgggtatcaagaagcagacaaggcagaaggaactgcgttttgctgacatgattcctatgtgggagtctctgcgtgaaaatggagcagctttgagtacatcgaggacggataatatctccgcgtacttgtcaaattacgctaagttttctgacgagtggtggagattggctttgcgacgccgagaatcccgtgacaacttgcagcgttacatcggaaaacgaaaggtcaaagactctttctgggcgggtatcaagcggtgcatgatgaaagaacttcctgatatgaaggtttgcgtggcctacggatctgccatcacgaaactgaagcctactggaccgggagaagttgcagttcccactggggccatgttcgcatcgtgtaaaagaattttcaaagaggacgtttctgtgacagatgagttcaaaacgactcttatgtcgtgggagacgggtaaagaaaaagaacgtgtttacaagatcccaagtgtttgtttagcagacgtgaagcttaggttgggtggtgaacgttttggtcacacgaaatcgaaaacgatgccaaaggtcgctgattgcgaccacttaggggtaaggttgtacaataaacgtaaaggcgcacaagagaagcacaggaggggtggcttcgccacttcccttgtcgattctcaaaaatcgatcgagcggtacccagaggtacgaggactgcgattctctccagaaacatgcatttactcggaccgggatcgctcttctgctctcacaatcgcaaggctgcactgcatggaattgatgggtctaggacgacctcttccatttgcccacagcagctctgttgttgttgatgaataaaaactcgtattgttgtagacaccactcggtccccctccggtggtcgcgacaacattaggttacaccgcaaggtgtaccgtacactcgagtgtatgtagatcatcactttgtcggctgagtgggaagtgtagttgattaccaagcatgcaaacggtacattattaatctcgtcgagcgcttcgcaaaaaagattgaacgtggggaatatcccgccgtataaattgtacaatcgcttccgagtgctctcgatcatctccctgaagataaatatatagtcgacgctcatgatgagatagggtggcactactacggggaccaccatcaccatcaccatttttgccctaaagaatcgcccgttcatgaacaaatatctgatcgattcgtgcttcgtccatcgattgttgtaaatgcagttttcaaagaggatgcagttggctttattttgttgcttcaactgtttccactcagtcttctgcattgcgagaaaattgtcgacgatatcctcagcgtactcaatgtgatgtgcgatgtgtgggatgctcgggatgctctcgggggcgtattcttgtttgtccatctcagtcggattgataatctccgcgtgcgagcagttcaggtgggggagcaattcctttaccagggaagtctttcctacgtatcgctttccgatgatgatgatgttgtgcatttcactcgcatgttcgtgcgggtcaaaactcttgaatcgagtcatcaatacaaattcttcaaataaagtggacatcccttacattcgattggagtcagatggacgagaaggaggcgacaggtttccgcagtttgcggttggtaattcggagaagcctcaaagttggcgtgtggtggatgattataaggtgtgtccaactttatttgagaacaactgtaagtgtattatggcactttgatgcgaccattcctgcccgaagaatgaacgattcatcaggggataatatcattcaaattatacagggtgtctcaaaattatttgagaacaactgtatgctcaaggcgacagccaagcgcagtggggtgtctttcttcgaacctgacccaaccttgtttgatgctgtgcacaaggagatgagaggcatagcgggagatgaggcgatgtttagcatcaccgtgcccaacgtggacttgccagtcgaccttgggttcactcaggactttgatctgaagctggcgattggggacgatggagatgtcgtggtctgcggacggcactggactttgtttaccactgtcacccagcccatggcagactttgaagcggcgtatgggatcatgcaacagactgcaatggtctcttgtgcggcagctgcagcagcggaaccaccgccgctcgacatcgacgactcctgcatgccattcgataagcttacatatgcagtagttgtggcactggaggagatggtggacaacagctgctgccccaacacgcgtgtgtttgcgtggctgtatgccaagcacctgcgggcagccgacatggatttcatggacttgctgcaaactccggccatcgccaatatggcatctacagcgctggacgcctggtttgtgcggcacccgatgttcagggcacaggcgcatgaggcacaggatctgctgatcactgtgctggatgactacacgccatcgcgtccgcggtacgagccatactgggtgagtgagacttaatgggcgttccttcctcccagcggattttttgaaatttctactcagaatttagagtctccggaaagactcgctagcttgagacatcagcaccaaggaatcacagatccagtaaaaatcgaccgggaggcaggaacgagcattatttctcaatttcttcatgtctcatttctcaatttcttcgctcgacaccgaaattaagagtcacatactggatcgagtcaaatccggagaatgcaaatgggattggggtcacttgataatctaacccagacaaaccgtgggattggcgtaaattgtgcttaaaccccagtgtcgaccttgggttcactcaggaatttgatctgaagctggcgattggggacgatggagatgtcgtggtctgcggacggcactggactttgttcaccactgtcacccagcccatggcagactttgaggcggcgtatgggatcatgcaacaaactgcaatggtctcttgtgcggcagctgcagcagcgaaaccaccgccgctcgacatcggtgtaagtagtcgatgtaacaccgcagcatactactttgaagtgtaaacaacacagcgtacccttcttcattgtcagcacacttcacaaacactacttctttgcgacagaggacgcgatgctcattccagatgtaataaaagacaattggtacaagggagactacggtctgggccaggtcgcgcacttcttgttgaaagggtccgtgaagaagactggggctggccgcggaggctactacatattcgaggaggacacgtgccagtgggtcaaggtggatggagggagggtgaagagcgtggcggtcgaggccatggaggcggcgctgagggatgtggacgcctggatatcaacctcgatgatggtagcggacctggatttgaagagaagagaagttttaaggctgatccggtacacaaggtctcatcgcggagtgacaaacgtgatggccttcgcaggcccgatgctgagggacgagacgttcgaggtgggtgggggaaatgacactgacgatgatgatgatgatgacccgtcctccatcacagagatggtgcttgcggagaagttccggtacgccgccccagaattcttcagacgaatcaagtttgtgccagaggtcaagaagaaagaatgtgtaggcgacatgtattactgcgaccccgctaccaatcgctggtcgaactgcagcaacaccaagataaccaacgcaatcgcaaccgagttcaactccaaattcccttcggagaagaataacaagaagattcggttgtttttagacacggtgcgggggcgctctgcgtccttcaatccgttgcatgtctcgtcctaggacgagacattcgctgataacctagataacaacccggatctctttgcggtcaacaacggcgtcttcgacagctcgtcgagggacacagtcgtgttccgaaacgtcgagatgaccgacaacattagtaggtgcgccaagtgggattaccagggagaggacaactaccacctccaacgatgcaaggaggagctagatgacttcttgaggaaagtcatgcctgtggacgaggagcgtgacgtcgtgctcgcattcttcgcggggctcctgtccggtcgccgcaaggagaagaagttcctcgccttcaccgacaagacgtccggggacaacggcaagagcacacttatggccctactgggtagcttcttcgacgagtacgggagcagcaatgggacaaagtttatgacgaagggatctttcgccaggagtcgtgatgaccacgacgcgggtctcaagccaatgaagggcgtgaggctactggtggccgaagaaatgaaacccaacatcacgctggacgaggcgtttatcaagcgcattgcggggggagagggtgtgcgtgtttgcgggagctcatgtgacactgggaactcattcgacttcttgtggcaggcagcgctttcgtaaagaggatggtcgtggtaccaatgcgatccaactttgtgctacaccccgacccacagcgcgagcacgagtttgagcgccgcgacgaccttgcagatgccctgccaacttggcggtctgcgctggcgcagctgctcatcgatcactttcgtcgaccggggcgctccagcatcttcgacaacttgccggtctctatgaccgagtggaaatctggtattgcggactgcgccaaccccctgactgagtggctagaggaggtggtggagatgacgggggcgtcttcggacgcggtgtggatcggggacctcaaggtccggtggaaagagtcccactatggtgaagtttcagtcttcagcacgaagctggtcaaggcgttctttgtgggcaaacagggaaccgagtggaaagagactggaagaatcgatacgaaagtcaaatacggggtgataagggggtgtaaacttggcaaagtgaagtgaagaacaggccgtgcgatggcttgaggtccggtggcggctcggccacacatcatgcatgcccagtggtcgccgtgtgactcgacatgatccgccgtgacgagagtggtcaaaaaatccaccgggagggtttttttcattcaaagccaatataaaacataaacaaatggatattagtattgacttcttgtgcaacggtaagaaatcattgcaacctttgatgtgggatatgcttgcggccgggggtaatgaatcttgcaaggagcttttaaacaccttccgagtagcttatgctaccggtctgatcgattacatccgccagatgtgtggggatgatgtttgcaacccgaaacaggtcgggactgtaaacgtcaactactcttctgacatcgacgtgaatctgaacttcaatggggaaattctgcataatgatttggatcgcatcgtattaattttcaaatcaatcaaagattaccattatcaacgcttcaaacgtaatttcaccgacatgtttgatatcaacatttacggatctcatttcggcatgctcaacaaccccaagagcgcaaaaagcaaggaagagatttaccttatttctaatgatccgcaacaacgtctctttgccatgggtaagttggcaatcatgtgcaaatggagcgatagagaagacatgttgaaggccagagatttcattaagaagcagccgacatacaacagtaataacaatgagaagttgtacacttcttatttgaaaaagtatttcgcaattgatagaaataatacgacgactacgacgtcgctcggggctgtatccggtatagtgaaggtgggtcgtattttctcgatgacgaagctccttgagaacgatgtttactggtccgttggtgcgtttctccatattgtttcgggaaggaaggaccttacagagagcatgtacgtggactcgatgttggacaacacggggttcattgtttccaatttgcgtaaaaagcacgtttgcaaaaaagaggtttccccgtacaccactgtgctccgggttgcaaagtacatggagagggtcctggatgcttacatgttgtgtcgacatgtcaaatcagaagcccacttacagaaattattgaccatgtgctctaagttgaacattgagaggaagagaaacgtgattgacgatgaaacgattaataatgtagatacgttcgtttcattgttgggacttaagatgtcgaatcggatatcgtttttgaagtttgaaaagaaaattgtggattttgccttcgatctggtggacaatttacactagtttttatgaaaaacatgtgtactcgtttttcgaggaacggacggcggatcatgcgagtcacacggcgaccatgcagtgaagtgcatcgtcagttaaaacatatgtcaagcaaggtctacttattttcggaaaggaaacctgttctgagcaaacacgacggttacgcaggcgaccgtcccagacaccaaggccgcaattcccacgatcgctagcaactgctgctgttgctgttgctgttgctgttgctgttgctgttgctgttgctgttgctgttgctgttgctgttgctgttgctgttgctgttgctggtgctgttgttgttgctgttgctgttgctggtgctggtgctgttgctgttgctgttgctgttgaattggttgagaattctctggacaagcggctcctccgcaagggagccatgagttgttcaggctccggaggcccaagtagtaatatgggtcaacgtagctcaacgcggaacgcggaatgttgtatcggtcgtcgtacacgcttggatacgagtagcgtacgttctccgtgtgcgtgtggtgcgtgttccctcctcccccccaacctccgttgccgctgcctccaccaccaccaccattgttgtttgtgttgttgttggtcacggtgatgttactgggatgtggtggtggggggggctcggaagcgggcggaggaggctcggaatcgggtgaaggaggctctgaagcaggcggaggaggctctgaagcaggcggaggaggctctgaagcaggcggaggaggaacatctccttctgaaaattgctctcggatgtactgtgaggaaacgttacggcagttattggtgatcagggtaatcactgacgccaacactacaagaataatgaagattgctaccaaccaaagccagatgccagggactcccttggacgaggttcgcgctcgcgaagtgaccatattgtatgtatgtatacatttgttctcaaataattttgggacactctacaaatattttttgaggcttttacgttccacgatatccaataatccagtccgtgtcgtctgcgtgttgatggattttataaaatcgtattgttgtagacaccatcgcacagagacgtttcatttatatattctgttgagtgtaaatggatatcatccctcggattcaccaccagcgtgggaggaaaaggcaacgtccagagttcaaactcagagaagagcttataaaccgcaataggggcaaacacatttggaaatgtggtctacttgaaatgtcagaattacaaccatacagatgcatgaaatgcaacctgacaatggcagagctgcaggaacttggcaacactggagtttgctcctcggaaattgactttacaagcaccgtgattgccgaggatggccgactgttattggatttaggcacatccatcgtcatccgtgattggatagggtagagcgtttattttttcgcagagagcgtttattttttcgtagagagcggccaagaaatttgttggtcgctctctactatgcggtttgctggtccctgaactctttcttgaggtaaaaaactatcttccgaattcgaatgtgcttctttatattcatcatctcttttgaatcagttttacaagggtcggatgcctgtccctgaccaagcattctctggtgagtacgtaccattgttttgcggacacctgtgtcgatggatgcatgttatctaccaccccaattttttgtattactattattatattcaaaaacgtacacctaaaaacgccacctaagaactctactcataactatactcataactctaaacctcagcagaatggaggaggtatgttctcaaccactgtgacctcaaagacggtgcagaaggaactagcaaagatccccccaggagacctcatcaaccgtatgagcatcaacatcaacacaaaccaaatcaagaagacctcaaccctagaagagcaggatgcaatcacaaagctcgtgcagatcatcgagacagctacgaagcagaaggatgatttcgataaggccacacgcgacttctataccgtctacgataagctcaagattgcaatcatagaagcgtgcgacaccggccccaagttgtgcggcaccgttaacagcgcaatcaaggcccagaagaagaactcgtaaatttcccgacaataaaaacacacacaaaatgtagacgcgacgcaaaaataaactatgcactacactcccgacgccgcagccgcacccatcatggacgcattcttcaaggaacgcgagaaacacttcgctacacaacatcacatcgactcgttcgatgacctactaggaacgtgtctaagagcgatcgtacgcagcatgaacccaatcacaatggttcgcgaagaccccaacacgaaaaccaaacacactgtgaaggtgtacgtaggaggagacgaaaaactccgccccgatcacgacgtgcacataggagacccaaccccgactctaccatcacaagcccgtatagcaaaccaaacgtacggtgcggacatcttcgcagacgtccacgtggtctatccggacgacaacgacgagacacgagacttcgaacgcgtgcacatcggattcatgcccatcatgatccactccaaagcgtgctctctaagagggctaaatccgcaccagttacgagcacgaggagaatgcccatacgatatgggcggatacttcgtaatagacggacgcgaaaaggtcatcgtgacacaagaggaacgcgtcccgaaccgactctacacacgacgcggagagaaaatagaatacgacaaactcatcctaaaagcattcatcaggtgcgtgtccacagacgcacgcgacgtgttcccacgcacaagcgtcttccgagtcatgacttcgggtgaaatcacagccacggtcacccacatcaacgaaggacccgtgcccgtcacaactctcttccgagcactcggcatcgaaagcgatcgcgccatcctcaaaaccatcttccacgaagatccaggagaagagagaaacaaggtcgaaatcgaattcatgcacgcatccatagcctcaggacacaagtccggagtaagcagccagagaggagccatagatttcctcataccacgcacacgattcaagtcccaactcgacctcaaaagcgtcctcacagacgacctcttcccaaatgtaggacgcacgttcgaggccaaagcaatcgccctaggagaagtcgtgagacatctcgtaagagccgctctaggaaaagaacccatgtcggaactcgatcactacgccaacaagagactcatgtgctcaggtgcaatcacagccaatctcttcagagacgcgtacctactatcaatcgcaacaaccctgcgcacgctcaacgaagagttcctcaccggaccatggcgcgtcgcaaacgatatacacacgctcgtcaacgaagccaacctgaaaaatatattccaaccaagaatcatccgagaagccctcgtacgagcactcaaaggatcgcgacgcggcgatgacaatgcacgcgcgcccgtccaagaactcagcagagtctcatatctaggatacatttcacacatgagacgagtaaacaaccccgtcgacaggaacgtcaagatagcagacacacaccgtctaaggccgtcgcactggggagtcatctgcccagtagagtcaccagacggacccaacgtaggcctcctcacgcacctagccacgcttgtcaccatatcacttgccataccagaacccgtcgtacaagaaaccataagacccgccatagacaaatacacgagacatctatcaaacagcacactatccccacaatcaaccgcggtgcactttaacgacacatggatagcgatcacagacacacccaaggaactagtcgatgcactacgaaaaatgaggacggaagacaccagactgaacactcggtgtcacatgggacgtgtggaggaacgacgtggcaatccgcacagatgcaggaagatgctgcagaccactaagaagagtacaggaaggaaaggtcgtaccaatcaacggcgatccgtcgtggaccgaattgatacgcagcggagcgatcgaaatgatagacgtcgaagaagtagctacatgtctagtggcactgaacgaggcagacgtcaacaatcgagaccctatcccaggcagatacacgcacgcagagatacacgcaggaagcacactctcaatggtaagcaacacctacccactacttaaccacaacaacggggcgtacaactcactatgtctagcgcaatttaaacaagcgctaggcacgaccatgacatccatcagggacaggttcgatactaacacattcctactacaccacgcccaacgccctctggtaagcacgagcttcgcagaccgactcttcggaggacgtttcgcgcacggcgagaacgtcgtggtagcaatcgccacatacacaggatacaaccaagatgacgccatcatcatcaatctagacgccgtgcagcgcggccgactagcactcacagtattcgaaaccatccggtacga

SEQ ID NO: 203 - DNA, 22319 bp, unidentified
  source 1..22319: mol_type = other DNA
  misc_feature 1..22319: note = Fanzor polypeptide
aaattgttggttagacacgattgagggggcatgctttagcatcatcatcatcctcgtcgaacatcgtccatctgacgcgatcgaacacacgccggatttcgaaccctcgtacactcgtagacgagtataaacaagtcttattcactaactgacaacagcacacttctttattcgatgcattcacggtactgatgctgagggacgagacggtcaagcaacgccttgacatcgtggacacggatggtctcattggcggggaccgtcctcaagttcctgtggaaggattatgtcccattacagtcggacacatctcgtccacaatatcagacttccactctgtcatataatagagtggaagtctgatattgtggacgagatgtgacgtcttgtcagcttcagtcttcaacaccaagctggtcaatggtatttgttatttgttctttgcgggcaaacaatagaatgcaagaatcgataaaggggtgtcaacttgtttcactgtacacgtacacacgcaaacggaggaacacaacacaacactcactgtcgacgatgatcaaaaaacatctgagtacacgcgcaaagagaggaggaacaccaatgtcagccaattaatcagactgaatacacaagacacgcacgcacgcactctatcacgacacatcatgccgcatcctcacatgccgacaacaagtcgtggttgtgtgtgcgaggcgaagtatgacagtcgcgcaaggtatgctctgcgcctgttctgggatcgttcaagcagacagtggatgatggttgttgccacctgggtggcgtcttgtgcgcaaggacctcacgccactcaacgcgcacgccaccgatgccatttcgggtcacgagacgtccatgtacagacagccattggcaaacaacggattgtattcaacaagcgcggagcccctttcacctcttcccccaggggagcccccacaaaggagtccgcgaggaaccgagcgggtgggcgaccggaggggagcccacagttcacatcaagcattagacatacacactactgtgcaactacagtcggcggaacagtaaaatgaaacatccaaaaacaaataaaacaaatagacaaccgttttttgtattgtctatttgttttatttgtttcagcttggttgggtatccagggccaccacgtggaggtgctgattttggcccctttgtttctttttcaaatacttgaaacagaaacaccttctcatccagattacttcttgatatgggacatccctttgcgagttaacacaggcttggtgacgacgaaagtcgggttgtcgtaaatgacgaataccttgggtcgggacgcaatgattgcgaagacgtcagagattccaaacatttcgtatgacagatgcagtatattaaggggtgtgaggaggttgttgttgttgttgttgtattcctaacgttccgaaaaacctttcaattttttttgtatttaaagattctcagaccacgcgatcgaggactcggggatgataccggcactcacctgccatcgctggtgcttagccaactgcttcaccaacttaattccgttcttgcgagtctcataagaagtctcaatcgtgtctacgaaacggtcaacaagaacgtcacttgtaaaagcacactgacgcaggcaactgaacttttcgaaagaaagaatatcctcgatgttcttgctactacacaactgagctagggcaatggacaaattacccttcgtagtgctcataaccacttgaaacccctcgcgactgatgttcatatgcaaaagggggatgatacccttcacataatcactcgagtgaaggaagccctccttctcggaaaaatgaatgtcgtgtgattgagcgttcaacatgaacacagccagcttagctgcaaaagtcgcatctccagaagtcttcttacgttttgaagtagaagaggaattgcggggtgttgaagacatttacatacacatgtatacatgtatataaaaataggaacgactcgctacagtcggcggaacagtaaagttgatcgtacgcaccttttcatgcgctccggcgtgatccagagtttgtgatcaactcgttcactaccgccgtgatgccttcgcattcgaacaccaagctgtgatatgaatcgtcagcatggcaaaccgtatgtttgccgaaactacgcagtgtggcatacaatccgatgcggtctccgacatgcaacggcgtgtccccagtggtgcatgacaggctgcatgtgcccttgccagcatcactcgtgtcatagatggtggtgtaacgaggcacggacactgtgatggtccgtggtggcaggaacaccgcctcgtccacatcaaaccatttcttgatcatgtctcttcgtagggcgtctaccgcatgccatgtgtgttcgtcacctattttgagttccagggtggcaccggtcttgaatgtgccgtcgcctgacggactgaatatctcaacgatttctcccataggaatggtgacaaaggcgcacgggacatgactggggaacttctcacaggcaccggtggcatctgccccgatcacgatcatattggtaaacccttacagttgttctcaaataaagtgggacacaccttatactcatccagactgcagatcgttgcttttgggcaacgttgggggggtgcagcaggttgaagaggttctcgaagatgatattccgagtagactctttggtaaaccgttcaaacgtctgtgtctccatatcagtatcagggggtggggttgtcgaggaacttctcggcgcgtctcggcgaaacgcgagaggacgctctctctcaaagacttggtgaagtgtaagcatcaggatgttcctggaagcgttcacatcgcggtcccaagtcttccagcagtgaagcataccaccgctctgttggcgtggctctccgctttgactgcttttgcagtggagaatcttatgaatccgcttgcgtcattctgtacattcccaacctgtaccgtcttgtttcttacgatgagtgagtgccaccgtgttgcaaatgtggtccactcatcgtaagaaacagaatcgagcctcgagtgcagtttgtggctcacgcccgactgcaggtcaagctgttgcagctgtatcgcacacgcagtacatgaaccacgcaggataccagcagacgtatgtgtacgaacgcgggtgtcagtgccatctcttggagcatcacgacatcatcgcatgcacagctcagagaaattccatgcagcaagaaagccgccgtgtcgtgggtgagaatgaatggacggatggggggcatgcgaaagccgcatgtgaaaaaaaaattgactgaattgtcataaaagaaaccgataaccaccacaaacacccacaaatacccacaaacacaatggcaaactttactgaattatacaacgatgttgccaatgacacttcgggcgttccgtcggatccattttgcgatcgcgcaagagaactcattccgcccatggcgcgcgtttgggaggtacttgcaaagctcgccgttcaatcgtgggacaacgaaatacaaaaggtctgctacggagaatttttgactgccaacgactacacaaacggaaaccacgccaagctgtttatcctcaatctgatgacagtctcgccggacaatatcatatgcgatccccgcttccaaggcatgcttcttggtttggaagccgtcttccagtacaatcctttttgttccgatcaccctcacatcacacgcaagattgtaagcagtctgttcattgagatggatgacgagatgatcgattgggtgtcctctgatggattcgtcaatatggattgggactttgtacagcacatagcgtcccagtggttgcgagcgaggtgctcggcgcgcaagatccagcgcatgtaccgcaagtacatcgagcacaaaaagatccagcgccaaaagcgcctcctcatcacaatccccaggatcgtgtcattgctcaaggattgcaagggtcgcgaataagtaattattcgagaacaacttttgtttttttacctttttcctcaaagtccagacactgcatcacccggctcggatgccaggtccgccgaatgagctcctccctgatgacgtccagtgacgctttcttcatccggaccatgacgcgccagtctgtattccgatgagcaaactccagtgttgccaagttgctgcagctctgcaattgtcaggttgcatttcatgcatcggtatggttgtaattctgccatttctagcagaccacatttccaaatgtgttttcccctattgcggtttagaaggtcttaactgagtttgaactcgggatgttgcattcttgtcctcccacgcgggtgttgcattctggggatgatatccatcttcagatacgcttactacaaaactaaaaagcaatctggtccagaacgacgaacatcttcctaatctttgtcggcacatactgagcgtcgatggtaggagattctgcgcgtagcgcattcgcgtctggctcccctaccatacttattatgttctctatcacgtcaggtggaattgatgacaatagggttgggtccaactgtctggcaagacaagtggtttcgtttgggcagaagcggatcacggaatcgcccacaacagcgtcggatgcaatgatgcgggttagtctcctttctaatacattccactccacataaatctcaacaatgcatgccctccgtctaggtccatccttattgttctcccatgctcgcatgtgctccaacagtgtcagtctcctcataagcgcacagacgagtccattgagattgcatttgcggatatgaatattctcatgccacattttttgagggtctaagggtatgctatcgtccttgacgtacgcctcgaacgcattgcgttgtagaaacaaaacctgcaaacggtcaggaaatccaaacaattgacgcacatcggcataccttgcacattgcactccaatgttcaacgatttaaaacccaccttgaaaggcatacttgattatacatgcacagctttttactccttatgttgagcagtcagtaccaacatccaggagtcatttctcgaatccgcgattcattttttcattaactgccgtctcaagcaggcgtctgcttaacaaactattacgggatcatgaaagggaatcgcgggacccacggagtggggtaggggaattcagatgcggactcgcggaaacacgtgtcctaggatctgacttgtccatcggaggaggacacacgcaaacggcggaacactgccgaatgtatcggaggactcacgcaaacggcagaacactgtcgactgtatcggaggacacacgcaagatgcggaacactgtcgaatgtaatgatgcgggaggggggcggctccatgttcatgtccctaaacgctatatataacgtacagagacaaagtgctgacgattgaatgcaatctcatgcatctcaatgtcagagcaatccaaagaatccatgcacgccggcggatcctcgtccagactcatcacgcacacgcacagaactgatgcggcggcggcggcttatcgcccagccccatcacgcacggcagaggcagcgtgtagtccatccttatcacacatcatgccacgcggcggcttgagaaggccacactgcagcataacaacaacacagcgtcaaaaaggaaattacagcgtgtcccactttatttgagagtaggagcacatgatggcgtccgtgaagactcgtcgcgccttgttaatttttccaagttactacgtagacgggttgggacccgtgcttatgcacacattgcaagagtgtggtacgctgccaagggacttgaaggggtacagatgtggcggagccatgaaggaccatgatgtttttgtcaacaaggttttgggttctggtatggagatcaatgttctcgaaggcaccgtgtgccggaggtctgtcatggaccaattggcttggttgttggagccctcagtggacgtttctcttttgttattctgtgggcatggcatgaatgaggggtcgccacgtcacggtacattggtatgttcttacaaacagctggtgtcagctgaggccatcgatgcggtggtggcagcgcaacttttttgcggcacactcatccgcgtgctcaacatgtgcgaagaaaatgccattgcccccgcccctggtctgccgttccagcacggaagatctctgcttgacgcatcaagagcagatcatgatgcacagttccatcgcgttgcacacaaggacgtgatgttgttggcaactgggacttttgaagaaacggcaggtggcaaggcaggcacacccttcatcgctgccctgggcagaatgtttgacgcagagtcgatcttaacctacgagcgccttgatgagctcttgcagaggcactggcctggtggcagtgggagggcactgctgtatcctgcaaggttgaaagggatcttcggatggccggctaatggttcacaggcgagtggcgattctgcttgaatagtaatatagggacccagtcccagaaaaggccctttgttacactcagaccggtcaataatgttacagtatattgaatcaattacaattctctatgtacaacttggacagacggtcgattgttgtacacatgtacacattgctgcaaagtttgaggagattggctatacttgcgaatataagccacatgacagtctcgaggtggatctcaaaccccactaaaaaagtgtacaaccggaataaacctacaaaatcggatgtggtcatagagttcttaaaggcgtcattaaaaatagatccattcgcatctcttgctgttcttcgtcataaggtaaaggatgctttcggatttgaggtatcaaaagaattgattcgcgttgtgataaaaaggcttgggctcacaaagaaaaaagcaaagttcttctccaggcctgataacttatatgagaaaaccacgtcattcataagccaaagggaacggttaaaagaggaagggaggaattttgtatcgatcgacgaaacttcatttggaagacatacgagagacgtgtttggctactcaccaaagggagagctactggttgtaccgaggttgagacctagggtgacgacaatgtcggcactttgtcttattcaacaaggaaaaggagacatttattttaacatcaggcaagggtctttcaacacgcatacttttgttgagtttttagaaaatttggactgtccaactgacacagtaattatacttgacaacgttgcttttcaccactccaagaaggtcaaaacacttgcagcttcaagggggtgggagtcctatacactcctccctactcaccttggttcaacccaatagaaggggtgttctccatcgtcaaacgcgatttctataaaagccaagatgtgtataaggctttgagttctgttaaagagaaacacgtaggctttttttcgaaagtcattgaatacaatttctggaccttgatacaaggaaatagatacattggctactaaatggagacgatagtcaataaagagcctccggacaagcgtacgcgaccggaccgggcggccaaaattaaggacaggaaaaacggcgaggagaacgtggtaaagtgtacactgagtcggatcatagcggtaaaggacaacaaggacgttatcaccaaggtgattaaggatcgggtcgacagcgtatccaagaggacttatcttgccggtgttgcggtgaaccggatattaaaagaagtcttcgaaggggtaccagatgcgcaacttcacactgtaagtgtccctagcgtcgaccagaacactcgaaggaaaacaggatcttggccaaggagttcaaagatgagcacggcattgacgagaccgtattccaccgatacctcctctacgatatccactcttggggagtaaaggaagacctcatagcgatacattcgctcctaccggagcgaacaaagatgttgctgaagattcagcactcgatcatcggacgagacgagatcaaccgacagtggcttaagagcgtttccaacagcgccaagatgatccggtacaaacgtctttatcaatcgatacctcgaggccacagaggacgagggctacgccaagctggtcaacatcgctcccatcccaacagtcaagcactccttcatcacgatagacaccgacggcctactgggcggtcctcaaggacgtgggtctcgtcgagagtctcaaaagacgctgacgaacaaggagcactgggagtcggtcttcgatgtggaaaacatccgttctactggaaaggtgtgtttacatgcaccatagacactgacggcgtaatggaacgtcaaagggaggagagacgttgagaggcggggtgcgaatcaaactaaggggtccgaccaagaagtggttgtctaaacatcccaggctgccttgacgacctaaggaacaacatccagaagcgcgaagaacatcggtcctaaatcgtttggagggtgcctgtactgtgtgctggtcagtgggcaaccatttgatctcgaggaaagtgtagtagtgttgccaattcgcagtggtggctcgcagcgcctgtcggctctacgggggggaaataggggggtaagaacgtagcgtagcacggttgcgtaataaacaaaaacagtcggcaccggcggatgtcgaatgaaagaaaaaactggtgtccatcgcatactttcttcgtaatttttgcccctgtgggcaagggtgaacttgtctgtcctaccgagtacgcgttcaattcgttttacggaccgtttcaagggcgagttgccgtcatagacgaattccgtacactaagatctggcacaaggacagcaccaccgtcctccagagtgtgcagtccgaaaaagaagggcgcacggttcgaggcttgctatggtgcagttccaccatggagaacagcaagttgtttgtaaaccgtgacctaaatgcagccattaacatccacaattgctttacaatgtacccaacccgccccggaattcttgcgaggccaaagaaatattgcaaactggaagttgtggtaggacgcacaattgattacaagctgacaggttctttacagaacgcagtgtcgagcgaagtgtagaagataaacacatacaagaggattttgggggactcggcatattatgtaacataattcccttgtccgagtgtaaaggggaactaaacaatgtttagtaaatttgtgtgtttttgtgtttccgtgttttgaatgagccaccgcatcttacgcaatcgcattcacggtaggtccgtaggactgtcatccaaagaaaaccgaatggtcccaagcaggcttctgctggacaataagtgggtatttacatggaatcgttttcaccccatatatttgtttctgaagggggagcgcgggcagattggattcattttgatgactcgcgtacaccattcactgtaacgcttgggcttctcactgtaacacttgggcttctcaccttacatcaggcagaggcccctgtaggaaaacctgttatcgttaaaactactggtgggtgggtacaccacagtttgttgatggtagttttttcagatggtaggaaagagttcgttgtgaagaaaggatctgtgaagaagacggacttcgttgcatttattgaatcattgagtttgtgcaataactcagtagtaataatggacaatgccagtatccataagaaattggtcctcagtcaccccgtcaatatttgttacacctccttacagtccagaattcaatgctattgagctatgcttcgctaaggtgaagagagactttcgtcgtttgaactacataccgaatgaaacaaagacgcacgtgtctgatatgatttccttagcattcggcaacctcactgataaaattattatgggttgttttgaacacgtttggaacacttatgtgtataaagcggtatgtgacgtattgattatgaaagatggcgacgaaacctctgacagtcgcgaaattgaaggagctactgaaattggctgaagtaccatactcgtcgaagtccaacaaggacgatcttgtccgtttatgcgaagacaatggtctcatcgccagaccccctccagaatacaagacggtggaaaagatgtatgtcgtgaaatgcgccctgaagaaggcaatgagtcttgacgatgaagaattcggtaagtttagggagcatgtggaccagctcgtcaatgtggtgagccgcatgttacggcggtccagtctggtgctgactttccacatcacgagtctattagagaaaggtctggatattccagacctgtacaacatgaaagatacctactggaaggattggctccgtatcggggtagacggaatcttccctgatgaggaaagcaagatatcgtacgaagctgtgaaggactccatcggcgatgtaattggtaatgacgacgctgactacatcaagtcttatccgatctatttcgatcaggtattgaactatgcaggtcacacattgagcactgtcgtgtcaaacaacgcatgggttcctttgataccacgtctggccagactcacttccaccactttaaataaattaaatgccccgaagacgctggacacatcgaagatcattcggggatacgacgtgatgcaggctattcagcaagaagtccaaaacatggagggatggccagagtctgttcaagagtacgtcaatgaagttagggagatgctgagtgttccagatggaagtcgagtttatgataactatggcaaagacatggactttccgaccatggtccggtttaattattggatacagacacggttggaggatatggatgcacgtcgtatccgattgatgcccatcttcaatgtccaacgggtgcatgttcgccttgacctgaagaccctcgtgaacctgttcaggcacatgttccccaatgaccagaacatcgttgagctttccaagtgggaacatgtaaagaaccccgacagcttcatgttgccccagaggcctgcacagaagaagaaaaaatcatgtggtcctggtgaatgggaggcatacaagtcggtcctgaagcagtacgatgatgatattaaggatatcaaggctactgacgagtacagacatgcaaagggtttgtatgacacgcttgtgaacgcccgaaaaacagtcgcaggttccttcttcagaaaaccaccggtcaagaatgggtgggttttcgactgcagcatctgtactgacggagtctccttgagcatgcagtacagcaagacagtacaggtccttgtctcagatctgaagaagacctgcaagaagcctcgtaaagaagaaggtatcaagatcgcagaaaaatacaacggctcacttaaaacgatattgcccgatatgggtatcgtcgtcctgggtgtggacccaggacggagcaacatcgctacggtaacgtatttggcagacgataaaaataagacatggacgctgacacgtggtgcattttaccacaagtcgggtatcaagaagcagacaaggcagaaggaactgcgttttgctgacatgattcctatgtgggagtctctgcgtgaaaatggagcagctttgagtacatcgaggacggataagatctccgcgtacttgtcaaattacgctaagttttctgacgagtggtggagattggctttgcgacgccgagaatcccgtgacaacttgcagcgttacatcggaaaacgaaaggtcaaagactctttctgggcgggtatcaagcggtgcatgatgaaagaacttcctgatatgaaggtttgcgtggcctacggatctgccatcacgaaactgaagcctactggaccaggagaagttgcagttcccactggggccatgttcgcatcgtgtaaaagaattttcaaagaggacgtttctgtgacagatgagttcaaaacgactcttatgtcgtgggagacgggtaaagaaaaagaacgtgtttacaagatcccaagtgtttgttcagcagacgtgaagcttaggttgggtggtgaacgttttggtcacacgaaatcgaaaacgatgccaaaggtcgctgattgcgaccacttaggggtaaggttgtacaataaacgtaaaggcgcacaagataagcacaggaggggtaacttcgccacttcccttgtcgattctcaaaaatcgatcgagcggtacccagaggtacgaggactgcgtctctctctagaaacatgcattatttggaccgggatcgctcttctgctctcacaatcgcaaggctgcactgcatggaattgatgggtctaggacgacctcttccatttgcccacagcagctctgttgttgttgatgaataaaaactcgtattgttgtagacaccactcggtccccctccggtggtcgcgacaacattaggttacaccgcaaggtgtgccgtacacgaagctgtttcatttaagtattccgttgattgtaggaagtataagcagactaagtatcacggacttgggatatatgaacataaagtactggtcactctaaataattcggtacaagtggtgtgggaagacgatttattgtgattctgatgctctttgaatcatacgggacatcgcatgttttgcatggcagccaatggccccaaatagcaatggggtactcaaagaacagtagtagcaatggggtactcaaagaacagtagtagtagtaagactcaatgcggctttaatcgacgacaagtgtttcgtgtgcgtttctaaaaaacgagtctaaacaacgcaacatacatacctgataaaaaccattgagcgattgcgcgaagaaaaagagtattcatcgacgcgatgccgaacgatatatatatcccgccttgtcagcccatttcaaaaccagtccgcaaactaggaaaggcgttgtcgctggacatggacagtcttggcacaaccaagtttcttaatcgcctccactgccagaatgtcagccgtctccatgcactgcgggcgtcatcggctgtttccggtgatccacgcatcttgtagtatgacgcattgcttcaccttattaaacaaagacaccacacatccccaccgtcacgtttgttcctcgtcgctgtggagtacttcttcgatgacggctgctacaagatcgccaacggaagcgcccttgtattctcacatgctatcaacacccttttcgttgtggagccgaaaatcctcaaccccccccctgcccattatggacatgccaaggtgtcgaaagccatacagcaggccactatgggagcgactagacttttgtcctggctaccgcatctcataaacatggacctgaaagacggaacctcacttggatatgtaaaaaattctcgtatgatcgtgacagctgtgaatcgcggtggacgcgtcttctgtcaagatatccacagccaggaaatttactaagaattggaggaggaagacccatataaaggtggaactttggcaaaattgtggagttgccgagaatcgaacccggctctgttggtatcggacaccatgagattgacgggaaagaagaacaacccagacgtagacaacccctcctgaacgactctctaacttgagacatgagcaccaaggaatcaaaaatccgctccataccatgtttcgcaaccagtgaaaatcggccgggaggcaggaacgcccattttatgtaaaatctacttcccatacagctagggacatttgatattgggacaccttctattttggggattcaagatttgtaaccgatcttgtcaatacagatactgtcttcaggtgattgacacaaaaaattcaaggcatctaaagacactgaatttacatgttcaaagtaccctgaaaagtcaaactgatggctaacatcgtgcgcatcaataatcctttagcagaaacggcagcaattagtgtcaatttggacattcgcaatgtcctagaaattttgatatttaaaccccaggatctgacttgtccatcggaggacacacgcaaacggcggaacactgtcgaatgtatcggacaccgaatggcacacgcaaacggcggaacactgtcgaatgtataggaggacacaagaggccgaacacggtcgaatggcacacgcaggccctcattgacacacgcaaacggcggaacacgtttaaaatagggattgatgtgagcctccggcattcttcagtatttatttgtgttcaaataattgttgttcccgagatggagagtcttttcagaggtgttcatgtgaaaaaaacaccccctcgaatgaagtgtaaacaaccattcttcagtataaacaaccatcagcacagcacacttcacaaacgaatgagttcctttgacgaaatcaatgaagatgtattggagatcattctagccaatgcgatttcgaacgaatcccacctcaaacaagtgcctctcgtttgcaaacagtggagatgcgccgcaccccggtgtgtcacaaggatccacttaagacattataacattttgctttgtgggtgctttttctttttgtttaaagcacagagtctcatacaccctcgcggtgtcaagtagactttaacatgtaatgtaatgtaatgtaatgtaatgtaataacagtttggaatacgcattatcacgcatttgcaggctcaaagagttgaaaataggtgtcaatcggggggaatacgtaccctaccaatcaatatcggctatcgaagacaagatccaagacatatcgccgctgtccgtcctcactgcgttggttcacctggacatatcgaacacctacgtgaccgacatatcgccactgtacggactcacttcgttgacgcacctgaacatgtcgcacacctacgtggacgaagacctattatcacctctgtccggactcacttcgttgacgcatctgaacatgtcgcacacacctctgtacaacatacaagctctgtacggactcacttcgttgattcacctgaacatggcgcacacacttgtgaccgacatatcaccactggccgccctcacttctttgattcacctagacatttctctatcacagctttccggactcaccgcgttggttcatctgaacatggcgtacacacgggacctattatcaccgctggcaggactcacttcgttgattcacctgaacatggcgtccacacgtgtggacgacatatcaccactggcaggactcactccattggtgcacctcgacatttcgaacaccgacgtgtacgacatatcaccgctttccggcctcacttcgttgattcacctgaacatgtcgtccacacgtgtggacgacatatcaccgctggcaggactcacttcgttggttcacctggacaattcgaacaccgacgtggacgacatatcaccgctggcaggactcacttcgttgacgtacttgaaaaatggatggaatgatgtgtaaaattgttcaacgggtcatccttagtaatattattgttcattttccgttttaaaaatagggattgatttgagcctccggcattcaatgggcgttcctgcctcccggccgattttgactggttgctaaacattgtatggagcggaattgtgattccttggtgcttatgtctcaaatcattgttgttccagagatggagagtcttttcagaggtgttcatgtggtaagggccataaactgagccgtctactgcgattcttaggccaaacggttatgggcttgtgaatataatccggtagtatccatgtcagttgtgttgatgattcattcagatacctacaaaaccgcggggaggcagatgtgatgcagggaatgtattcagttcagcaaactgtgcgtcaatgatgagatggcatgccttccatgcacacctgaggcagcgacacatcgttgcaaagtgctcgcagttgttaaatgcggcgttgtagacaaatggggtttgctcagcatctttgaccagagcgagggcaagacttgccgagagggtctgatccagagcagtcccttcggggtacaaagcctccgcaaagatagagccgttggcaacgaagtcttcgtaggatcgcaatgagacgttggcctgctccttagaaattccccacacatcaacgactgtcgggacttcgatatcccctggtgccaccacttgctgcccgacaaagatgccatggtgcctgtaaccggatgcgtctttgaccatgatctgggcgccaggcttaagcttgccgaacatagcatagccgctcttgtacggcgtcagggtagcatatgggtgcccgaggtctgggggtgaccaatctggaagtattcgcttgatgtgggcgattgccgatgtgaggatgtcggtaaggggatcttcccgagatgccatgtttgtctcaaattgagctgctgactcgtgttaagcttcgagatagataattatatagggatcttttttatgcgaacgtcattttctcattgcaacaccgggggggacatgggttttaattcaagacttttattgattgggtataaggatacctggtacagatgggatttttaaatgaggaatccgtattgtcgaagccgacagtgtgtgtgcttacagggttcaatactgtccaagacgcatttaagattgtccctcacaaacacattccatttgtcatactttgtgtgcataatgggcatttagcatatgcatttgatgacattgaggaggtgcgcattgagccagattttgtgttattgaatgcccttggtctaaaacatcgtgttttgtgttctgtgacaggtttacagatcttactcccaattataggtcgtgcgtgagccacgtcatctgcgcatcaacaagttgcgatgttgttgtaccccattgcaatgatttgctatggctggatttggagagaatgcaatttgcgtttttgttctagattgtgacaaattttccaggaagatcgtcttatctgatcataattgtgaagacagccaaacactacatcacagtcgacgacaacttaaactcacacacgcgtagcggcggctgctgtcgaatggcacacacaggacactcattgacactcattgacactcattgacacacgcaaacatgtagacgaatcctcttcatacagtcgacggaatactaaaatgaaaccgcctcgtgtacggcacaccttacggtgtaaccaaatggtgtagcaacccacggggcagtggaacaccaatacgattttttacaaattgcaggatgttaacgagaatatcgtggttcttttttagatcacggctctccatcctgcagactccgtatcgttcttttgtcggtactttcgagagtgtccattgaaggaccagccgcacttaagcgatcgactcttccccggtaccgtggcccaaaagaacacggggtctttgttgatgtgcaatgcgtcatgaaaggaggtttctttgctggacgggccattttgtaggaccatccactcgtacactataatttctgtcgacgccttataccgtttattgggatgtttcattttactgttccgccgactgtagtaccattccctattaatccaattatcatgtacaactccatgacgcaatggatcaaccccatgcccgccttccaatccctctctgcaacagagcgacatggccacttggctgaatgacgatattgcaccaagtctatatcgtgatcacagcattgctctcctctctgttgaagtctgtcatgcaatgcgtgtgaaggacttgcagggcagtctgaagcaccgatttctccgttgagttgatgacccacctttgtgcaatcacaagcgcaaataaaatcatacctgttgttgttgtttcgcagcatggctacggcagcttcaacagccgcatgcgccacccgcactgcctcatcagctcgctcagcagtttggacaagtgcagccaatgcagcattcttgtgtggccctccgtcggcgatgatgatgcctagctgagctggtgatgcattagtgaagtccatgcttccatgaaaaaatgaaagcagtgacaaataagatactgtgtacacaattataggctttaagtaataccgcgataaaatagggttgtcaagcagctaacaaaccagaattcgcccccgtacagacagttttagtatagatccgaattagatttgtgttagatacgtgtgcgtcggtatcacactgtgcgcgacactcgatgcggtgagatgagaaaacccgaattcaggccaaattcccatgaacacgacgtccccttttgtgtgcggatccgccaaccttggtagctgtatgtggacaagacgacctcgccgtcgcttagcggattcagctaaatgcagcccctgcatcaacaatcaccggcacatccctttcggggaatatcgcatctcttcgatattgcgtcccatgatttggtcgccttgccatatttcacgccttcattcgagcaatggacggcaccgcatcgcgcggtgcttgcgtgtttatcgaacgagctcttattgcatcttattcctattcagcacatttgcggccagctggaattcatacttggcttttaaattgtttaggcattgcaagccacatgagtctttgtattcactaagttgtataattatcccatcgccatcagatgggatactgaatggatgtgaaactgctacaattaaccgtgttccagttttgacatgcagtgatatagcatattgtattagactgtctgtcgaatcgaaaatgacgttgtccaaaactataatcttaaacccgattaggctatccagggtgtctcgcatgcttacaattgcaattggggaatgcagtttatgatgatttacgtcatggtctgtctcacaaaccaccaaagtggattcaccatcccctatttcgtttgtgatcatgaagctctttccagcctgcctacgcccaacaatatacatcacatcagtaagcacacacactgtctgctgcgacaatacggatgcctcatttacagaagcgttggttgcattctgcaaattcattatacactgttaggtttacatattttcggaaagcaaacgagtcaattgttgcaaccctttgacaccatgtgtgggtcagcacagagagtattgcatgcattgtggggcacaacgcgcaccgcgtctattcatgagtgcacgagcaagaatcacgcacttgaggttctcgatctcttcgtcctgcttggaaaccaagctcagcgcattgttcagtagacgatgttgctcctccgtctgagccagtagcgttttgtaagctcgctgaacagcgtcagtacgcacgcgctctgcagccacggcatcagccacggcaacagccacggcatcatcgagttgggctttcgtgtacatttcggccatgatcagtcactgcacatgaattgccttgtctagggctgggtctctatactattctacagtcggcagaacagtaaaatgaaacatcaaaaaaccggtataatgcggtgacaataatgagttttagctgctttgttgtgctggactgcacagcccccctcctcttcagctcctagtactgtgctggactgcatagttgtctgaagcttccctggcgagcctctctgtctctgtgctcctccctcgtagccctcctcagatcagaagcacttccgtcagcgcgatcaatgtccaaggcaagcatcgtccgcgagtggacccgcccggatggctccaaatgcgtaggcggcagcgaggacaatgccaaagcaccccaggatcgctcatgctttacaacagcttactggatgagaaagttccattcgtcccagcttctgggccgggtagcaagagtctctcctggtacacctgcgggcccactgtttacgatgtttcgcacatggggcatgctaggaactacgtcacgtttgatattatccgccgagtgctggaggactactttgggtacaacattctctacgtcatgaatgttacagatgttgacgacaaaatcatcctccgcgctcgccgcaactacctactagcaaagtacaaggaaggaaagcacacggacgctgaggtaaaagctttcgctgagaaggctgtccagaactgctttgcaaagcagagcgcaaagctcgcagaagcggaggccttggtggtcgcagccaaggaagagcaggaggctgctgcagctgacaaaaaggggggccttcagcgacaactgaacgagctggagggtgctattaaaaacgaggcccacaagctaagtcagattcagacagccctgagcgcgttaggacaggctggcgattcagctactatctacgcggttgcctcggattttgtagctgaggagctggacagggagcaaggcaagagcgtgacggattcatcaatctttagggcgcatgctgccaagtatgaggcggagttcactcaagatatggattccttgggtgtgcgctgcccagatgtgctcacccgtgttagcgagtacatggacgagattgtggactacgtcaagaaaattgtagacaatggcattgcctatgagagcaatggaagtgtctacttcgatacaacgaatttcagggcgtgtggccacacctacggcaagctcaagccttgggctgtgggatctgctgcactagcagccgagggggagtccaacttcgagacatcagagaagcgctctaacactgactttgccttgtggaaggcgtcgaagcctggggagcccttctgggagtctccttggggccaggggcggcctggctggcatatcgagtgcagtgccatggctagcaccctgatcggatcccgcatggacatccacaccggtggggatgacctgaggttcccacaccatgacaacgaactggcacaagctgaggcattctaccataacgagggctgccaccagtgggttaactacttcctccactctggccacttggagattgaagggctgaagatgtccaagtcactgaagaacttcatcaccatgagggaggctctgaagtcattctctgctcgccaattgcgtctcttgtttgtgctgcagtcttggaacaagtccatggtgtatggagaggcctccagggccgaaatgaaggctcgggaagcgcagctgaaaaactttttccagaacattgaggttgctgtgcgcggggtggacgaaatcacctcctgtgctaaatggcaggcagaggagagggacctgtctcaaaagctgcaggcagtacagaatcaggtgcatgagcacttgcttgacaacatgaacaccgcagctgtgatggacaccctcagcgagctcatcaagagcaccaacatctacctttccaagaagcgagagtctgcgtctgcagctgccccggcccagccctttctcctacgcaaggtgtccacctatgtgaccaggatgctgtccatgtttggtattgtcgatgcatcctgggacaagcctggctttgctgacgccgcaggcggggctggggatgccaagggtgcaggctacctggatgcctttgctgcattccgtgatgaggtgcgatcactttcccgcacccaggctgatcccaaggagaccatgacagcttgcgaccgtgtgcgtgatgtggcccttgtggagcttggtgttcgattggaagaccgaccagatggcaaggccatttggaagctagacgacccagcagttataaatgctgagcagcaggagcgagctaagacagcatctgaggctaggtcgttcatccatgggggcgtacagtcaacggaatactaaaatgaaaccgcttcgtgtaggcacaccttaccaatagtgtctttagatgcggttacaaatcttgaattggtcaacttttcagaatccccaaaatatcaaatgtccctagctgtatgtgtacatcgatcgagtgtaatgtactgtactgtacctgtgaattccccccctccgtttgcgtgcgtgtctcttgttctcctgacgtcgtcggcgtcttgctccctcccccccatacatcatccgcgtgttccatgcgtcgcgtgtgtgtgtgtaaatcagtagtgtgtctgctggttgatgtgacttgtgggctcccatccggtcgcccacccgctcggttcctcgcggactcctttgtgggggctcccctccggtcgcccccggtcgctccgctgtggggaataggtgaaaggggctccgccacttgttaaatgtggtacgttggcgacatatatcacttgacaagcagttttgaggttggttgcttgaggatgagaacaaagtaaggcaaattgtgtctgatgagaacaa

SEQ ID NO: 204 - DNA, 21929 bp, unidentified
  source 1..21929: mol_type = other DNA
  misc_feature 1..21929: note = Fanzor polypeptide
ggcgtacaattgagggcgaaccaaaatgaaaacaagcttctccatgtggctgccaaggaaggtcacgcagatgtctgcaagctgctgatggatccagcggtggctggaattgagttcagggccagggcgaaccatatcaatagcatggccttgtgggcggcggccaaggaaggtcacgcagatgtctgcaagctgctgatggatccaacagtggctggaattgagttcagggcccgggcgaaccatatgaacagcagggccttgatggcggctgcaaaggcaggtcactcagatgtctgcaagctgctcatggatccaacagtggctggaattgagttcagggcccgggcgaactatagctacagctttgccttgttggaggctgccaatgaaggtcacgcagatgtctgcaagctgctgatggatccagcggtggctggactggagttcagggccagggcgaactctagcgacagcttggccttgcgtgaggctgcacacgaaggtcacgccgatgtgtgcaagttgctgatggatccagaggtgactggactggagttcagggcccaggcgaacgctagcgacagctgggcattgtggctggctgcaaaggaaggtcacgcagatgtctgcaagctgctcatggatccagaggtggctggacttgagttcagagccgtggcgaactctagagacagcagggccttgtggtcggctgcaaaggaaggtcacgcagatgtctgcaagctgcttatggatccagaggtgactggaattgagttcagggtccgagcgaacaatgacaacagccgggccttgtcggcggctgcctatgcaggtcacgcagatgtctgcaagctgcttatggatccaggggtggctggacttgagtacagggccagggcgaactctaacgacagcagggctttgtgggcggctgcaaaggaaggtcacgcagatgtctgcaagttgctgatggatccagcggtggctggaatggagtacagggccagggcgaactctagcgacagcagggccttgttgtatgctgccaaggcaggtcacgcagatgtctgcaagatgctgatggatccagcagtggctggaattgagtatatggccctggcgaattctgacaacagcagtgcattgtgggcggctgccaatgaaggtcacgcagatgtctgcaagatgctgatggatccagaggtggctggaattgagtacagggccctggcgaactctagatatagccgggctttgtgggccgctgccaatgaaggtcacgcagatgtctgcaagctgctcatggatccagatgtgtctggactcaagttcagggccagggcgaactctagcgacagctgggcattgtgggcggctgccaaggcaggtcacgccgatgtctgcaagctgctgatggatccagcggtggctggaattgagttcagggctagcgcgaactctagcgacagcatggccttgtgggcggctgccaaggcaggtcacgcagatgtctgcaagctgctcatggatcctgtggtggctggacttgagtatagggcccgggcgaacgctagcgacagctgggccttgcgtgaggctgcgaagaccggtcatgcagatgtctgcaagctgctcatggatccagaggtggctgggcttgagtacagggccctggcgaactctagcgacagctgggcattgtgtgaggctgccagtggaggtcacgcagatgtctgcaagctgctgatggatacagcagtggctggactcaagtacagggccagggcgaactctagctacagccgggccttgtggttggctgccaaggcaggtcacgcagatgtctgcaagctgcctatggatccagcagtggctggactcaagtacagggccagggcgaactctagcgacagcagggccttgggggcggcttcgaatgccggtcacgcagatgtctgcaagctgctgatggatccagcagtggctggactcaagtacagggcccgggcgaacgctagcgatagctgggtcttgccaccgtagagcaagtatttatccactctcctcaaactttacagaaatgtgtattctgtttgctcaagcgaatatattccagatgtagcataaatatttgattatgaggcatgaacgctttgaaaatgattattgatgcgcacgatgtgagccagcacgttgacttttcaggctactttgaagatgtaacttctgtgtctttacagtccttgaatgttttgcatttgttactgcctcccggagggattttgactgatttcggagccttgtctggtcggaatctcaattcctcggagagctaaatctctagttggcgagtacggctctaactaaaattcgccgggaggcaggaaccgcttgaagataccgacatgcaagtgcaacccatggtttataccatcctgtgcgcttgcatgcattaacatcaaacatgcagtcgcacacgcgatcatcgtttccactccttacgtgtccccatgacatacctcttgcagataccgccaggcaagtgccgcttacagcttaacgccaggcaagtgcaaccaagggtttatagggtttatcccaactcattgtttatttataccatcctgtacacacatgttcatcgaacatgaattcgcacacgcgatcatcgtttccactccttacgtgtccccatgacattcttgatcgtattgccctattatcttccaacccaaagattgtattagtgtgtaaaactctgcgcaacagattttcaggattgccccttaccggactgatccaaccaccacagcgagttggagagatgatggcgaaaggggggcgcgccgaccttctagcagtatgcttggtgtccaatcctcttgtacaggttaatggcgtacaattgagggcgaaccaaaatgaaaacaagcttctctatgtggctgccatggcaggtcaagcagatgtctgcaagttgctgatggatccagaggtggctggacttgagtacagggccgtggcgaactctagcaacagcagggccttgttggatactgccagtggaggtcacgcagatgtctgcaagctgctaatggatccagcggtggctggacttgagttcagggccagggcgaactctagcaacagcagggccttgttggatactgccagtgaaggtcacgcagatgtctgcaagctgctaatggatccagaggtggctggaattgagttcagggccagggcgaacactttcgacagcagggcattgtgggcggctgccaaggcaggtcacgcagatgtctgcaagctgctgatggatccagcagtggctggactcgagttcagggccctggcgaactctagcgacagccgggccttgtgggcggctgccaaggcaggtcacgcagatgtctgcaagctgctgatggatccagcagtggctggaattgagttcagggcccgggcgaactctagcgacagcagggccttggtggcggctgccaaggcaggtcacgcagatgtctgcaagctgctcatggatccagcggtggctggacttgagttcagggccagggcgaactctagcgacagctgggcattgtgggtggctgccaaggcaggtcacgcagatgtctgcaagctgctcatggatccagtggtggctggacttgagttcagggccctggcgaactcatgcgacagctgggctttgcgtgatgcggcaaaggaaggtcacgcagatgtctgcaagctgctgatggatccagtggtggctggacttgagttcagggccagggcgaattctagagacagcagggcattgtggctgtctgccaaggcaggtcacgcagatgtctgcaggctgctgatggatccagatgtggctggacttgagttcagagccttggcgaactctagagacagttgggcattgtggctggctgcccatgcaggtcacgcagatgtctgcaagatgcttatggatccagcagtggctggacttgagttcagggcccgggcgaacgctagcgacagctgggccttgtgtgaggcttccaaggcaggtcacgcagatgtctgcaagctgctgatggatccagcggtggctggacttgagttcagggcccgggcgaactctagcgacaacagggccttggtggcggctgccaaggcaggtcacgcagatgtctgcaagctgctcatggatccagaggtggctggaattgagttcagggccagggcgaactgtaacgacagcagggccttgtgggcggcggccaaggaaggtcacgcagatgtctgcaagctgctcatggatccagatgtggctggacttcagtacagggcaagggcgaaccatatcaatagcatggccttgtgggcggcggccaaggcaggtcacgcagatgtctgcaagctgctcatggatccagaggtggctggacttgagttcagggcccgggcaaactctagaaatagcaggtcattgggggcagctgccaaggaaggtcacgcagatgtctgcaagctgctgaaggatccagaggcggctggccccgagtacagggcccttgcgaactatagcgacagcagggccttgtgtgaggcttccaaggcaggtcactcagatgtctgcaagcagctgatggatccagcggtggctggaattgagttcagggcccgggcgaactcaagcgacagcaaggccttgtgtgaggcttccaaggaaggtcacgctgatgtctgcaagctgctgatggatccagaggtggctggacttgagttcagggcccgggcgaacgctagcgacagctgggccttgtgtgaggcttccaaggcaggtcacgcagatgtctgcaagctgctgatggatccagcggtggctggacttgagtacagggcccgggcgaactctgtcaccagcagggcattgggggcggctgcaaatgccggtcacgccgatgtctgcaagctgctaatggatccagaggcggctggccccgagtacagggccattgtgaatcttgacagcagctgggtcttgccaccgtagagcacaagtatttatccactctcctcaaacttttcagaaatgtgttcagtttgctcaagcgaaaatatcgctgcatgtgcccaataattccagatgtagcagaaatatttgaaatatccactcgtacactataatgtctgtcgacgccttataccgtttattgggatgtttcattttactgttccgccgactgtagtagctgcctaatataaggcttgaaggcccagaggaatagacacatcgaacatgcagtcgcacacgcgatcatcgtttccactccttgtgtgtccccatgacattcttgatcgtattgccctattctcttccaaccccaagattgtattagtgtgtaaaactctgcacaacagattttctggatggccccttaccggactgatccaaccaccacagcgagttggagagatgatggcgaaagggggtcgcgccgaccttctagaagtatgcttggtgtccaatcctcttgtacaggttaatggcgtacaattgagggcgaaccaaaatgaaaacaaacttctctatgtggctgccaaggaaggccacgcagatgtctgcaagatgctgatggatccagaggtggctggaattgagtacagggccctggcgaactctagatatagccgggctttgtgggccgctgcatatgaaggtcacgcagatgtctgcaagctgctcatggatccagaggtggctggacttgagttcagggccagggcgaactctagcgacagctgggcattgtgggcggctgccaaggcaggtcacgcagatgtctgcaagctgttgatggatccagtggtggctggaattgagttcagggccctggcgaactctagcgacagcggggccttacgtgtggctgccaaggcaggtcacgcagatgtctgcaagctgctcatggatcctgtggtggctggaattgaattcagagccctggcgaactctagcgacagcagggccttgtgggaggctgccaatgaaggtcacgcagatgtctgcaggctgctgatggatccagatgtggctggacttgagttcagagccttggcgaactctagagacagctgggccttgtgggaggctgcaagggaaggtcacgcagatgtctgcaagctgctcatggatccagatgtggctggacttgagttcagggcccaggcgaactctgtcaacagcttggccttgtatgcggctgcacatgcaggtcacgcagatgtctgcaagctgctgatggatccagaggtggctggacttgagtacagggcccgggcgaacaatgacaacagcagggccttgcgggaggctgcacaggaaggtcacgcagatgtctgcaagctgctcacggatccagaggtggctggaatcgagttcagggccagggcgaactctagcgacagcagggccttgtgtgaggcttccaaggcaggtcacgctgatgtctgcaagctgctgatggatccagaggtggctggaattgagttcagggccagggcgaacgctagcgacagctgggcattgcgtgaggctgccaaggcaggttacgcagatgtatgcaagctgctgatggatccagcggtggctggactcgagtacagggccagggcgaactctagcgacagcagggtcttgtgggcggctgcagaggaaggtcacgcagatgtctgcaagctgctcatggatccagcggtggctggaattgagttcagggccctggcgaactctagcgacagctgggcattgtggctggctgccaaggaaggtcacgcagatgtctgcaagctgctgatggatccagcagtggctggacttgagttcagggcccttgcgaactctagcgacaactgggccttgcgtgaggctgccaaggaaggtcacgcagatgtctgcaatctgctgatggatccagcggtggctggacttgagttcagagcccgggcgaattctagagacagcaggggcttggggtcggcggccaatgcaggccactcagatgtatgcaagctgctcatggatccagaggtggctggacttgagttcagggcccgggcgaactctagcgacagctgggcattgtgggcggctgccaaagaaggccacgcagatgtctgcaagctgctgatggatccagcagtggccggactcaagtacagggccagggcgaaccatatgaacagcatggccttgagggcggcttccaaggcaggtcacgcagatgtctgcgtgctgctgatggatccagaggtggctggaattgagttcagggcccgggcgaactctagagacagcagggctttgtggctggctgccaaggaaggtcacgcagatgtctgcaagctgctgatggatccagcagtggctggacttgagtgcagggcccgggcgaacgctagcgacagctgggcattgcgtgaggctgccaaggcaggttacgcagatgtctgcaagctgctcatggacccagaggtggctggactcgagtacagggccagggcgaacactttcgacagcagggccttggggtcggctgccaaagaaggtcacgcagatgtatgcaagctgcttatggatccagatgtggctggacttaagtatagggcccgggcgaactctagcgacagcagggccttgggaacggctgcgaaggccggtcacaccgatgtctgcttgcttttgatggatccagcggtggctggaattgagttcagggccctggcgaactctgtcaacagctgggccttgcgtgaggctgcaaagtctggtcacgcagatgtctgcaagctgctcatggatccagatgcggctggccccgagtacagggccattgtgaatcttgacagcagctaggtcttgtgttaggcagattcctgaagacaatatctgttgtattgacaagatcggttacaaaactttatgaaacttaaattccttaatgtaagaaagacaatttgcacctgcgtcccgtagggattttgaccggtttcggacccttgtctggtcggaatcgcaattcctcggagagctaaatctctggttggcgagtgagtgagtcgttcgtacggctctaacttctgctttgaaaattcaaaagaatcgccgggaggcaggaacacccattaaataccgcttgcagataccgccaggaaaagtgcctcttgcatgccaggaaagtgaaacccagggtttatagggtttatagggtttatcccaactcagtatttatttataccatcctgtgcgattgcatgcatgaacatcgaaaatgcagtcgcacacgcgatcatcgtttccactccttatgtgtccccatgacattcttaatcgtattgccgtattctcttccaacccaaagattgtattagtgtgtaaaactctgcgcaacagattttcaggattgccccttgcccgactgatccaaccaccacatagagttggagagatgatggcgaaaggggggcgcgccgaccttctagcagtatgcttggtgtccaatcctcttgtacaagttgatggggtcctacaattgagggcgaaccaacataaaaacaatattctctatgtggctgccaatgaaggtcacgaagatgtctgcaagctgctgatggatccagaggtggctggaattgagttcagggccagggcgaactctagtgacagcatggccttgtgggcggctgccaaggctggtcacgcagatgtctgcaagctgctcatggatccagaggtggccggacttgatttcagggccagggcgaactctagagaaagctgggccttgtgtgaggctgccaatgaaggtcacgcagatgtctgcaagctgctcatggatccagaggtggctggaattgagttcagggcccgggcgaactctagatacagcagggccttgggggcggctgcccatgcaggtcacgcagatgtctgcaagatgctgatggatccagcggtggctggacttgagttcagggccagggcgaattctgacaacagcagtgccttgtgggcggctgcaacgaaaggtcacgcagatgtttgcaagctgctcatggatcaagaggtggctggaattgagttcagggccagggcgaactctgtcgacagcagggccttggggggggctgcaacgaaaggtctcgcagatgtctgcaagctgctcatggatctagcggtggctggacttgagttcagggcccaggcgaactctcacgacagcagggccttgggggcggctgcaacaaaaggtcacgcagatgtatgcaatctgctgatggatccagcggtggctggacttgagtacagggccagggcgaactctatagacagcagggccttgtgtgaggctgccaatgcaggtcacgcagatgtctgcaagctgctgatggatccagatgtggctggactcaagttcagggccagggcgaactctagagacagcagggccttgggggcggctgccaaggcaggtcacgcagatgtctgcaagatgctgatggatccagaggtggctggacttgagttcagggcccgggcggactctaacgacagcagggcattgtgggaggctgcaagggaaggtcacgcagatgtctgcaagctgctgatggatccagaggtggctggacttgagttcagggcccgggcggactctaacgacagcagggcattgtgggaggctgcaaaggaaggtcacgcagatgtctgcaagctgctgatggatctacagttggcggaacagtaaaatgaaacatatatcagatggaaatgtacgatagaaaattggcgttaagaatggtcgctgacttgggtgtgttaaaaacttctgtgtttacgaatgaatgaatcgatacaaagacgcacgtgtctgatatgatttccttagcattcagcaacctcactgataaaatcattatgggttgttttgaccacgtatggaacacgtatgtgatgtttgtataaagagttctgtgatgtataaattatgtaagatggcaacgaaacctccgacagtcgcgaaattgaaggagctactaaaattggccgaagtagcatactcatcaaaggacaagaaggacgatattgtccgtttatgcgaagacaatggtctcatcgccagaccccctccagaatacaagacggtggaaaagatgtgtgtcgtgaaatgcgccctgaagaaggcaatgagtcttgacgatgaagaattcggtaagtttagggagcatgtggaccagctcgtcaatgtggtgagccgcatgttacggcggtccagtcttgtgctgactttccacatcacgagtctattagagaaaggtctggatattccagacctgtacaacatgaaagatacctactggaaggattggctccgtatcggggtagacggaatcttccctgatgaggaaagcaagatatcgtacgaagctgtgaaggactccatcggcgatgtaattggtaatgacgacgctgactacatcaagtcttatccgatctatttcgatcaggtattgaactatgcaggtcacacattgagcactgtcgtgtcaaacaacgcatgggttcctttgataccacgtctggccagactcacttccaccactttaaataaattaaatgccccgaagacgctggacacatcgaagatcattcggggatacgacgtgatgcaggctattcagcaagaagtccaaaacatggagggatggccagagtctgttcaagagtacgtcaatgaagttagggagatgctgagtgttccagatggaagtcgagtttatgataactatggcaaagacatggactttccgaccatggtccggtttaattattggatacagacacggttggaggatatggatgcacgtcgtatccgattgatgcccatcttcaatgtccaacgggtgcatgttcgccttgacctgaagaccctcgtgaacctgttcaggcacatgttccccaatgaccagaacatcgttgagctttccaagtgggaacatgtaaagaatcccgaaagcttcatgttgccccaaaggcctgcacagaagaagaaaaaatcatgtggtcctggtgaatgggaggcatacaagtcggtcctgaagcagtacgatgatgatgttaaggatatcaaggctactgacgagtacagacatgcaaagggtttgtatgacacgcttgtgaacgcccgaaaaacagtcgcaggttccttcttcagaaaaccacctgtcaagaatgggtgggttttcgactgcagcatctgtactgacggagtctctttgagcatgcagtacagcaagacagtacaggtccttgtctcagatctgaagaagacctgtaagaagcctcgtaaagaagaaggtatcaagatcgcagaaaaatacgacggctcacttaaaacgatattgcccgatatgggtatcgtcgtcctgggtgtggacccaggacggagcaacatcgctacggtaacgtatttggcagacgataaaaataagacatggacgctgacacgtggtgaattttaccacaagtcgggtatcaagaagcagacaaggcagaaggaactgcgttttgctaacatgattcctatgtgggagtctctgcgtgaaaatggagcagctttgagtacatcgaggacggataagatctcctcgtacttgtcaaattacgctaagttttctgacgagtggtggagattggctttgcgacgccgagaatcccgtgacaacttgcagcgttacatcggaaaacgaaaggtcaaagactctttctgggcgggtatcaagcggtgcatgatgaaaaaacttcctgatatgaaggtttgcgtggcctacggatctgccatcacgaaactgaagcctacttgaccgggagaagttgcagttcccactgggaccatgttcgcatcgtgtaaaagaattttcaaagaggacgtttctgtgacagatgagttcaaaacgactcttatgtcgtgggagacgggtaaagaaaaagaacgtgtttacaagatcccaagtgtttgttcagcagacgtgaagcttaggttgggtggtgaacgttttggtcacacgaaatcgaaaactatgccaaaggtcgctgattgcgaccacttaggggtaaggttgtacaataaacgtaaaggcgcacaagagaagcacaggaggggtggcttcgccacttcccttgtcgattctcaaaaatcgatcgagcggtacccagaggtacgaggactgcgattctctccagaaacatgcatttactcggaccgggatcgctcttctgctctcacaatcgcaaggctgcactgcatggaattgatgggtctaggacgacctcttccatttgcccacagcagctctgttgttgttgatgaataaaaactcgtattgttgtagacaccactcggtccccctccggtggtcgcgacaacattaggttacaccgcaaggtgtaccgtacactccgtcgagtgtagcggtgtctggactttagtatatggccattggggtaggttgccaatgaaggtcacgcagatgtctgcaagttgatgatggatccagcagtgaatggactcaatttcagggccattgtgaaacttgacacgtttctttcttgcaaccttagggcaagatgtagttacatcgaactctcctcaaacatttcagaaatgtgttcagtttgctcaagcggaaatatcgctgcgtgtgcccaataattccagatgtagcataaatatttacttaaagtaatagaaagatgtagttacatcgaacatgcagtcgcacacgcgatcatcgtttccactccttgcgtgtccccatgacattcttgatcgtattgcactattctcttccaacccaaagattgtattagtgtgtaaaactctgcataacagattttctggatggccccttaccggacagatccaaccaccacagagagttggagagatgatggcgaaaggggggcgcgccgaccttctagcagcatgcttggtgtccaatccacttgtacaagttgatggggccctacaattgagggcgaaccaaaatgaaaacaagcttctctatgtggctgccaatgaaggtcacgcagatgtctgcaagccgctgatggatccggaggtggctggaattgagttcagggccagggcgaaccatataaacagcatggtcttgtgggtggctgccaaggcaggtcacgcagatgtctgcatgctgctcatggatccagaggtggctggacttgagttcagagccctggcaaactctagaaacagcagggcattgggggcggctgccaaggaaggtcacgcagatgtctgcaagctgctcatggatccagatgtggctggaattgagttcagggccagggcgaaccattggaacagctgggccttgcgtgaggctgcctatgcaggtcacgcagatgtctgcaagatgctcatggatccagcagtggctggaattgagtacatggccctggcgaactctacgaacagcggggccttatgggaggctgccaaggcaggtcacgcagatgtctgcaagctgctcatggatccagtggtggctggacttgagtacatggcccaggcgaactctagagacagcatggccttgtgtgaggctgccaaggccggtcacgcagatgtctgcttgctgctcatggatccagcggtggctggaattgagtacagggccagggcgaactctagatacagcagggccttgggggcggctgctagagaaggtcacgcagatgtctgcaagctgcttatggatccagcggtggctggacttgagtatagggcccgggcgaacgatagcgacggctgggccttgtgtgaggcttccaaagcaggtcacaccgatgtctgcttgcttttgatggatccagcggttgctggacttgagtatagggccctggcgaactctagcgacagcagggccttgtgggaggctgccaatgaaggtcacgcagatgtctgcaagctgctgatggatccagctgtggttggacttgagtacagggccctggcgaagtctatcgacagcagggccttgtgtgcggctgccaaggaaggacacgaagatgtctgcaagctgctcatggatccagcggtggctggaattgagtacatggccctggcgaactctagagacagcagggcattgtgtgcggctgccaaggaaggtcacgcagatgtatgcaagctgctcatggatccagcggtggctggaattgagtacatagccagggcgaaccatataaacagcagagcattgttgctggctgccaaggaaggtcacgcagatgtctgcaagatgctcatggatccagaggtggctggaattgagtacatggccagggcgaaccatatcaacagcagggccttggtagcggctgccaaggcaggtcactcagatgtctgcttgctgctgatggatccagaggtggctggaattgagttcagggcccgggcgaactctgtcaacagcagggccttgggggaggctgccaaggcaggtcacgcaaatgtctgcaagctgctgatggatccagaggtggctggaattgagttcagggcccgggcgaattctagcgacagctgggccttgtgggctgctgccaaggcaagccacgcagatgtctgcaagctgctgatggatccagctgtggctggaattgagttcagggcccgggcgaactcttccaacagctgggcattgtgtgaggctgcaaaggaagggcacgcagatgtctgattgcttttgatggatgtacagtcaacggaatacttgaatgaaaccgcttcgtgtacggcacaccttgcggtgtaacctaatgtgttgtcgcgaccattttgcgatggtttcggaacctggtctggtcggaatcgaaattcatcggagagctaaatctctggttggcgagtgagtgagtcgttcgtacggctctaacttctgctttgaaaattcaaaagaatcgccgggaggcaggaacacccattctataccgcttgcagataccgccaggaaaagtgcctcttgcatgccaggaaagtgaaacccagggtttatagggtttaaagggtttatcccaactcagtatttatttataccatcctgtgcgcttgcatgcatgaacatcgaaaatgcagtcgcacacgcgatcatcgtttccactccttacgtgtccccatgacattattgatcgtattgccatattctcttccaacccaaagattgtattagtgtgcaaaactgtgcgcaacagattttcaggattgccccttacccgactgatccaaccaccacagagagttggagagatgatggcgaaaggggggcgcgccgaccttctagcagtatgcttggtgtccaatcctcttgtacaggtgaacggggtcctacaattgagggcgaaccaaaatgaaaacaagcttctccatgtggctgccaaggaaggtcatgcagatgtctgcaagctgctcatggatccagcggtggctggaattgagttcagggccagggcgaactctagagaaagctggtccttgatggcggctgccaatgaaggtcacgcagatgtctgcaagctgctcatggatccagaggtggccggacttgagttcagggccagggcgaactctatcgacagcagggcattgtggacggctgcaagggaaggtcatgcagatgtctgcaagctgttgatggatccagcggtggctggaattgagttcagggccagggcgatctctagcgaaagcagggccttgtgggttgctgcagaggaaggtcacgcagatgtctgcaagatgctcatggatccagaggtggctggacttgagttcagggccagggcgaacaatctcaacagcagggccttgcaggcggctgcctatggaggtcacgcagatgtctgcaagctgctgatggatccagcggtggctggacttgagttcagggcccaggcgaactctagcgacagctgggcattgtggctggctgccaatgaaggtcacgcagatgtctgcaagctgctcatggatccagcggtggccggacttgagttcagggccagggctaactctagagacagcaggtccttgttggcggctgcaacgaaaggtcacgcagatgtttgcaagctgctgatggatccagcggtggctggacttgagtatagggcccgggcgaacactagcggcagctgggtcttgtgggtggctgccaaggcaggtcacgcagatgtctgcaagatgctgatggatccagatgtggctggatttgagttcagggccagggcaaactctaacgccagctgggcattgtgtgaggctgccaaggcaggtcacgcagatgtctgcaagatgcttatggatccagcagtggctggaatcgagttcagggccagggcgaactctagcgacagcagggccttgtgtgaggctgcaacgaaaggtcacgcagatgtttgcaagctgctcatggatccagaggtggctggaattgagttcagggccagggcgaactctagcgacagcagggccttgtggctggctgccaaggcaggtcactcagatgtatgcaatctgctgatgaatccagcggtggctggacttgagtttagtgccagggcgaactctagcaacagcagggtcttgttggcggctgcaacgaaaggtcacgcagatgtttgcaagctgctgatggatccagatgtggctggacttgagttcagggccagggcgaactctagagacagcagggccttgggggcggctgccaaggcaggtcacgaagatgtctgcaaactgctgatggatccagcggtggctggacttgagttcagggcccgggcgaactctaacgacagctgggccttgtgggaggctgcaaaggcaggtcacgcagatgtctgcaagctgctgatggatccagaggtggctggacttgagttcagggcccgggcggactctaacgacagcagggcattgtgggaggctgcaaaggaaggtcacgcagatgtctgcaagctgctgatggatctagcagtggctggactttagtatagggccattgtgaaacttgacacgtttctttattgccaccttagggcaagatgtatatactctcctcaaacttttcagaaatgtgttcagtttgctcaagctaaaatatcgctgcgtgtgcccaataattttagatgtagcataaatatttgattatgaggcaagaaccttgcctcataatcaccttgcggtgtaacctaatgtgttgtcgcgaccatttcgcgatggtttcggaacctggtctggtcggaatcgaaattcatcggagagctaaatctctggttggcgagtgagtgagtcgttcgtacggctctaacttctgctttgaaaattcaaaagaatcgccgggaggcaggaacacccattctataccgcttgcagataccgccaggaaaagtgcctcttgcatgccaggaaagtgaaacccagggtttatagggtttaaagggtttatcccaactcagtatttatataccatcctgtgcgcttgcatgcatgaacatcgaaaatgcagtcgcacacgcgatcatcgtttccactccttgcgtgtccccatgacattattgatcgtattgccatattctcttccaacccaaagattgtattagtgtgcaaaactatgcgcaacagattttcaggattgccccttacccgactgatccaaccaccacagagagttggagagatgatggcgaaaggggggcgcgccgaccttctagcagtatgcttggtgtccaatcctcttgtacaggtgaacggggtcctacaattgagggcgaaccaaaatgaaaacaagcttctccatgtggctgccaaggaaggtcacgaagatgtctgcaagctgctcatggatccagcggtggctggaattgagttcagggccagggcgaactctagagaaagctggtccttgtgggcggctgccaatgaaggtcacgcagatgtctgcaagctgctcatggatccagaggtggccggacttgagttcagggccagggcgaactctatcgacagcagggcattgtggacggctgcaagggaaggtcatgcagatgtctgcaagctgttgatggatccagcggtggctggaattgagttcagggccagggcgaactctagcgaaagcagggccttgtgggttgctgcagaggaaggtcacgcagatgtctgcaagatgctcatggatccagaggtgactggaattgagctaagggccagggcgaactctagagacagctgggcattgtgggcggctgctaatgcaggtcatgcagatgtctgcaagatgctcatggatccagcggtggctggaattgagttcaggggcagggcgaactctatcgacagcagggccttgtgggcggctgcaagggaaggtcacccagatgtctgcaagctgatgatggatccagaggtggctggactagagtacaggggtagggcgaacgatatggccagctgggccttgtgtgaggctgcaaaggaagggcacgcatatgtctgcaagctgctgatggatccagtggtggctggacttgagttcagggcccgggcgaactctatcaacagcatggccttggagttggcggccaatgcaggccacgcagatgtctgcaagctgctgatggatccagaggtggctggaattgagtacagggccagggcgaactctagcgccagcagggccttgttggatgctgcacaggcaggtcacgcagatgtctgcaagctgctcatggatccagcggtggctggaattgagttcagggccagggcgaactctagcaacagcagggcattgtgggcggccgccagtgaaggtcacgcagatgtctgcaagctgctcatggatccagcggtggctggacttgagttaagggccagggcgaactctagagacagcatggctttgtgggcggctgccaaggcaggtcacgcagatgtctgctcgcttttgatggatccagaggcggctggccccgagtacagggcccttgtgaatcttgacagcagctaggtcttgtgttaggaaagacacgtttattgccaccgtatagcatgtatttatccactctcctcaaacgtttcagcaatgtgttcagttttctcgctgcgtgtgcccaataattccagatgtagcagaaatatttgattatgatgaggcaggaaactctttgaaaattattattgattcgcacgatgtgagccagcactttgacttttcaggctacttttaagatgtaacttctgtccttgaatgttttgtgtcaatcaatctcctgaagacaatatctgttgtattgacaatttgcaccagtacatttgttcctatctcccggaggtattttgactgttttcggagcctggtctggtcggaatcgcaattccacggagaactaaatctctggttggcgagtgagtgagtcgttcggacggctctaacttctgcttggaaaattaaaaaaaacgccgcgaggcaggaacacccattatgtaccgcttgcagataccgccaggcaagtgccgcttgcatgccaggcaagtgaaaccaagggtttatagggtttatcccaactcattgtttatttataccatcctgtgcgcttgtttgtacacacatgttcatctaacatgcattcgcacacgcgatcattcctaacgtttccccctgacattcttgatcgtattgccctattatcttccaacacaaagattgtattagtgtgtaaaactctgcacgacagattttctggatggccacttaccggactgatacaaccaccacagcgagttggagagatgatggcgaaaggggggcgagccgaccttctagcagtatgcttggtgtccaatcctcttgtacaggttaaggggggcctacaattgagggcgaacgaaaacaagcttctccatgtggctgccaaggcaggtcacgcagatgtctgcaagctgctcatggatccagaggtggctggaattgagttcagggcccgggctaactctgacgacaactgggccttgtgggcggctgcccatgtaggtcacgcagatgtctgcaagctgctgatggatccagaggtggctggacttgagttcagggcccaggcgaactatggcgacagcatggccttgttggaggctgccagtggaggtcacgcagatgtctgcaagctgctcatggatccagaggtggctggaattgagttcagagccctggcgaactccgacaactgcaaggccttgtgggcggctgcagaggaaggtcccgcagatgtctgcaagctgctcatggatccagaggtggctggaattgagtatagggtccgggcgaactctaacgccagctgggtcttgtgggcggctgccaaggaaggtcacgcagatgtctgcaagctgcttatggatccagatgtggctggaattgagttcagggccagggcgaactctaacgccagctgggcattgtgtgatgctgccaaggaaggtcacgcagatgtctgcaagctgctgatggatccagaggtggctggaattgagttcagggcccgggcgaactctagcgacagcagggcattgtgggaggctgccaaggaaggtcacgcagatgtctgcaagctactgatggatccagaggtggctggaattgagttcagggccagggcgaactctagagacagcagggccttgtgggcggcggccaaggaaggtcactcagatgtctgcaagatgctcatggatccagtggtggctggacttgagttcagggcccgggcgaactctacgcacagctgggctttgggggaggttgccaaggcaggtcacgcagatgtctgcaagctgctcatgggatccagcggttgctggaattgagttcagggcctgggcgaactctgtcaacagcatggccttgatggcggttgccaaggaagatcacgccgatgtctgcacgcttttgatggatcctgaggcggctggtgttcagtttgctcaagcgaaaatatcgctgcatgtgcccaataattccagatgtagcagaaatatttgattattgcgcccattgtttccttggagattttttcgatttggtttttgaaaccgagtataaatgttttcttcgatgatgtagatattgttgtgtattattcctgtcgtatctttagaaatgtcgattcgtgtaggagacgttctggctcctgtgatcccttcaccctcagtcggtacggatcacttcatacctagtaacatcggagggtccttctcagtttctggcgtcgacttgtgcatcgtgaattcgttgcgtcgtgcgatcatcgcttgtgtggagaccgcggcgttcgacactgtggttcctccggggggcggtggtggtggtgtgcgcgtacttgagaacacgtccgtgatgcacaacgagatgttggctctccgtgtgtcgcttgtgcctttgtgtctgactcccaacgagttggagaacttcgccccgggcgactaccaatgcaccttggccgtgcggaacaccgggaatgaggtgtttgatgtggtgagcggagacttcgtagttcgtaacgcgtcaggcgtctcgttccagacggagcgtttgaagcgtctgtttcctgttgaccagcggtcgggtgacagtgtgttacttactgtcttgcgccccaacatcatgtgtggcggcatcggtgaggctgtgaacatcacggcgactgcgaggcttggctccggtcgggagcatgcgagatattctccagtctgctcttgctattttcgttacaaggagcctgt

SEQ ID NO: 205 - DNA, 21815 bp, unidentified
  misc_feature 1..21815: note = Fanzor polypeptide
  source 1..21815: mol_type = other DNA
ctcaaatgaaaatgggcgaacgtgttctcgcatgttgttacagttattctcactgaaagatctattattccatttacaccataaaattgtaatgtacagttgttctcaaataaagtggtacacacccactaccgcatcacggcggcacctgtcgagtcgagtcacagagcgaccgacctcacgcgtttcgccgagaagttcctcgaaaaccccaccaccccctgatactgatatgagtgaacacggccgaagagttcgtataagaagatctttcttaaaaacaggtatggaggattttaaaaggagagtacgtgtgtggcacgaaaacattcggatattcgaggatcatgtccctcctcgtgcttctttgaaagtttcgtacgatccttcattcgagtttgatcgcacgaaatatggtacgatgcggaccgatatccgtgtcatgaacatggacacagtagatgcgacactagaccttatagagcaaggtatgcacccgctcgtcttgaacatggcggacatacataatcctggggggtgcgtgtcttgtggaggtgggatgcaggaagagtcgttgttccggaggacgaactaccatcgtcatctctcgaggtcgttttacccgatcggagaaagggaagccgttgtatcgttcgacgtcgacatcatcagggagtgtgagagagacggattcgagttcctgaagttttctaaatcggcatccttcttggcatgtccgtgcatttccatgccacagctggtggacaacaggttctcagagaaagacagtcaattgtttcgcgaaaaggtgagactcgtattgagtgtagctcacaagtacggacatgacagcatcgtattaggagcttggggatgcggggcgttcgggtgtccacctaaacacgttgccgagatcatgtttgccgagatcgaacaggtagaagggtgcttcaagaagatcgttttcgcgattctaggtaaaaacatcgatttctttcatctcgaaaatgaaaaaaaaagatcactacatcagtaactgttgttgttgatgaataaaaactcgtattgttgtagacaccactcggtccccctccggtggtcgcgacaacattaggttacaccgcaaggtgtaccgtacactacagaaagcggtttcattttagtattccgtcgagtgtaagagcgtttcatgcaagcagtcctcgtcacgtaatcgatagcaacatgcatcctggcatccatcaagaactgttggcccaggagacacacatgctcgcatctggtcttggggcacaatcccacctgtgtggaaataccgctgatgcacacctcatacatgtgctccgagtgagggagcttcggatctggaggataaactgcattcttgtaccccaaggcgtgtaatacctccagcgtcatgtagctgagtgtagagcccgtgtcatacatcatggaaatcttgaactggtgcaatggctcagcagcctcacacataatgggatccgccttgacaattacgggaaacaaaatgcggttcaaccccccgtaaaaccgaccagatgacattgcgtcataaggaaccagctcatcagtaactgacaggtagtgcaaattaaacagtgttttgctggcagagtaaactaccgatcgctcacagaacacggagcacatcacatcgtccatggcagcctggtatgggtttctggacaccgtcgccctacctggcatctcgaagtcttcatacacttccataatttcaagctcccttaccagctctgtcaggggaattattacgccgtcgagacgcgacagaccaaggtgcttatccggtaccaaactccggcacgccagaaggctgtcaagtgctgcgcccaacacgctgtctggcagagtgtcatagtgtgaagacgagcagttcctcctctagggaaccgttacactcgcaacttcaaagctgggaaagctaactgggcactctgtacggtccttgagggttcgatgatgattgatgcattggatgcgattcattattcttcttcaagtcatctgacttgtttacacactcaaaaggcgggaaactgtcgcatccacaccgtccgttcgtccgtccattcatgacacacggatgcggtggcggattctcgtccctcatcgtctcggagtcctcgaattgattgtaaacaaccattcttcagtataaacaaccatcagcacagcacacttcacgaacgaatgagttcctttgacgaaatcaatgaagatgtattggagatcattatagccaatgcgatttcgaacgaatgccacctcaaacaagtggctctcgttagcaaacagtggagatgcgtcgcaccccggtgtgtcacaaggatccacctgagacattataaaagtttggaatacgcattatcacgcatttgcaggcttaaagagttgaaaatcggtatcaatcgggggaaagacgtaccctaccaatcaatgtcggctatcgaagacaagatccaagacatatcgccgctgtccggcctcacttcgttggttcacctggacatatcgaacacctacgtgaccgacatatcgccactgtacggactcacttcgttgacgcacctgaacatggcgcacacctacgtggacgaagacctattatcaccgctttccggactcacttcgttgacgcacctagacatttcgcacacacttgtgaccgacatatcatcgctgtccggtctcacttcgttgattcacctagatatttcgcacctcacgtacgtggacgaacacccattatcatcgatttcaggactcaatgcgttggttcacctcaacatttcgcatatcggaaacagactagaagacatatcaacgctttccggactcaccgagttggttcatctgaacatggcgtacacacgggtgggcgaacaggacctatcaccgctggcaggactcacttcgttgattcacctcaacatggagggcaccgaagtggaatacctatcatctctgtccgccctcaattcgttgattcacctcgacatttcgcatctcaaatacaagctcgaagacatctcaccggtgtccggtatcactgcgttgcttcacctgaacatggagggaacacgtgtaccctctatatcagtactgtccggcctcacttcgttggttcatctgaacatgtcgtacacatgtgtggtcgaagaccgagtaccgatgtccggctccatttcgtcttgtcgccggagcaaggtgctcgacatatcgccgctggcaggactcgcttcgttgattcacctgaacatgaagggcacacgtgtgaaagacatatcaccactggcaggactcgctttgttgattcacctggacatgaagggcaccgacgtggaagacatatcaccactggcaggactcgcttcgttgattcacctgaacatgaagggcaccgacgtggaagacatatcaccactggcaggactcacttcattggtgcacctggacatttcgaaaaccgacgtggacgacatatcaccgctggcaggactcacttcgttggttcatctgaacatggagggaaccgacgtggacgacatatcacctctggaaggactcacttcgttgacgtacaatggatggaatgatgtgtaaaattgttcaacggggtgtcatgatacagtccagccaaagcaggaccaaatgcaatgggatgatctccccacaccctaccctctttgttggttgatattgcccactcttacactcggacaagggaattatgttacataatatgccgagtcccccaaaatcctcttgtatgtgtttatcttctacacttcgctcgacactgcgttctgtaaagaacctgtcagcttgtaatcaattgtgcgtcctaccacaacttccagtttgcaatatttctttggcctcgcaagaattccggggcgggttgggtacattgtaaagcaattgtggatgttaatggctgcatttaggtcacggtttacaaacaacttgctgttctccatggtggaactgcaccatagcaagcctcgaaccgtgcgcccttttttttcggattgcacactctggaggacggtggtgctgtccttgtgccagatctttgtggtacggaattcgtcaatgacggcaactcgccccttgaaacggtctctaaacgcattgaacgcgctcgttgtagggacagaaagttcatataagttatcaggcctggagaagaactttgcttttttctttgtgagcccaagcctttttatcacaacgcgaatcaattcttttgatacctcaaatccgaaagcatcatttaccttatgacgaagaacagcaagagatgtgaatggatctatttttaatgacgcctttaagaactctatgaccacatccgattttgtaggtttattccggttgtacacttttttagtggggtttgagatccacatcgagattgtcatgtggcttacattcgcaagtatagccactctcctcaaactttgcagcaatgtgtacatgtgtaccacaatcgaccgtctgtccaagttgtacatagagaattgtaattgattcaatatactgtaacattattgaccggtctgagtgtaactgctctgctctgatgccacatgccattaggatttaggctggatttcttcttgggttgtcgcagtcgggtcgtaaggctcaacttgggcacttgccacgctacgtttccttcaggtggaaaatagtatatggtgagggaaaatggctttattacagctaagcgaaatcaagaactatttgaagaacatagaaagtggcgacgcatcacaagagcacacgcttgatggacttatctacagcaacatgggtattggaatcaggtgcgtggaagatgcactggtgagggcatacaaagagtcggaacaaaaggggatcctggttcaacattcagatgcatggtgggggatgaccgattccatgaaagctctcgaaaacttgctagaccgaactgatgcaaaggagctgaatacaccctatcacaaatgtgacgatagtttacatccgtactacacaccatggcagtacatgtgtgttttgaaaaagacgttcctgctcgggaagtggtcttcaagttttgccattaaactggcggagtgtggggcagtgacagatatccctaattggtggagtactgacatgaaaagagttgcgcatacctgtcaggaaccaggtacacaataagatgcggtggtcctgtcaaataattgagtgcgagtcacatggcgtccgacctctcgcatcacggcggaacatgtcgagtcgactcacagagagagaccattacagtcggcggaacgatgtcgacttacgggggacgatcgctcgctcgcatcgcaaagaagtcgatactctatccgattttataaaatttctaatcaggatttaggtctcctgaaagactcgctagcttgagacatcagcacatgaagttcatttgtagttcagagaactcgcggacgaggcgccttcggcacaacacatacgtgggatcgtagatgctttttcgaaattgggtttggatgagttggatagcgtttttacgcctaatatggtgggcacgccacgcttgttggatctttttagcatatttcgtaagtgtgacattctcaacgatataatttatttgtaattgttggtggtatgtctcgcttgttgcgtatacacttctacaccggtcagatagccttgctggcacaatccagaagctccacatgtaatcatggcttccttctatttgctgaagatgacgatgaggttggatctcatatgtgtcgcatatgaatccgtccagtatcattaaacacggttttgtggatatccaactggggtcgattgtgactgttctcacaatattgtgtttactccagaacttcacgcaggtgtcgtctaggtctgaaaagacaaaattctcccagccatgcatttatgaacatttgtttcatggtcgagttgttttcttatacagtcgagctccatctacagttgttctcaaataaagtgggacaccttataatccagactgcagatcgttgcttttaggtaacgttggggggtgcagcaggttgaagaggttctcgaagatattccgagtagcctccttggtaaaccgttcaaccgtcgaatgtcgacaatggatccactttcatcgaagactcgttcaaatacagtcgacggaatgtacatgtgactgtcatgtattcaaagcggtattttttaatgataactgactcctgctgcaacacgtcatgcctcaaagttggcagcggacgaccgcatcctcacacacgcacggtggagggtcttacgcaaccgcatgtactcaaacgaaagccgtgagccgcatgagctcacctacgtgcgatgatatttagcttcgtaatagcatggatcgatacagaatatacaactgcacgaaaaacataacagcaagcagctccagaatgcccttttcctgagcggaagatacccgaatagccttacgtaatcgtccataatcaatattggatccatgtattcccacgcgtttgccgtgtacgtcttttctatctctacaatcttcttcaatcgagcagcattctggtcgtactcaattttggcaccagataataggtggattgtcgtgccgtcaaacgtaaacatagtcttattcatcacgttcgatgtacgcctgaagtagaatgtctctttgtacaggtcgagtatttctaaacatttattggcgtcgtcctcattatcgaataccaccgttccatgtaaaataaattttttgccattccacgtactgcctgaaactgtgaaacacgcatacatgcttgtatccaacttcttgaagttatccattgaagtctagggtttaggatcaaacaagaatgaaagacaagccatttgcccacgtgcagctgcatgaagggcgacacggtatgaattgatgaaacattgtccatgatgccatgcattgacgagacactctaatttaacattaagtgctgctacattcgcaatcagctcccatttgctcgcctcgatgtcacaccagtcgcacgacttgggatcatgatcaagcaagaaagatggatgacaacacatgcatgtgcctgtcatgtgctgcaacacgtcattcctaacgcactttatcacgacacatgccgcatcctcacacacgcgtcgcggcggctgctgtcgagatgttgatgcccactcactcactcactcactctcactcactcattctcacgcacgcactctatcacacgcaaacggcggaacacggtcgaatgtatcgtaggacacaaggatacatcgtcaatcactcaatcactcagattaaagggaccggcgctttgcgtacccaggcatgcccaatcattgtgtattagctcgcgatgtgcaccaaagccaatataaaacatcatcgttataaaagttagagcgtcatacctagtgttatgtcatatatagcgtgtcctatcacaatatcgttcgcttcgtctctaattcttgtctatgctcgacgcgcatgtcaaagcatgttggaagccttgtccatgttagcatggttggtttcgacaagtgtgatcatcacatggattgccatgacaaaaaaacagaagttacctcaaatttgcgcaggcatcatgtggacaataacaatcactatgtttattagcttctgctcatcattttaaaagaatcatgaagtaatgggcgttcctgcctcccggccgaattccaggggaacacaaagagcgtttgtatgacatggaagaacacatcaaaccaatcctggatgcactacagtcggtggaacagtaaaatgaaacatcccaataaacgtcttgttaatctcttgaatgtcttacgtttaattttatcccatatgtttttattagattttttgagctgctatctactggtttcggtacgatgttaacgtcattttcctttgcataatgcgagagatttcatatcagacgaacattgtattagaatgatatagctcgtccgctttgttatcagttatctttctcattacacccggtcttttggtgaattccacaccccttgaggatccccagggtatgtgatctgccactctcggcgcttgctatcttgtaacatccacacccattgggaccatcctgatgcatgggctttgaaatactccacgcctgtcgcttcatacaaagaagccatctcatttactatgtgttcgatccgctcgcctactgttttcaaatcactacatgtaataatgtgctctaccatgctatatacatatgtgtacacttttttccgccccgaatgaacactattgggtgtaatgtgaccaaatgtggcccgatcatcgacatacaaaatttaccaccatctaatgagatttctaagagatataaatagtacttgtagtttttataatatattacttgtataattcattttgtttcttaaacttttcgtaaaacttatacttttttagattgttgaatttctcattatcccctttgaaaggccacaataagaaaaggaattcggtacgatgtctcaatctagcgagtcgttcaagaggctctaaatcctgattagaaattttaaaaaatcagccgagaggcaggaacgcccattaagtatgcaaactcacagagtaatttgtgaagtagagttttacgtttgatctttgggggaagactcacattattgtgccaaggttcgatatcaggtgtgcgatagatccacttctcactatgtaactgtaagcctattgccacagctggggaatggatacttgcaccgctctgaatcaatcgctttgtgatataatggtttccattggttatgctgcacatgagcgcttcatcgtcttgaacgtgcacatcaactccgctttctagcaacatgtcgacaatttctgcataaccaaaccgtgcggccaacacaagcgcatcgccagaacgatgattataatttgcccctacagtcggcggaacagtaaaatgaaacatatatcagatggaaataaatgtacgacatcgccgttagaaaattggcgttaagaatggtttctgaattgggtgtgttaaaaacttctgtgtttacgaacatcagtcgttctactctgtggagatggaaacgctttggtgtaaatcgaaaacgacgtgaatttgtaagcaacctttttgagacgaataaggatttgttaaaatcgtttttattgtcaactcaatgcacaaccgcaagaggcgttgttgcttttttcaaaagtactcacaatgtacgattatcaactaaaacagtgtatcgtttcataaaactcattggttttacaagaaaaaggagcaaactccgtggacagtgcaaaggggacttagttccacttgtcaatgaattttgtagtaggtacaaggagacaatcaatgatgggaaaattttagtatcagttgacgaatgtgggtttagtgagcgtctcaagccacattatgggtattcccctgtaggaaaacctgttatcgttaaaactactggtgggtgggtacaccacagtttgttgatggcagttttttcagatggtaggaaagaattcgttgtgaagaaaggatctgtgaagaagacggacttcgttgcatttattgaatcattgagtttgtgcaataattcagtagcaataatggacaatgccagtatccataagaaattggtcctcagtcaccccgtcaatatttgttacacacctccttacagtccagaattcaatgctattgagctatgcttcgctaaggtgaagagagactttcgtcgtttggaactacataccgaatgaaacaaagacgcacgtgtctgatatgatttccttagcattcggcaacctcactgataaaattattatgggttgttttgaacacgtttggaacacttatgtgtataaagcggtctgtgacgtattgattatgaaagatggcgacgaaatctccgacagtcgcgaaattgaaggagctactgaaattggctgaagtaccatactcgtcgaagtccaacaaggacgatcttgtccgtttatgcgaagacaatggtctcatcgccagaccccctccagaatacaagacggtggaaaagatgtgtgtagtgaaatgcgccctgaagaaggcaatgagtcttgacgatgaagaattcggtaagtttagggagcatgtggaccagctcgtcaatgtggtgagccgcatgttacggcggtccagtctggtgctgactttccacatcacgagtctattagagaaaggtctggatattccagacctgtacaacatgaaagatacctactggaaggattggctacgtatcggggtagacggaatcttccctgatgaggaaagcaagatatcgtacgaagctgtgaaggactccatcggcgatgtaattggtaatgacgacgctgactacatcaagtcttatccgatctatttcgatcaggtattgaactatgcaggtcacacattgagcactgtcgtgtcaaacaacgcatgggttcctttgataccacgtctggccagactcacttccaccactttaaataaattaaatgccccgcagacgctggacacatcgaagatcattcggggatacgacgtgatgcaggctattcagcaagaagtccaaaacatggagggatggccagagtctgttcaagagtacgtcaatgaagttagggagatgctgagtgttccagatggaagtcgagtttatgataactatggcaaagacatggactttccgaccatggtccggtttaattattggatacagacacggttggaggatatggatgcacgtcgtatccgattgatgcccatcttcaatgtccaacgggtgcatgttcgccttgacctgaagaccctcgtgaacctgttcaggcacatgttccccaatgaccagaacatcgttgagctttccaagtgggaacatgtaaagaatcccgaaagcttcatgttgccccagaggcctgcacagaagaagaaaaaatcatgtggtcctggtgaatgggaggcatacaagttggtcctgaagcagtacgatgatgatgttaaggatatcaaggctactgacgagtacagacatgcaaagggtttgtatgacacgcttgtgaacgcccgaaaaacagtcgcaggttccttcttcagaaaaccacctgtcaagaatgggtgggttttcgactgcagcatctgtactgacggagtctctttgagcatgcagtacagcaagacagtacaggtccttgtctcagatttgaagaagacctgtaagaagcctcgtaaagaagaaggtatcaagatcgcagaaaaatacgacggctcacttaaaacgatattgcccgatatgggtatcgtcgtcctgggtgtggacccaggacggagcaacatcgctacggtaacgtatttggcagacgataaaaataagacatggaagctgacacgtggtgcattttaccacaagtcgggtatcaagaagcagacaaggcagaaggaactgcgttttgctgacatgattcctatgtgggagtctctgcgtgaaaatggagcagctttgagtacatcgaggacggataagatctccgcgtacttgtcaaattacgctaagttttctgacgagtggtggagattggctttgcgacgccgagaatcccgtgacaacttgcagcgttacatcggaaaacgaaaggtcaaagactctttctgggcgggtatcaagcggtgcatgaatgaaagaacttcctgatatgaaggtttgcgtggcctacggatctgccatcacgaaactgaagcctactggaccgggagaagttgcagttcccactggggccatgttcgcatcgtgtaaaagaattttcaaagaggacgtttctgtgacagatgagttcaaaacgactcttatgtcgtgggagacgggtaaagaaaaagaacgtgtttacaagatcccaagtgtttgttcagcagacgtgaagcttaggttgggtggtgaacgttttggtcacacgaaatcgaaaacgatgccaaaggtcgctgattgcgaccacttaggggtaaggttgtacaataaacgtaaaggcgcacaagagaagcacaggaggggtggcttcgccacttcccttgtcgattctcaaaaatcgatcgagcggtacccagaggtacgaggactgcgattctctccagaaacatgcatttactcggaccgggatcgctcttctgctctcacaatcgcaaggctgcactgcatggaattgatgggtctaggacgacctcttccatttgcccacagcagctctgttgttgttgatgaataaaaattcgtattgttgtagacaccactcggtccccctccggtggtcgcgacaacattaggttacaccgcaaggtgtaccgtacactcaagaaagcggtttcattttagtattccgtcgagtgtattgctaaacatgatttcacaatatctgttcgaccaataaaagcagcgcggacaaacatttcgttgattaggtgcatgtttcgggtaaggagtatgccattccatactgcagaaagcttgaataacaccccaacatgcatcgtttgctttatccattccaaaataatggcattcttgttttcacatatcgatttgcaacaatatatgacattcaaaaggtctggctttggcaatgccacacatacactgatcaccatgtccaacggcagcttcaacatgttgcacaacaatgggtagacgttacagcaggtctccaaaaatgattacccaagtgtttgttacaggtaacctcttatctttatacccatccatcttcagtgcatcggcgtctgtcgccttctttctcattgtccatctgactccacatgcaaacggcggaatcatttcacacacaagcattggagcgtttgtatgaagttctttttcctctgctaattatacttggcactacagagaatacaagaaatactaatttcttcctctgacactttttctggaacttctgttatgggtgatgcttatcttacagcactagaaaacttatggaagaaaaatccggatgtagatgcaaaacgattggcaacatttgtcaacaaatgcaaagatttgctcgtgtattaaggatcggttgatgatctgggaaaaagcagttgtcctctgtaaaagaagcaagtaaaagaacctactttaaaacactaccaaatgttggatgtggtgtttatcacgataaatcgtcttcccacacaacttgtaccgaactatatatattgttgccaacaattggaggataaccgtatcacactaaacaagcggcggagcccctttcacctccccccagcggagcgccgggggcgaccggaggggagcccccacaaaggagcccgcgaggaaccgagcgggtgggcgaccggaggggagcccacagttcacatgcatgagacacactggattgattgatgggttaaccctaaaccctctcgatgggagtggtgactgacaaacaacggagatgacgacatcatggtggtcaagattcaagggatcgtgaatgaataaaaaatgtaatttaatacttggccatctcaatcgagaaacaaatggcgaagttcaatatggtcgatcctgagatctggatttcggcgggggcccttcaaacggagtcgtgcgcataatgaaaagcaggagaatttcgctcattgtggtgcgctcctccacgccatcaaacgcaggcaccgagaatacggttttcctccccaaatgtgcggatgtggacgacattgtggacttcgtgtacccgaccattgaatcgatgatgacccgcgcaagagtgagtgagtgtgtgagagcaacaaacgctacaagatgtcaacacagtgcgtcaacttgtcccgggattcaatgtcattgactgtatgcagtgaatcatgtacatcacaccaatcatgcgtgctccagaatccttcgaaaaatggtttgcaggaggggcattatacatcaataaatgcccaacgcaggccatcatggtcagcagccactatgaattgttgggggtggcagcagacactgcaacgacagaggagattcggcgagcataccggcaagcagctctgaaatggcatccggacaaatgggcaacatctcctgacagccaacgggatgctgctcaggagcgtttcaaaatgttgtgcgcggcttacggagcgctgagtgatcctgacaagcgtgaagcgtatgaccgccaacacacgcccccgttacagacagcatcaatggaggatgcgtgggtggtgttttcccgtgttgtaatagagagtgtaaaagaggaaatgcagatatcggatgatactgcacccacggtgttgaagcttattgctagcctgttgctgccagcatccgggttctacttcggtgggctgtctggggtgtttgccagcaacgccctgagcattttgttgatcaaccctcatggattgaccaacgtctggcgcaacatgacacccgagcagaagagggaatttcaggcagcagtgttctgcctggcaaggcagatgagtgagggggtgtagaggttgttttcatggctcgagggagacgggcaaaactgtggaaaactgtcgcatgcacaccgtccgtccggcaaacgttaaaatatccaaatttataatgatggcttgtgtcaatgagattcttatttttttgttgaaataattgttgttcccaagatggagagtcttttcagaggtgttcatgtgaacacgtttaaaatagggattggttgatgattcttatttttttgttgaaataattgttgttcccaatatggagagtcttttcagaggtgttcatgtgaacacgtttaaaataggttgttgttccagagatggagagtcttttcagaggtgttcatgtgaacacgtttaaaatagaacgattttaacaaatccttattcgtctcaaaaaggttgcttacaaattcacgtcgttttcgatttacaccaaagcgtttccatctccacagagtagaacgactgatgttcgtaaacacagaagtttttaacacacccaattcagaaaccattcttaacgccaattttctaacggcgatgtcgtacatttatttccatctgatatgtttcattttactgttccgccgacgttagtggagccatgcgatgtgctgataatggcgctgaagcagctgtcggtgatgcttgatacacctctggtattcgtcgtatttgttgacttcatgctccatgtgtaaccatggccctttaccacttcctctatcctcaatttcttggatcacaagtggtgcgctccatttcgataatcgaccccattgatcaggtgtcatgaataatgtaagttttatgatttgcggtgcactttgatcatttgtaaggtctgaactttcgaccaagttgttgctgtccatcaattgagtcatttgctactccggaacagaataagccgagcgaaatagccgcgctgcattcgctcttctgcttattgttctcaaataaagtcagcagctcgattccactgccccgctccgcggtgcccgcgctccccattcagaaatccatcagggttgtcaagtcaagcagaagaatgtggagtcagatggacaatgagaaggaggcgacaggtttccgccgtttgtgtttggagtcagatggacaacgagaaggaggcgacaggtttccgccgtttgtgtttggagtcagatggacaacgaggaggaggcgacagctttccgccgtttgtgtttggagtcagatggacaacgaggaggaggcgacagctttccgccgtttgcatgtggagtcagatggacaatgaggaggaggcgacagctttccgccgttttaatgtggaggcagatggacgatgatgagtctgcgcaagccgccatgtcatgtgtgtgtgcggtctgtctatcggtctgatggacaaggagtctgcaaaatccgcagtggcgtggccctttccaagcatcccccccggggttcgcgacgggcctaccccattttgcgatcgcgcaagagaactcattccgcccatggcgcgcgtttggaaggtacttgcaaagctcgccgttcaatcgtgggacaacgaaatacgtacatgctacggagaattgactgccaacgacttcacagacggaaaccacgccaagctgtttatcctcaatctgatgacagtctcaccggacaatgacacatgcgatccccgcttccaaggcatgtatcttggtttggaagccatcttcccgtaccgtgattggtgtaccgtatattacattaccctcacacgcaagattttaagcagcctgttcattgagttggatgagttcagtatcctttgtgtggcatctgatggattcgccaatcatgattgggacattgtacagaacatagcgtcccagtggttgcgagcgtggtgctcggcgcgcaagatccagcgcacgtaccgcaagtacatcgagcacaaagagatccagcgccaaaagcgcctcctcatcacaatccccaggattgtgtcattgctcaaggattgcaagggtcgcgaataagtaattattcgagaacaactgttttttttttaccttcatcgaaccaatcaattgggttcaagggtcaccggtaagggtgtcccacaaattctgtctctgactgtactttaagacatacctcactctccatcagatatgtcttttgtttttgttgcatcctgagagagagaattttgctcgaccggattgtcgtgatcgattgtgatgatgaggcttctgttgctctcctcgcgctttttcacgaggtaattgcgcgtctgaacaaggtattttgggaaaggatcgacatgcggtcttcgggaacgtatatgcatcaatgcatgctcaaacttccatccaacatgttggaccatataacacagcgtcacacaaacagagcgactaaccccctcaaggcagtgcacaaacacacaacttttttttttatgagctgcaactatgaaatccatgcatttgctaaacgcaacagaaatatcagttgatgggcaatcatccggcatatcaactttagcatatattagccccacgcgttccgttacattgcattccgtagcaacgttcaaaatatgtgtgacgttgtgggtggtgagaagatcacggtcaaaagattcatggaacccgccaacaatcaatccaggaagtatcaaggacatctcgtttctaaacacatcacatatatatttaatggatcggatatggcgcatgcttccgcacatggagcatgccaccgaatccagcaggaaacgcaaaattagcttgttgcatagccaacctaaacgcatggcgaccgctcccctgcgtgcgctgcctcctcaaagtctcaagtagcgccagggctctggaagtttttaacacacccaagtcagcgaccattcttaacgccaattttctatcggcgatgtcgtacatttccatctgatatataatgggcgttcctgcctcacggccgattttttaaatttctaatcaggatttagagcctcctgaacgactcgctagcttgagacatcagcacgaaggaatcacaaatccgctccataccatgtttcgcaaccagtcaaaatcggccgtgaggcaggaacgcccattatgtgtttcattttactgttccgccgactgtagaattgtgcatcaacaaaagtgtgtctttgcttcccccctcccaagcgtttcagtgaaagtcccaagcgtttcagtcagaccggtcaataatgttacagtatattgaataaattcaagcgagtcatcaaatgaatccaatacaatccaatctgcccgcgctccccattctgaaaccaatctgagagttgtcatgccgaaacagtgacgaattacattattacacagtcagcatcatccttgtccattctcacacagcggcacttcttgctgatcactgaaataacattcctaatggtgacatcatcattcctgctggtcttggtggagacatgatcccgagttggaatataaaggaatatcttccttgatattgaaaggtcaaaatgttccaagaagaatatgaacgagaattacgtgtgttgatggaaaaaaacacgaaacccgtccgaagcctgagcctaatagatgccatcaccaatgacttaactgtgacatggttttactggaaatggaaagttctcaaaattattggttatgaagtccaaatcattcatgtatgcgagaaaggttgttgtagagttgtgtcttcctctgatatcggaagcttctcaagaagtgcttgtgcaaaaccaatcaatgaaatacccaatgttgcccatccagtaagagatgttgcgttctgaaacaatcccgacacaagagcacataatgcaataaacagtgccaagaagcggatgtatctacagtcggcggaacagtaaaatgaaacatcccaataaacggtataaggcgtcgacagacgttatagtgtacgagtggatggtcctacaaaatggcccgtccagcaaagaaacctcctttcatgacgcattgcacatcaacaaagaccccgtgttcttttgggccacggtaccggggaagagtcgatcgcttaagtgcggctggtccttcaatggacactctcgaaagtaccgacaaaagaacgatacggagtctgcaggatggagagccgtgatctaaaaaagaaccacgatattctcgttaacatcctgcaatttgttgattcaaaatcgtattggtgttccactgccccgtgggttgctacaccatttggttacaccgtaaggtgtgccgtacactccagaaaacggtttcattttagtattccgtcaagtgtatctggactcttcatcttggaggtgccgctcctcaaatcgtgttgcaacctccacgtcccccatcagttccttgctgaaaaacgtgaaattttcaagcaatccaacaccccctctcacattcagtaacccacagggctcctccgaggattcagtgctgccttgacaaaccatgcgaggagatgtgctgcgggggtgggtgattgtgtgacatgtatgtatttaaaaaagcaattatcacaataccggctgatccaaatgaaatgctgataccccaaccgaggcacacgccttcatatactccgaaacgtgttcaggagtcatagcagcgacgtcatcaggcgataacgacaacaacttttgcctgagatggtcctcagactcatcagcacgggcctcagcctcacgacgggcagcagcttccgcacaacgggcagtagcttcattgtcagcacgggcctcagcctcacaacgggcagtagctgcattgtcagcacgggcctcagcctcacgacgggcagtagctgcattgtcagcacgggcctcagcctcacgacgggcagtagctgcattgtcagcacgggccttagcacgataggcatcgtcacgacggtggaggtatatgaaaagcgcaattggtgcaaccgctacagtcagctgaacagtaaaatgaaacatgaaacatatatcagatggaaataaataaaaaatgtaataataaatgtacgacatcgccgttagaaaattggcgttaagaatggtttctgaattgtgttaaaaacttatgtgtttacgaacatcagtcgcttcagaatttgggattcccccaaacatcacctttgacattgttcaaacaaaccccgataatccatgggattgggggcaattgagtgcgaactcaaatatattattaccatctgacacaggcgtttgcaatattctctaataatcttctccgctctgaaaaccctgttattccattctattctctaataattctgaaggggtcaaaaccctacctacagtcggcggaacagtaaaatgaaacatcccaataaacggtataaggcgtcgacagacgttatagtgtacgagtggatggtcctacaaaatggcccgtccagcaaagaaacctcctttcatgacgcattgcacatcaacaaagaccccgtgttcttttgggccacggtaccggggaagagtcgatcgcttaagtgcggctggtccttcaatggacactctcgaaagtaccgacaaaagaacgatacggagtctgcatgatggagagccgtgatctaaaaaagaaccacgatattctcgttaacatcctgcaatttgttgattcaaaatcgtattggtgttccactgccccgtgggttgctacaccatttggttacaccgtaaggtgtgccgtacactccagaaaacggtttcattttagtattccgtcaagtgtataataagggttgggtacatgttgttgaccatcatcctgcgaggaaaagaaaggcaagcaatcgctttccatgtatgtgggggaaattatgtggcacagtgaacgcgcaaatgcacttcctttatcaatttctttaccgatcaacaaatgtttgaagtgttgaacccgcttgactggacaatacaatgccagcagatgtaactgaggtatcccctacacatatcgcccctttgtatgtcagagacccacccaaggaacgaggaagaggcacagcctcttccataaaatagggattgattgatgattcttatttttttgttgaaataattgttattcccaagatggagagtcttttcagaggtgttcatgtgaacacgtttactgttccgccgaatgtagacgtgagcatgatggatgtagtgaatgcacttacatctgctagattggatggtatgttatccagaatggatacaagaacatctatgttggagctggtgatttgtctgccaccaagtgacccacattcgccactacggtatcattcttcgtacgaactgttaccgtctcgtaccatcgacttctagccaggtggtaccgttcctcgtcattgtacagttcatactgtagttgcatccacaacacgtctgtggtttgatgcatacaaatctgtagtgcacaagtgtggtttccaatcgccatcatattgattgctataggaattgttatcggtcggatttttcctacaactgacaagctagctttccatgtccatgcatcaacatctcctatattgatccgcacccactttatatgttggatccccatgccagccaatgtgatgttgcgcaccacatcaccctctctaggcagttcgtattgtagataagactccccattgctttcccttcggagaaatttgtcgcagctcaagcatacctggtaggacaccaataggtgtggccgcttacccgctaatagcatcattaatgcctggtattcattcatacacaatgtttatacacaatgtttatactgacgaacaacatttggaacattatcgcttggtcagatactcgtttttcgaggcgtacacggaacaactttttccagaaaaccgagtgtaaacaactttttccagataaccgagtgcaaacaactttttcagaaagaaccagtgtgcttcatcttctgtttctgtttctacatacagaacgactgatgttcgtaaacacagaagtttttaacacacccaagtcagcgaccattcttaacgccaatttctaacggctatgtcgtacatttatttccatctgatatatgttttattttactgttccgccgactgtagtgaattccgttgtttttttactctgcagcacctagggtgatcaacattgtcaacccaccctttctcacttgg

SEQ ID NO: 206 - DNA, 21743 bp, unidentified
  misc_feature 1..21743: note = Fanzor polypeptide
  source 1..21743: mol_type = other DNA
gcggtgaggccattccaacgccatcgcatcccgtcgacatcatcgacggcagacaaataatgacaaatcattggaatgtcgccagctttgttgtgactttcgtgggtgtcgtgcgtgtttccacactgccaagtttacgggacaaggcccgtatgccacaagatttgcatgtgattgaagacgagtagaaaaaacttggtctcatccatcctcttgtgtatccacattcgaagcgaagacacacgtacacgaaaacggtatttagacccttcttttcagatccgagaagcttgggtgtgcagggttgggaggggggatgttccatcatcatgcgcttcaatgtgtgcgatatgagaagcgaggtgtgcgggggagatcgcaagatcacaaaagcacgcacgtgaacaagagtgataggaggggtatccaactaattgttacaacggtaacaacggtacattcctactcagggtcttcttttgacgcatgacgtctactctcttcgcttgttgattcatcatctgaattatcttcctcacttcataaaccatgtcaccaacgataccaacgataccaacgttaccacagatttaatagggttatgagaaaattgcatttttcatttttcatattgtaaagtgaaaagtgacattttaatatacttactttttattggtatcattggtaacatggtaatattaattattaattcatgatatccttattttttcaagacgattcatcatctgaattctcatcttcttcataaacagtgtaaccaactaaattgtaacaacggtaacaacggtaacaactgtacattcctactcagggtcttcttttgacgcatgacgtctactctcttcgcttgttgattcatcatctgaattatcttcctcacttcataaaccatgtcaccaacgataccaacgataccaacgttaccacagatttaatagggttatgagaaaattgcatttttcatttttcatattgtaaagtgaaaagtgacattttaatatacttactttttattggtatcattggtaacatggtaatattaattattaattcatgatatccttattttttcaagacgattcatcatctgaattctcatcttcttcataaacagtgtaaccaactaaattgtaacaacggtaacaacggtaacaactgtacattcctactcagggtcttcttttgacgcatgacgtctactctcttcgcttgttgattcatcatctgaattatcttcctcacttcataaaccatgtcaccaacgataccaacgataccaacgttaccacagatttaatagggttatgagaaaattgcatttttcatttttcatattgtaaagtgaaagtgacattttaatatacttactttttattggtatcattggtaacatggtaatattaattattaattcatgatatccttcttttttcaagacgattcatcatctgaattctcatcttcttcataaacagtgtaaccaactaaattgtaacaacggtaacaacggtaacaactgtacattcctactcagggtcttcttttgatgcatgacgtctactctctttgcttgttgattcatcatctgaattatcttcctcacttcataaaccatgtcaccaacgataccaacgataccaacgttaccacagatttaatagggttatgagaaaattgcatttttcatttttcatattgtaaagtgaaaagtgacattttaatatacttactttttattggtatcattggtaacatggtaatattaattattaattcatgatatccttattttttcaagacgattcatcatctgaattctcatcttcttcataaacagtgtaaccaactaaattgtaacaacggtaacaacggtaacaactgtacattcctactcagggtcttcttttgacgcatgacgtctactctcttcgcttgttgattcatcatctgaattatcttcctcacttcataaaccatgtcaccaacgataccaacgataccaacgttaccacagatttaatagggttatgagaaaattgcatttttcatttttcatattgtaaagtgaaaagtgacattttaatatacttactttttattggtatcattggtaacatggtaatattaattattaattcatgatatccttattttttcaagacgattcatcatctgaattctcatcttcttcataaacagtgtaaccaactaaattgtaacaacggtaacaacggtaacaactgtacattcctactcagggtcttcttttgacgcatgacgtctactctcttcgcttgttgattcatcatctgaattatcttcctcacttcataaaccatgtcaccaacgataccaacgataccaacgttaccacagatttaatagggttatgagaaaattgcatttttcatttttcatattgtaaagtgaaaagtgacattttaatatacttactttttattggtatcattggtaacatggtaatattaattattaattcatgatatccttattttttcaagacgattcatcatctgaattctcatcttcttcataaacagtgtaaccaactaaattgtaacaacggtaacaacggtaacaactgtacattcctactcagggtcttcttttgatgcatgacgtctactctctttgcttgttgattcatcatctgaattatcttcctcacttcataaaccatgtcaccaacgataccaacgataccaacgttaccacagatttaatagggttatgagaaaattgcatttttcatttttcatattgtaaagtgaaaagtgacattttaatatacttactttttattggtatcattggtaacatggtaatattaattattaattcatgatatccttattttttcaagacgattcatcatctgaattctcatcttcttcataaacagtgtaaccaactaaattgtaacaacggtaacaacggtaacaactgtacattcctactcagggtcttcttttgacgcatgacgtctactctcttcgcttgttgattcatcatctgaattatcttcctcacttcataaaccatgtcaccaacgataccaacgataccaacgttaccacagattcaatagggttatgagaaaattgcatttttcatttttcatattgtaaagtgaaaagtgacattttaatatacttactttttattggtatcattggtaacatggtaatattaattattaattcatgatatccttattttttcaagacgattcatcatctgaattctcatcttcttcataaacagtgtaaccaactaaattgtaacaacggtaacaacggtaacaactgtacattcctactcagggtcttcttttgacgcatgacgtctactctcttcgcttgttgattcatcatctgaattatcttcctcacttcataaaccatgtcaccaacgataccaacgataccaacgttaccacagatttaatagggttatgagaaaattgcatttttcatttttcatattgtaaagtgaaaagtgacattttaatatacttactttttattggtatcattggtaacatggtaatattaattattaattcatgatatccttattttttcaagacgattcatcatctgaattctcatcttcttcataaacagtgtaaccaactaaattgtaacaacggtaacaacggtaacaactgtacattcctactcagggtcttcttttgacgcatgacgtctactctcttcgcttgttgattcatcatctgaattatcttcctcacttcataaaccaacgatgtcaccaacgataccaacaataccaacgataccaacgttaccacagatttaatagggtatcttgtggtacctgtcgttttgggagtgagagtacctgacgaaagtagagaagaagatgtcgagtttcatttcagaatcattattcttttttcaatttaacatcaaaacattgtgatgttaaaacattaaaacgttaattgacttacatacaccatgcactgggcttctcgatgtaacgcttgggattttcattgaaacgcttgggaggtgaagcaaagtgcaggggagttgcgctctgcgaagcacatgcgcactcgatctctttttggaggggaatttaagggagaaacaatccaatcgattatgtacaaagtgaaaacgataatacacggcattactactactaatctcacaagcattactaagacaaatcactcaggtagtatgggcactaatgctgaagacaatacgggatcatcatttacctctgctaatgactctgctactgcttctgatgcccccatgaaaaaggggcagtccatgctatcaaagaggcggtacagacagatagaagaaaaattcaaggagatactcatcggagtcagcaaagaagaaaacgaaggggtcatcctagcaaggctactcacagaattcagggaaattatgcagtttgacccggagggaccaacgtatggagcaagggacacggcaaaacagtgcgaataccaaagaaacagaaatatggcaatcaaagatctggcaaaaatagtgagggaaaagcttaaagaagaatcatacaatgtttattaaacactcaatatgtcactcgatgttattctggcggcggcacatgtcaagaatttcccggcccccaccgaggcaactcacggtgccatgggggaccccatgttcggatcgtttgcgatccctgactgcggacctcaggcacaggcgttccgcgaggcatacgtgcacgcgctcagggatgagggtcgacccctgtccatcgtagagacccatacagacacatcgccaatcatagttgaccaggacatgcgacagaacacccctgagcgcatatacacacagaagcacatcgagaacttcatggacgcgctcgtgtcggccaccaaatactttgtagaccagcagcacatggacttagtgatcctcgagaagccaaatccaagactcgacaagaaacacttgggggtgtacaaagatggtctacacgtgttcatgccaaatgtcatcacacacccagagatccaactcgccatcagagagcacttcgtaaacgatatgaccgaacataggacgtacgagagcaccatttgcatccctggaatggccaaaatggatcccggaaagatatatgacaaaagcgtgatcaccccgggaggcaggtggttcttgtacggatccaagaaaccggatgagacccacccgtggaaagtcactgcctggtaccaacttgatactggagcaggctcgctcaagaaacttgacgtacagaacatggatctcgatacactcgtgcagaatctgagcatctgtgtgcatccgcacggggggcacagcatatacaccaaatacggtcaggaggaaatcgaccagtacaagagccaaaacgtgtcagagactaaaaagacattcgactcgcagcatggaaggaatgtggaatccctatacaatctcgtggacattctagacgcacaaagagccagcgaatacgattcatggctgaaggtcgggatggcgctgaagaatacagtcgacgcaggaaccgacactcagcgcctcgagatatggaagtcttttgcaaaaaaatgccccgataagttctgtgacaccaagcacgaacaggtgtgggcaaatctgaagccgacaaatatcactctagggacaatccgcttccttgccaagcaggatgacccgatggggtacgccgaattgaacctaaaatgggacaacgccaacaaacagggcgaggaaatcgacaaggatcgcatcatcaaagacctcaaggtaaagctagaattggcaattgacaacatggtatcattgaatgtcgtaaacgatagcatcgagttcaagattgacaacggagcgaaaggaaccatccacaagagcaaatacatggtggaggtagatgacatatattctggatcgatgatcgacaagttcccaatccatgaagacccagggttcatcaagaacgtgcctatcgaccaaggaccatacgaatgcgagctgcggaccatggatggcaaaacaattaacagtgccatcttgaagagcaccgacggcttgcaaatcgcattaatgaatatgggaagtgacaaccaatacgtaaatgtgagatccaacacgagcaacgcaactatccgagacaagcaggtcatcaacacaatccataacatgatcttcaaggcgcaagagtcccacgcgaagaacatgtacgggatcacgcagaacatcttcctggtcaacaacggcaccatcaacatcaacatgaagaggggagatgatgatgatgatgatgatgatgatgatgatgatgatgatgatgactcgttttcgtcctcaatcaaagaggatacgttggcggagaatttcatggaggtcgcaccagaattcttcaccagaatcaagtgtgtgccaaaactcaacaggaaagaatgcgtaggtgacatgtactactgcgaccctgctaccaatcgatggtcgaacttaagcaacttgatgataatcaaagtaatcaaactcgagttcaaatccaaattccctgctgagaagaataacaagacgaataagaagattcgggggtttgtcgacacggttaaggggcgttctgtgttacttcaagccatcgcacttctcgtcctagacgaaacgttcaccgataacctcgatgtcaaccctgacctctttgcggtcaacaacggtgtatttgacagcttgtcgagggacaacgtagttttcagaaacgtagagattaccgacaatattagcaggtgtgcgaagtgggattaccagggagaggaggacaaccacaacctccaaagatgcaaagaggagctagacgacttctttctaaaaattctgccagtggaagaggagcgtgacgtcgtgctctcatttttcgcgggtctcctaacaggtcgacgcgatgagaagaaattcctagccttcaccgataaaacatccggagacaacagaaaaagtacccttatgacgctcatgggcagcttcttcagctcgtacaagagcagtaatggaaaaaatttcctgacaaaggggtcgtttgcaaggagccgggatgaccacgacgcgggtctcgaggccatgaaaggtctcaggctactggtggcagacgaaatgaaatccaacatccctctggacgaggcgttgatcaaaaacattgcggggggggagggtgtgtgtatcgaagggcgctcatgtggctctgcggactctttcgaattcatctggcaggctggggtcgtcatggtattcaacgaaggcgattgtccaaagttcgacggaggagacaacgcatttgtcaaaaggatgatcgtggttcccatacgctcaaactttgtgcaacaacccgacccagagcacgagaacgagtttgagcgacggaaccttaccaaaatattgcccacttggctgtcggcgctggcgcagctgttcatagagaacttaagtcgaccggggcgctcaagcatcttcgacaaactaccggtatcgatgaccgagtggaagtctggtattgcggacagcgccaacccccttgccgagtggctcgaggaggtggtggaggtgacgggggagtattcggacatggtgtgggccggggacctcaaggcccggtggatagagtcccactatggacccgcggcagcagtcttcagcaacaggctggtcaaggcattctttgctggaaaacagggaattgagtggaaagatagtgcaagaatcgagacaatatgcaaaaagggagtgataagggggtgtaaaattgttgttggttagacacgattgagggggcatgctttagcatcatcatcatcctcgtcgaacatcgtccatctgacgcgatcgaacacacgccggatttcgaaccctcgtacactcgtagacgagtataaacaagtcagcgtactcttattcactaaacaacaacactaatacaataataacaagtcagcgtactcttattcactaaacaacaacagcacacttctgtattcgatgcattcacggtactgatgctgagggacgagacggtcgagcaacgccttcacatcgtggacacggatggtctcattgtcggggaccgtccttaaggtcctgtggaaggattatgtcccattacagtcggacacatctcgtccacaatatcagacttccactctgtcataatagagtggaagtctgatattgtggacgagatgtgacgtcttgtcagcttcagtcttcaacaccaagctggtcaatggtatttgtcctttgttctttgcgggcaaacaatagaatgcaagaatcgataaaggggtgtcaacttgtttcactgtacacgtacacacgcaaatggaggaacacaacactcactgtcgacgacgatcgaaaaacatctgagtacacgcgcaaagagaggaggaacaccaatgtcagccaatgtccatcaatcagactgaatacacaagacacgcacgcacgcactctatcacgacacatcatgccgcatcctcacatgccgaggcggaggctttcgaatactcctcgtccacggtggcttgcgcagcctcatcaatgctcagatttatacaagagtcataaaatgaaaccgcttcgtgtttaataatggtgtagaaatccacggggcagtaaaccatataaacattatgtgtgaagaaacaggagcatcataaatgagcatcataaggctattagcgggcaagcggccacacctaatggtgtcctaccaggtatgcttgagctgcgacagatttctcagaatggaaagcaatggggagtcatacatacaatacgaactgcatagagagggtgatgtggtgcgcaacatcacattggatggcatggggatccaacatataaagtgggtgcggatcaatataggaggtgttgatgcatggacatggaaagctagcttgtcagatgtaggcaaaatacgaacgatgatagcaattcctacagtcggcggaacagtaaaatgaaacatatatcagatggaaataaatgtacgacatcgccgttagaaaattggcgttaagaatggtcgctgacttgggtgttaaaaacttctgtgtttacgaacatcagtcgttctactctgtggaggtggaaacgctttggtgtaaatcgaaaacgacgtgaatttgtaagcaacatttttgagacgaataaggatttgttaaaatcttttttattgtcaactcaatgcacaaccgcaagaggcgtcgttacttttttcaaaattactcacaatgtacgattatcaactaaaacagtgtatcgtttcataaaactcattggttttacaagaaaaaggagcaaactccgtggacagtgtaaaggggacttagatccacttgtcaatgaattttgtagtaggtacaaggagacaatcaatgctgggaaaattttagtatcagttgacgaatgtgggtttagtgagcgtctcaagccacattatgggtattccccggtaggaaaacctgttatcgttaaaactactggtgggtgggtacaccacagtttgttgatggcagttttttcagatggtaggaaagagttcgttgtgaagaaaggatctgtgaagaagacggacttcgttgcatttattgaatcattgagtttgtgcaataactcagtagtaataatggacaatgccagtatccataagaaattggtcctcagtcaccccgtcaatatttgttacacacctccttacagtccagaattcaatgctattgagctatgcttcgctaaggtgaagagagactttcgtcgtttgaactacataccgaatgaaacaaagacgcacgtgtctgatatgatttccttatcattcggcaacctcactgataacattattatggtttttttgaacacgtttggaacacttatgtgtataaagcggtctgtgacgtattgattatggaagatggcgacgaaacctccgacagtcgcgaaattgaaggagctactgaaattggctgaagtaccatactcgtcgaagtccaacaaggacgatcttgtccgtttatgcgaagacaatggtctcatcgccagaccccctccagaatacaagacggtggaaaagatgtgtgtcgtgaaatgcgccctgaagaaggcaatgagtcttgacgatgaagaattcggtaagtttagggagcatgtggaccagctcgtcaatgtggtgagccgcatgttacggcggtccagtctggtgctgactttccacatcacgagtctcttagagaaaggtctggagattccagacctgtacaacatgaaagatacctactggaaggattggctccgtatcggggtagacggaatcttccctgatgaggaaagcaagatatcgtatgaagctgtgaaggactccatcggcgatgtaattggtaatgacgacgctgactacatcaagtcttatccgatatattttgatcaggtattgaactatgcaggtcagacattgagcactgtcgtgtcaaacaacgcatgggttcctttgataccacgtctggccagactcacttccaccactttaaataaattaaatgccccgaagacgctggacacatcgaagatcattcggggatacgacgtgatgcaggctattcagcaagaagtccaaaacatggagggatggccagagtctgttcaagagtacgtcaatgaagttagggagatgctgagtgttccagatggaagtcgagtttatgataactatggcaaagacatggactttccgaccatggtccggtttaattattggatacagacacggttggaggatatggatgcacgtcgcatccgattgatgcccatcttcaatgtccaacgggtgcatgttcgccttgacctgaagaccctcgtgaacctgttcaggcacatgttccccaatgaccagaacatcgttgagctttccaagtgggaacatgtaaagaatcccgacagcttcatgttgccccagaggcctgcacagaagaagaaaaaatcatgtggtcctggtgaatgggaggcatacaagtcggtcctgaagcagtacgatgatgatgttaaggatatcaaggctactgacgagtacagacatgcaaagggtttgtatgacacgcttgtgaacgccaaaaaaacagtcgcaggttccttcttcagaaaaccacctgtcaagaatgggtgggttttcgactgcagcatctgtactgacggagtctccttgagcatgcagtacagcaagacagtacaggtccttgtctcagatctgaagaagacctgtaagaaccctcgtaaagaagaaggtatcaagatcgcagaaaaatacgacggctcacttaaaacgatattgcccgatatgggtatcgtcgtcctgggtgtggacccaggacggagcaacatcgctactgtaacgtatttggcagacgataaaaataagacatggacgctgacacgtggtgcattttaccacaagtcgggtatcaagaagcagacaaggcagaaggaactgcgttttgctgacatgattcctatgtgggagtctctgcgtgaaaatggagcagctttgagtacatcgaggacggataagatctcggcgtacttgtcaaattacgctttgttttctgaagagtggtggagattggctttgcgacgccgagaatcccgtgacaacttttagcgttacatcggaaaactaaaggtcaaagactctttctgggcgggtatcaagcggtgcatgatgaaagaacttcctgatatgaaggtttgcgtggcctacggatctgccatcacgaaactgaagcctactggaccgggagaagttgcagttcccactggggccatgttcgcatcgtgtaaaagaattttcaaagaggacgtttctgtgacagatgagttcaaaacgactcttatgtcgtgggagacgggtaaagaaaaagaacgtgtttacaagatcccaagcgtttgttcagcagacgtgaagcttaggttgggtggtgaacgttttggtcagacgaaatcgaaaacgatgccaaaggtcgctgattgcgaccacttaggggtaaggttgtacaataaacgtaaaggcgcacaagagaagcacaggaggggtggcttcgccatttcccttgtcgattctcaaaaatcgatcgagcggtacccagaggtacgaggactgcgattctctccagaaacatgcatttactcggaccgggatcgctcttctgctctcacaatcgcaaggctgcactgcatggaattgatgggtctaggacgacctcttccatttgcccacagcagctctgttgttgttgatgaataaaaactcgtattgttgtagacaccactcggtccccctccggtggtcgcgacaacattaggttacaccgcaaggtgtgccgtacacgaagcggtttcatttaagtattccgttgactgtatagcaatcaatatgatggcgattggataccacacttgtgcaatacagattggtatgcatcaaaacacagacgtgttgtggatgcaacaacagtatgaactgtacaatgatgaggaacggtaccaactggctagagatccaaaacagtacgacgagatggttacagtcagaccggtcaataatgttacagtatattgaatcaattaattacaattctctatgtacaacttggacagaccgagtgtacaacatgagggggaatcccaaattctgaagcgactgatgttcgtaaacacataagtttttaacacacccaattcagaaaccattctcaacgccaattttctaacggcgatgtcgtacattcttatttatttccatctgatatatgttttatgtttcattttactgttccgctgactgtagcggttgcaacaaccattgcgcttttcatgtacttccaccgtcgtgctgatgcctatcgtgctgaaaatgaagctactgcccggcgtgaggctgaggaccgtgccgacaatgaagctactgcacgttgcgcagaagctactgcacttcgtgcggaagctactgcccggcgtgaggctgaggaccgtgccgacaatgaagctactgcccgtcatgcggctgaggaccgtctcaggcaaaagttgttgtcgttctcgcctgatgacgttgttgctattactcctaaacatattgcggagtataggacggcgtgtgcttcggttggggtagcatttcatttggatcagcatgtattgtgattttctttgaataaatatatgtcacccgccccccacaggacctctacgtgtgcagcgtagcacggcaacactgaagtgagcttgcgacaaaatgggacaaagcactgggtggatttcagggtcacatcaagaaaacagccacgaccctagagtccgaacttgtgaaggcggttcgtggtcagctggatgacagccagttgcttggacttagctacaactggcaggaagtgcgacagtccatgcctggcgacgtcgatggacttgttgtcgggtggctgcgtggtgacagcagacaacaagtcgtggttgtgtgcgaggcaaagtatgacagtcgcgcaaggtatgctctgcgccccgttctgggatcgttcaagcagacagtggatgatggttgttgccacctgggtccttttatgcgcaaggacctcacgccactcaacgcgcacgccaccgatgccctttcgggtcacgagatgtccatgtacagacagccatagtccatcggcaaacaacggattgtattcaacaagcggcggagcccctttcacctcttccccccacctcttccccccagcgaccgggggcgaccggaggggagcccccacaaaggagtccgcgaggaaccgagcgggtgggcgactggaggggagcccacagttcgcagttcacatcaagcattagacataactacagtcggcggaacagtaaaatgaaacatccaaaaacaaataaaacaaatagacaaccgtttttttattgtctatttgttttattttttttagcttggttgggtatccagggccaccacgtggaggtgctgattttggccccgttttgtttctcttgttttcaaatacttgaaacagaaacaccttctcatccagattacttcttggtgtgggacatccctttgcgtgttaacacaggcttggcgacgaaagtcgggttgtcgtaaatgacgaataccttgggtcgggacgcaatgattgcgaagacgtcagagattccaaacatttcgtatgacagatgcagtatattaaggggtgtgaggaggttgttgttgtattcctaacgttccgaaaaacctttcaatttttttgtatttaaagattctcagaccacgcgatcgaggactcggggatgataccggcactcacctgccatcgctggtgcttagccaactgcttcaccaacttaattccgttcttgcgggtctcataagaagtctcaatcgtgtctacgaaacggtcaacaagcacgtcacttgtaaaagcacactgacgcaggcaactgaacttctagaaagaaagaatatcctcgatgttcttgctactacacaactgaactagggcaatggacaaattacccttcgtagtgctcataaccacttgaaaccgcgactgatgttcatatgcaaaagggggatgacacccttcacataatcgctcgagtgaaggaagccctccttctcggaaaaacgaatgtcgtgtgactgagcgtttaacattaacacagccagcttagctgcaaaagtcgcatctccagaagtcttcttacgttttgaagtagaagaggaattgcggggtgttgaagacattttacatacacatgtatacatgtatataaaaatagcctagttcctccggaacgactcgctacagtcggcggaacagtaaagttgtatacaggatggacacaaagacagtatcgtacgcaccttttcatgcgctccggcgtgatccagagtttgtgatcaactcgttcactaccgccatgatgccgttgaatttaagctacccgtatatcctcgaacctatgaatttcttattacatatccgggggtccgggggacatgtagtaagaaagacaatgaaattctccataggggtatcataggggtcaactccccaggggatgctgtcctttacgaacagggattttctgttcgaactgccttcaggaagatgccagctgcccccacaatgtctctgtcgcaggtgaattgacagttcttgcaggtgcatgtctctccacacttgttcaagaaaccgcacatagggcatgtctgacttgtgtaatgctcaagcacatgcaagaacactgtcccgtactctgcacacttctccttcagccgattgaacagcacagagtggctcaaagtcagcatctgacgggcaaccttggttgtcagctcccgttcagcactgattgtcatcttcgccgtctccatttgaggtaccaacaacacatcgtagcgagcggccaagaaatttgttgtctggtccctaaactctttcttgaggtaaaaaattctcttccgaatgcgaatcatctcagaattgataaataatataagaatctctacaactaaatggatatcatccccagaatgcaacacccgtgtgggaggacaagaatgtaacatcccgagttcaaactcagcgaagaccttctaaaccgcaataggggcaaacacatttggaaatgtggtcagctagaaatggcagaattacaaccataccgatgcatgaaatgcaacctgacaattgcagagctgcagcaacttggcaacactggagtttgctcatcggaatacagatacactcgacggaatactaaaatgaaaccgctttctggagtgtacggcacaccttacggtgtaacctaatggtgtagcaacacggggtctttgttgatgcgcagcgtcgccggtgtgaggtaactgcagcgtcgccggtgtgagggatggtcgaggtttcaaaaccttgcaacctctctgaggatgtatggaagagggggatgcagagggatttcattttagcggtttaatttttgtttcaaatgtttcattacccactctcctgactcttcagatatgtttactacaaaactaaacagcaatctggtccagaacgacgaacatcttcctaatcttcgtcggcacatactgagcgtcgatggtaggagatgctgcgcgtagcgcattcgcgtctggctcccctaccatacttattatgttctctatcacgtcaggtggaattgatgacaatagggttgggtccaactgtctggcaagacatgtgctttcgtttgggcagaagcggatcacggaatcgcccacaacagcgtcggatgcaatgaggcgggttagtctcctttctaatacattccactccacataaatctcaacaatgcatgccctccgtctaggtccatccttattgttctcccatgctcgcatgttttccaacagtgtcagtctcctcataagcgcacagacgagtccgttgagattgcatttgcggatatgaatattctcatgccacattttttgagggtctaagggtatgctatcgtccttgacgtacgcctcgaacgcattgcgttgtagaaacaaaacctgcaaacggtcaggaaatccaaacaattgacgcacatcggcataccttgcacattgcactccaatgttcaacgatttaaaacccaccttgaaaggcatacttgattatacatgcacagatttttactccttatgttgagcagtcagtaccaacatccaggagtcattcctcgaatccgcgattcatctttcatgaactgccgtctcaagcaggcgtctgcttaacaaactattccgggatcatgaaagggaatcgcgggacccacggagtggggcaggggaattcagatgcggactcgcggaaacacgtgtcctaggatctgacttgtccatcggaggaggacacacgcaaacggcggaacactgccgaatgtatcggaggacgcacgcaaacggcagaacacataataatataattacataattgtatataataatactaattacataattgtatgtgtgcccggactgcagaaatgccgccgttttccggtacgttcagctacaagaatgacaacttgtaccgcagactgatcggagatggtgtgcacatggtcatggtgcgactagaccctaacattgccaagatccggtttgaggtccaacaccccgtggctgaggatacccaggctgaggcccccatcatctaccagccaattcagattccagagggggtcacattgatagtagcagactctgccatccctgctgcacgaattgggaatgatttttttatcgtcacctggataggcaactatctcgttctaagggggggtaatgtacttttcaggatcttcaataagcaatcccaggcgattcaattagctgagtaacagtgtcaaaaagtgcccggttaaaatctcgaatttagcgcaaccgccgcacaggtcaatgtcctaacaccgcacctgtgctccagcgcccgcactgcgtcgcgcacgtggttgatctgttgttgcatgtgcatgttggctgtgatgagctcagtcacgcatcattaatgtcgttcaaatgttgctgcatgtgttgcatgatgcggagctcgcatgcaacgaactgctcttgggtgacgtagaagggtagttggttttgtagggggggcggctccatgttcatgtccctaaaggcgcagcagacaagaaaacgcaatccaaagaatccatgcacgccggcggctcctcgtccagactcgtcacgcacacgcacggaactgatgcggcggtagcggcttatcgcccagccccatcacgcacggcagaggcagcgtctcgtccatccttatcacacatcatgccacgcggcggcttgagaaggttgcaacagttgactcgtttgctttccgaaaataagtaaacctaacagtgtataaggaatttgcatgtactaaatatcagaatgccatgtatggcaaccaacgtttctgtaaaattggcaaggcctccgatgcccttggtgtctccaggaccgtcctccgtcgatgggcggataatggcacgatcagaacgatccggactccaggcaaccaacgtctctttgacccaagcagcatccaaggctacctcatcggaaaaaaaaccagcagtcgtcaagtcattctctacgcacgtgtgtcctcacacaaacaacaacccgacctgctcagacagcaattgttcttgcaaacccatatttctgacaaacattccggatgcgagcaagtcattgaagtcaaggacgtcggatcagggctcaacttcaagcgcccaggacttttacgagtattgagactcgtcacggcaggacttgtatcgtcaattgttgtggcttccaaagacaggctcgcaaggtttggtttcgagctcatttaatggatttgctcgaagcactcctgctcgaagcactcctgctcgatcatcgttctcgatcaccaagacggagcccctgaagacgagcttggaaaagacctcatgtccatcgttcaagtatattgttgccgatggaacggtcgaagacgctacaaagtcaaatgccaaacccaagttgaggaccttaaagctgaagctgaacccaacaaaggctcagaaatcgatgctggcagagtttgcagggtgcagccggttcatgtacaacaaggcggtggcagcacggttgggcgtcggcagcactcacaagtctgtcttccgaattcgagacaggtatgtgacgaacaaggtgaggggggaggggaggatgccaaacccgtacttcaagaatcgccaatggttgcttcaatgccccaaaagcgtacgccaaagtgcaatcaaggctgccttggcaaacatcaaggcttgcttttcgaatctgaaagcaggtaacatcaagcagttttcagctccgttcagacggaagaagacagagcttgagaggggttgggtcattgagatggaccagaagaacgtttccaaggatggcgacaaactcttcatcttcaaagacatattgggcaacatgcgctacttcggtagcaaacaactccataagttgatgcctgagttaaacccgacccacgatccaaaggtccacaaatcacgcttcggcgaatatttcctcgtcttgtctgtcgctgccagggacaggagggcagagcggaagcctgtccatccagacaaggttgcaactgcatccatcgacccaggcgtccgcaaaacaatggtcacgtactcaccagagaatgaggaatccttcatgcttggtcagggacaggcatccgaccttgtcaagctcctgctggttcatgacaagctgcagtcaaggttggatacttagaaaaccttacgaacaaaagagaggatgaagataaaaatgcagatgattcgcattcggaagagaattttttacctcaagaaagagtttagggaccagacaacaaatttcttggccgctcgctacaatgtgttgttggtacctcaattggagacggcgaagatgacaatcagtgctgaacgggagctgacgaccaaggttgcccgtcagatgctgactttgagccactctgtgctgttcaatcggctgaaggagaagtgtgaagagtacgggacagtgttcttgcatgtgcttgagcataacacaagtcagacatgccctatgtgcggtttcttaaacaagtgtggagagacatacacctgcaagaactgtcaattcacctgcgacagagacattgtgggggcagctggcatcttcctgaaggcagttcgaacagaaaatccctgttcgtaaaggacagcatccctgggggagttgacccctatgatacccctatggagaattcattgtctttcttactacatgtcccccggacccccggatgtgtaataagaaattcataggttcgaggatacacgggtagcttaaattcaacgggaattacagcgtgtcccactttatttgagagtaagagcacatgatggcgtccgtgaagactcgtcgcgccttgttaatttttccaagttactacgtagactggttgggaaatgtgcttatgcacacattgcaagagtgtggtacgctgccaagggacttgaaggggtacagatgtggcggagccatgaaggaccatgatatttttgtcaacaagttttggggttctggtatggagatcagtgttctcgaaggcaccgtggtccggaggaccgtcatggaccaattggcttggttgttggagccctccgtggacgttgctctattgttattctgtgggcatggcatgaatgaggggtcgccacgtcacggtacattagtatgttcttacaaacagctggtgtcagatgaggccatcgatgcggtggtggcagagcaacgtttttgcggcacactcatccgcgtgctcaacatgtgcgaagcagatgccattgcccccggcattggtctgccgttccagcacggaagatctctgcgtgacgcagcaagagcagatcatgatgcacagttccatcgcgttgcacacaaggacgtgatgttgttggcaactgggacttttgaagaaacggcaggtggcaaggcaggcacacccttcatcgctgccctgggcagaatgtttgacgcagagtcgatcttaacctacgagcgccttgatgagctcttgcagaggcactggcctggtggcagtgggagggcactgctgtatcctgcaaggttgaaagggatcttcggatggccggctaatggttcacaggtgagtgcagaccacaatacgacgactgactgaccaagacgtcttaagacgatcaccgcgcacaaaatcatcttatatcaaacggcggaacgatgtcgatactcttgggggagcactcattggatgtgattcgatgatgatgatactcttgggggagcacttattggatgtgattcgatgatgattggtgtctccttggtggtttggatgtgacggcctcgtccatcattataaagggtgtcccactttatttgagaataactatagaatgacagattacgcttcggacatcactgtgtcgggtacgtccgacttgatttgcactggggtccaagatgttcatcttgatacaattgaaaagcaaaaaacattggaattggcccgcctcatgagaggcctcgtgccctaatggggtagtgattacatcgaacgatacattcctaacgagctccagtgccagttgcacaacaagagaacatggatggatgaagatggattctggtggggatttgacaaagtctgtgctaggaagtataagcagactaacgtcattattcttgctacgaagtatcacggacttgggacatatgaacataaagtactggtcactctaaataattcggtacatgtggtgtgggaagacgatttatggtgattctgatgctctttgaatcatacgggacatcgcatgttttgcatggcagccaatggccccaaatagcaatggggtactcaaagaacagcagtagcaaccacagtgaatgcggttgcgtaagactcaatgcggctttaatcgacgacaagtgtttcgtgtgcgtttctaaaaaacgagtctaaacaacgcaacatacatacctgataaaaacca

SEQ ID NO: 207 - DNA, 21737 bp, unidentified
  source 1..21737: mol_type = other DNA
  misc_feature 1..21737: note = Fanzor polypeptide
tattggtgttccactgccccgtgggttgctacaccatttggttacaccgtaaggtgtgccgtacacgaatcggtttcattttagtattccgttgactgtacacgaaacgttcgtgatcctgtgttgtaaatctatctatcactcttcttcacgtgcgtgtgcgtgcgtttgcattatcgcatgcattcggtcgatagtacaatgatcaatgaatccagtctcatgcatgtgaactgtggggccccctcccgctgggggggggtgtaaggggctccacagtttgcgtcgtgtgtacatagatggctggatgtgaatcgcggaagtccgatatcatgtttcatttgcggtattcgaactgtggaagagtccttggtggcatgtcagggggggggctaagaacaatatcagaggcgatgactttaaacattacagtgcggctggcgcatcctatgaatcataaatacggtgtatgcaactaaatgaaacaaatttggtgtatacaaactcaataaatcaaattttgtgtatgcaaccaaatgaaacaaatctggtgtatacaaactcaataaatcaaatttaatgtatgcaaccaaatgaaacaaatctggtgtatacaaactcaataaatcaaatgtaatgtatgcaaccaaatgaaacaaatctggtgtatgcaaattcaataaatcaaattttgtgtattcaaccaaatgaaacaaatctggtgtatgcaaattcaataaatcaaattttgtgtattcaaccaaatgaaacaaatttggtgtatgcaaattcaataatcgaattttgtgtaatcaaccaaatgaattttgtgtaatcaaccaaatgaattttttgcaaccaaatgaaataaattttgtgtaatcaaccaaatgaattttttgcaaccaaatgaaataaattgtgtccttatcattcaggtatataccatacgatgataccatcaacaaaattaactatcaccaccactatctcaggtgtgaggatcgacagacatgtgtcaacaccaccaaaaaaatcaccaccactatctcaggtgtgaggctcgacaggcatgtgtccaactccacccaaaaaatcaccaccactatctcaggtgtgaggctcgacaggcatgtgtccaactccaccaaaacaaataaccaccactacagtcggcggaacatagttttagatttccatagttttagatttccagggtcagggtcattaatgcgttcccaacctccgcacatgtgctagtgcggatacaggttgtgtagcaaaatattattgacggatcctctcccaccccttgaccgcatccgcattctccttcacaaacgccacccaggtgtcgctgcgcatgaaggcagcgaacgcttgcaggtccagcagatcgtcgaccggctcccaggtgtcgtgctcttcagtgtaggatttccaccgcacctgcgcacaacgtgaataatgtgtgtcaatcatgcggtcagtcagtcagtcagtcagtcagtaatattaatatgtaaagataggaatcctttgaatttgttggtcataaattctgagtagaaatttcaaaaaatccgccgtgaggcaggaacacccattacttacttggaacattgggataaacaggtagtgatggtctataataccaacgcaatcgttcccaaatctcatcttgacatccacaatgctgtggaccgagtatcttgtaccatcactgaaaaagtttacgtgacgacctttgcaagatagtcgaatactatcaacctgcagcacccaatgaattgaattgaattgaattgaattgaatttaaaactcagtcttctccagcttcactgcatgtgtcaacaaccagtgcccccaggacactctctcatgcacataaccccgcccctgcccccaccactaccacacacatacactcagtcttctccatcttcactgcatgtctcaacaaccagtgccaccaggactcaagaaaaacgcaaggcaggggggtactcacgctgacttccagcgaggatgacgtgggcgacaggtgcggagggcgtggggtagtagcgccagtggacagggtagtagcgccagtggacagggtagtagctccagtggacaaggtagtagcgccagtggacagggtagtagctccagtggacaggggagtagcgccagtggacaggggagtagcgcccgtggacaggggagtagcgccagtggacaggggagtagcgctcgtggacaggggagtagcgccagtggacaggggatgagggcgatggagagaggacaggggaggagggcgatggagagaggacaggggaggagggcgagggagaggggacaggggatgatagcgagtagagccagtggacaggggatgatggccctcaggcttaaaggccacattgggggagttgcaagtagctcccccaataagtaactccgatggggagaagggggggtcctcatcatccgaagatgacgacaagtttgtcaggtcgatgacgatctgcgccagcaataaaaagcagtgtaaacagtgaaatcagtgccccaacaaaatcacaggggcagccgtcagtagctgggaaaacacgcgcgcacgcatccgtcagtagctgggaaaacacgcgcgcacgcatccgtcagtagctgggaaaacacgcgcgcacgcacactcactcaccacatgcatagtagtttccatctcgatgcaggattcctagaagaaaaggagtagaatagtagtatagagtagattagtagaacagtagtttttacaagtagacaaaggacgaaaaggacgaaaaggacgaaaaggacgaaaaggacgaaggacgggttcggcggaatgctggctgaccgcatcgtcgcgcgagctgaaacatgataagggtttagtaggttcatatgctcgttccagcgatgatacaccacatctttcgctggttaccactcaattcctggaaattcggaagcccaaggtgaggtgtctttgaaatagcttccaggatttcgcgacgagttgcatcgcctgttcgctaatttgaattgcattgccgaattgcattgctcaggaagtgctcgctcgctcgctcgctctctcaggaagtgcttgctcacatggctcagaaagtgcttgctcgcatcgctcaggaagtgcttgttcgctcgctcaatcgcgtttgttcaatcaaccaggtgaagttggtcggatatagcttacaggatagttgttagatgctgctgctgctgctgctgctgctgctgctgctgctgctgctgctgctgctgctgctgctgctgctgctgctgctgctgctgctgcaatgcctgcctgcacagtcgcaattgttcgattacttacaggatgctagatcgagttgagatggtcgggcctagcttacaggatagttgttagctgctgctgctgctgctgctgcaatgctgcaatgcttgcctgcactgtcgcgactgttcaataactgacaggatgctagatcgagtcgagctgttcggatatagcttacaggatagttgttagctgctgctgctgctgctgcttctgcaatgcttgcctacactgtcgcgactgttcgataactgacaggatgctatatcgagttgagatggtcggatatagcttacaggatagttgttagatgctgctgctgctgctgcaatgcctgcctgtactgtcgcgactgttcgataactgataggatgctagatcgagttgagcttttaggatctatattacaggatagtcaaatgctgttgctgcactgccttcctcctcccctgactgattttatgctccattgtttcgtaacacaggaaacatgcccaagtcaacacaggtagcccagaatactaagggaccctcgaataagtccctaagaggtgtgaggaaagctgcaaagctaaaggctgcagcctccgagtcaatgcgtagtccttcattgttcggatcagccttggtagttgaaggaagtgggggggctgatgcttttaaagaagacacatccaatcttggtgagtaatttgaatttattagtagccagatgtgtgtgtgtgtgtgtgcacagttctgtgtggaagtgcatggatattatagtattgtgcttgcatatccgtgtatttgagtgtgtttgtgtttgcatggggtcatcttgtagtgcatggacatccagatgtgtgtgtgggaatgcacagtgaagtgtggatgtgtaaggatggcaatttattttgtgcatgcgtgcgtgtgtatttgagtgtgttcatgtttgcatggggttgtcttgtagtgcagccagatgtgtatgtatgtactagcacattgctgtgtggcagtacacggatagaaaatttctgtttctgtgtgcatgcttgattggctgagtgtgttcatgtttgcctgatgtgtgtgtgtccgtccttccgtcacaaactactttagggattcacctgttatcacaataaatcgaatcttgttgttgtccttaaactgacacacactgcattccccatggaaccccattgcacagggatgactgtgaaatccatcctgaagacctcacgaagaggagagttgttgatgtgcataatgaccatctcaattctcatgggagcagccttcattgaggttaacaccaaaggaatcctgcacgctacattcaacccagaagctgatttcttcaagcaaccccttgtgagtttgatttgtgacatactttacttgtttattcataggtttctcttgattgcaatgttactgtcatgttaagcacttatgtatggtcatactgatgcaagtaatggatgctacctttgcattttgtaatgttactgtcatgtcaagcacttgtgtatggtcatactgaatcaattaatggatgctacctttgcattttgtaatgtatttgtcatgtcaagcaattgacgaattcattggcaattgtcagccctacttgtaggatgactggtgcagtgagatgtgtcttcaaacagggttgtgcccttgtcaaattcataggtttttcttgattgtaaagttactgtattgtcattcacttgtgtatggtcatactgaatcaattaatggatgatgccttggcataaacttatgtatgaattgacgaattcattggcaattgtcagccctacttgtaggatgactggtgcagtgagatgtgtcttcaaacagggttgtgcccttgtcaaattcataggtttttcttgattgtaatattactgtattgtcattcacttgtgtatggtcatactgaatcaattaatggatgatgccttggcataaacttatgtatgaattgacgaattcattggcaattgtcagccctacttgtagaatgactggtgcagtgagatgtgtcttcaaacagggttgtgcccttgtcaaattcataggttgttcttgattgtaatgttactgtattgtcattcacttgtgtatggtcatattgaatcaattaatggatgatgccttggcataaacttatgtatgaattgacgaattcattggcaattgtcagccctacttccattacattacattacatgttaaagtctacttgacaccgcgagggtgtatgagactctgtgctttaaacaaaaagaaaaagcacccacaaagcaaaaaccccattacatcaggggtgtgtcgaggacaaacaaaccaaactcccaaccaccgttttggtggcgtaggtattaaaccccttagagccggacccagatctcaaccacttacagtggcggaggtaagaagctaacaaatgagaagtcacaagaagaagaaaaaaagggatgataaattacggtgccactaagcagtccacggcttcctgtcttgctcttctacaagtagaaagatagtcggctaggttgctccaaaaagacttagtgccatttccattcataaaggttctgaatgtggaatcgcagaattccacattccatacggttaagttggtatcctcatggacatgcctataaatatctgtaaacagcttctggtagcggaggcgaatatcattatacttgtaggatgactggtgcagtgagatgtgtcttcaaacagggttgtgcccttgtcaaattcataggttgttcttgattgtaaagttactgtattgtcattcacttgtgtatggtcatactgaatcaattaatggatgatgccttggcataaacttatgtatgaattgacgaattcattggcaattgtcagccctacttgtaggatgactggagcagtgagatgtgtcttcaaacagggttgtgcccttgtcaaattcataggttgttcttgattgtaatattactgtattgtcattcacttgtgtatggtcatactgaatcaattaatggatgatgccttggcataaacttatgtatgaattgacgaattcattggcaattgtcagccctacttgtcagccctaggttgtcagccctaagttgtcagccctaggttgttcttgattgtactgttactgtcatgtcaagcacttgtattgtcaaaattaatttactcccctttgtcttaccttatttaatgtatccttttttttgtagactgacatcagagacgctcgcgtgaaggcgtccaattccgattcaagtgcaggctgtatgtattgcagaattaaaaccgaaattctgacgtacgccaatgagaaccatcttgtgtgcccattatgttgggatatgagagtgttgggtcctcacatgactatatttttggataaggacatctctgctgtagctatgaaggtgttggagttagtttctaatgcggcaattacgattgatatgcacagatacgctcccactattgtctccacatcgtgggaggtattacccacagcatccgagctgttcagaatcattcaggactccttcgattctgaagagaagtttaacatgctttccgagaaaataagaattaatatgtctcgtgtcactaaattgactgtccaaaatactgagtatttcatctcacgtgtatacttccaaaccacattgaatttattgcacaacaatcagctagatagtatagcgaaggctctatttatggacgctgctgcagtcaatatccgccctgaccagaacatacgtatgaaaacgatgttgtttctgtcaacgcaaggaggagatggaactggtttacattgggatattacccggggacttaatgttgctttctcattgaccccaggtatgactggtccattagcatattggctttttatccccccttggggatttgaagaatttattgcttttgtgcagtctggcaattgtgtgaaggtagtcagagacaagtttgaggaagctattagactaaaaactgacttccccttgttgtcagcggatgaaatgtttcaattacatcgccaagtccccaacttggtccgaattgtttcccaaagccatggacaggtagttcatgtggctccaggatggattcacagtgttgtgaatgttttaccaaattggaagctagcttttgatttcgaaagattggaagagttccctttatatgcatattacagaaaaatatttggatctggttttttcaagatagatgtccagaagattacgtcacacaagatgcagttatcaaagacaatgttgatatgatgacgaagggccatgtacccgactcgttgacacaagcaacctaaaatatttaatgggtatatgcttgtgtatttatatatgtgtcccactttatttgagaactactgtgcctaatatttacacattgacatataatgggtgttcctgcctcccggctgattttttttaatttctaatcaggatttagagcctcctgaacgactcgctaacttgagacatcagcactaaggaatcacaaatccactccataccatgtttcgcaaccagtcaaaatcggccgggaggcaggaacgcccattatatttgacattttgtaaaacatcttaaattgactacaagctccaaagcaccagtatcacactcctatcggtcagtcgacagagtggcccagatttccctggcctcatcctcaagattttccagttcctgctctgacaactgtggcacacaacccggtggcacagacttgactgttactacatcacaaaacttagaatcgaacccgtccatctgcactttctcctccatcaaaccacgttgtttcaccgattcctggctcagcggtcccggtatgacctctccatgggattgcatccccgtaagaatgatcgtcagcatcactgcagctgctgcaatcgcttcatccaatgtctccccaccaccaatgacggatgacaatccgggcacccacacctcgtggaattcgaaaccgtcccttgagcacttgttgtgaacaccaaagaattcgtacgaatcatcatactcaaaaaatctggtaatcatggcgatcgtcgtcctgcaaggaataacatatgtttacgctgtagaataagtgggagcttaacggcgccggtgaaataccgctacttttaacgacaccttgtattttggggattctgaaacctagccccaaacaagttttgcatgagcctccgcatcttacgcaaccgctttcactgtggtaatgggcagatgtaagtgcattcactacctccatcatgctcacgtctggacatgaggtaggcatcacacccatgcatctcatcaatacggatcctgtcgagttacgtcacacagcgaccaacacgaccggaggccaaggaggaggagggggagcccgtggagaactcgccagcagacgtggcggtaccacttaagtcggcggaacagtaaaatgaaacatatatcagatggaaataaatgtacgacatcgccgttagaaaattggcgttaagaatggtctctgacttgggtgtgttaaaaacttctgtgtttacgaacatcagtcgttctactctgtggaggtggaaacgctttggtgtaaatcgaaaacgacgtgaatttgtaagcaacctttttgagacgaataaggatttgttaaaatcgtttttattgtcaactcaatgcacaaccgcaagaggcgttgttgcttttttcaaaagtacttacaatgttcgattatcaactaaaacagtgtatcgtttcataaaactcattggttttacaagaaaaaggagcaaactccgtggacagtgtaaaggggacttagttccacttgtcaatgaattttgtagtaggtacaaggagacaatcaatgctgggaaaattttagtatcagttgacgaatgtgggtttagtgagcgtctcaagccacattatgggtattcccctgtaggaaaacctgttatctttaaaactactggtgggtgggtacaccacagtttgttgatggcagttttttcagatggtaggaaagagttcgttgtgaagaaaggatctgtgaagaagacggacttcgttgcatttattgaatcattgagtttgtgcaataactcagtagtaataatggacaatgccagtatccataagaaattggtcctcagtcaccccgtcaatatttgttacacacctccttacagtccagaattcaatgctattgagctatgcttcgctaaggtgaagagagactttcgtcgtttgaactacataccgaatgaaacaaagacgcacgtgtctgatatgatttccttagcattcggcaacctcactgataaaattattatgggttgttttgaacacgtttggaacacttatgtgtataaagcggtctgtgacgtattgattatgaaagatggcgacgaaacctccgacagtcgcgaaattgaaggagctactgaaattggctgaagtaccatactcgtcgaagtccaacaaggacgatcttgtccgtttatgcgaagacaatggtctcatcgccagaccccctccagaatacaagacggtggaaaagatgtgtgtcgtgaaatgcgccctgaagaaggcaatgagtcttgacgatgaagaattcggtaagggagcatgtggaccagctcgtcaatgtggtgagccgcatgttacggcggtccagtctggtgctgactttccacatcacgagtctattagagaaaggtctggatattccagacctgtacaacatgaaagatacctattggaaggattggctccgtatcggggtagacggaatcttccctgatgaggaaagcaagatatcgtacgaagctgtgaaggactccatcggcgatgtaattggtaatgacgacgctgactacatcaagtcttatccgatctatttcgatcaggtattgaactatgcaggtcacacattgagcactgtcgtgtcaaacaacgcatgggttcctttgataccacgtctggccagactcacttccaccactttaaataaattaaatgccccgaagacgctggacacatcgaagatcattcggggatacaacgtgatgcaggctattcagcaagaagtccaaaacatggagggatggccagagtctgttcaagagtacgtcaatgaagttagggagatgctgagtgttccagatggaagtcgagtttatgataactatggcaaagacatggactttccgaccatggtccggtttaattattggatacagacacggttggaggatatggatgcacgtcgtatccgattgatgcccatcttcaatgtccaacgggtgcatgttcgccttgacctgaagaccctcgtgaacctgttcaggcacatgttccccaatgaccagaacatagttgagctttccaagtgggaacatgtaaagaaccccgacagcttcatgttgccccagaggcctgcacagaagaagaaaaaatcatgtggtcctggtgaatgggaggcatacaagtcggtcctgaagcagtacgatgatgatgttaaggatatcaaggctactgacgagtacagacatgcaaagggtttgtatgacacgcttgtgaacgcccgaaaaacagtcgcaggttccttcttcagaaaaccacctgtcaagaatgggtgggttttcgactgcagcatctgtactgacggagtctccttgagcatgcagtacagcaagacagtacaggtccttgtctcagatctgaagaagacctgtaagaagcctcgtaaagaagaaggtatcaagatcgcagaaaaatacgacggctcacttaaaacgatattgcccgatatgggtatcgtcgtcctgggtgtggacccaagacggagcaacatcgctacggtaacgtatttggcagacgataaaaataagacatggacgctgacacgtggtgcattttaccacaagtcgggtatcaagaagcagacaaggcagaaggaactgcgttttgctgacatgattcctatgtgggagtctctgcgtgaaaatggagcagctttgagtacatcgaggacggataagatctccgcgtacttgtcaaattacgctaagttttctgacgagtggtggagattggctttgcgacgccgagaatcccgtgacaacttgcagcgttacatcggaaaacgaaaggtcaaagactctttctgggcgggtatcaagcggtgcatgatgaaagaacttcctgatatgaaggtttgcgtggcctacggatctgccatcacgaaactgaagcctactggaccggaagaagttgcagttcccactggggccatgttctgcatcgttgttaaaagaattcaaagcgagacgtaaattaggtttgccgactttgtactttcttatattctttagttccccttgcttttggcccttccgggttgccactttacggtaaccgatctgtactatctgatacctatgaatttctgatatcacagagtgggcgtcgggggttttacatggtatagtagggacaagacaagaattctccataggtgggtatttccatcggggtcaactcccccgggggactgcgtcctttacgaacagggatttttctgtcgaaccctgcctgtatcttaaggaagatgccagctgcccccaaaaaaggtctctgtcgcaggtggaattgaccagttcttgtatggcgtatgtcgatccacacttttcaagaaacaccgcacatagggcaggtgacttgtgtaatgctcaagcacatgtcaagatcatgtccccgtacctctgcacacttctccttcagccgattgatacagcacgagtgtggcctcaaaagtacagcatatgcgggcaaccttggttgcttgactcacgtcagcacgttgttcactcttcgccgtctcagcatgaggtaacaacaacacccttagtgagcgctttttttgtgggcaagaaatttgttttttgttctgtctcctaaacctcttcttgaggtttagaaaatgctctccgaggcgaagcattttgcttcgttatctttcaatcctctgctctttgatcggtagttttctcaggatccaccttgactgccagttgtcatgaccacagctagggtttgacaattggtcggattgagttgtcccgatccaagcgtcatgagcattcctcattatctggtgatgtaacttccggattgaccattgttttgcggcgcctgggctccaatggatgccttttcgttcaccgtgtctggatggacaactggctctacgtgcctacgtcattcgacttgtgagccaagcgtttacagaagaacagaccgatggaaatttataggccacgatggggactcttgtgggccacccgccctccctaatttggactcggttgttgggcggcgttttccgaggatataactctatggagtggtttgtaacgaagtagctgcatggtgtcccaattgtcttttgcaagatgaatagagtttgtcgaccatctggaaacgtttctgtcttgatccatttctcaatgggccacaacccccctgcctcaagctctgccttctacggctagaacggagatccgagcaaatgcttgatttagtactgctgccggacttccggaaacgcaagacttgctgtttgccaagtttgccgcctgagtggctttggcgttttaagctgttgtggcactttgaagttcgtatgagtaaccatggcgatttttgaagtacgttgtgttgtgcatcttccctccccctcaccttgttgtgcgacttataccgtgtttctcgaaaaaactttcgtgaaggacagaacttgtttgagggctttcccgacggcccctagatcacgatgctgccacccgccgttgttgtacttgaattcacgtgactgaccccgtcaaactctgccatgcttcacgatttctgagccttggttgggtttcgcttcaggctagtttatttttacttgcgtcctctttaaggggtttggcgggagtggacttttgtaccgtctttcgaccgttctgagcgcgaatctcatactgaaactgatggacagatggtctttccaagccgtcatccagtgaggctccgtctggtgatcggagagtagatgctgagtcggagtgcctgtgagcaaatccattaacccatgagcttgaaacacacttatgggcctgcttgaaccgcccaaagtgcaattgacgctacaaagttcttcgtgacggagcccaatactcgtaaccagagttgcattacgtttgccctttgatcgccgttctcttacttctcctcctctctggaagtttgtccatacaatttgtttcaataacacttactgtcttcctgcctgccgatgccttttttctgtttttcgattaaccaattgtattttattttttgtgctttctgatcgttcctttccttttcttatttctcagttgtctgtcggcggttaaggaggatctagctcatgcttagaaaatgttaacaatacggccgggatcggcaaggaaaagttttcccattaattgcctagaatttcccgttcgttgcttggtttttctttgagcaggtctgggttgttgtttgtgtgaggacccacggtgcgtatgcgaatgacttgacgagctgctggttttttgtcgcgctcgattgaggtagcttggagtgtgattgggtcaaagagccgttttgtgcgctggagtttcagggatgtgtccttattatccgcttccgctcgacgttttgagcggcacagttcttgtgagattacaccccgggccataggcgtgccttgcccaatttacagacgggttcgggactactggcatgtctggaatcgttacacttgccttagagtccttaacccgcggttaggtttattctcttttgggcaagcaccacgaagagtgaatgtcttgcagcttaattcctttttctgtgacgacgcgaagatactttgttgctcgccgaacgtcgagtgtgagtggaagacatgtattacattgtgttagaatgaattcctaaactgttgcaacttttaaccccattgaaagggtcacggttcgaattttctcgtccactcgtcagcgtaatgaaagctgtaacaacccattccttctcagtgtccagaaccgactcatttactgttccatgagtttctttgcgaatcaatgaagatgtattggtgatcattctatgccactgctgattctcgaacgcagcccctccacccccgtggtgtctcgttggccaaagcagtggagatgcgtcgcactgtctccggattttcgtgtcacaatggattccccataaggacatttataaacagtttggatatcgtctccgctttttgcagtggctcccagcgtgtaaaactctgtatcacatagggggaaagacgtaaagaccatacgaaaaaggtcgggctcgatagcagccttgtccgggatcttacttcgtggtcactcgaccgttgtacacctagttgaccgacaatcacccccgctccggcctatgctttcgttggttcctgacccttttgaacatgtcgtcgtccccagtgtggacgacctatcacacgtcggactcaaatgcgttgcatcactcgaccttttccgtacacacttctggaaacgggacatatcggccgtagaaggcctcgaattcatttgttcacccgaacatatgtaccaaactcggtgttggcttacgtattcaccgctgtcggccctcactcattgatcacttttcgaacatggatgattacgaccacatgggaatgaaagacatagtcagccctgtcggttctcactggaggttgggttccccttgagaaaatagtgttggtcaacgccgtgtggacgaaatctcactactgtacccggcctcacttcgttgtgtgcctgatggcatatatcgatgttattgcacgacgtgggtccgaccgtctacctctgtccgcctgctatttcattgattcacctgaactgggaagtacgacacactagggggacgcgtatatctaacacgagactgtatactgattccttcgaggtggattaaccgtttggctgcacatgtcgtcgtcctcacgttgtggcgcccgtgggacgaacaccacgtcctctccagactcgttggttcatatggatatactcgtcaagcgacgtgggctgctatagcatccgctgcggctcaattcattgattcattgaaacatgagtacccaaacctggtcggaccggcaatcacgatgtccggatttctcacttcgttgttgtcacgcctgcctacatatcgtgtaccctacgtgaacgacctccctatcacctctgtccggactcgctttgtggagttaacccgaccatttgtcttcgtcacacgtgtgggcgaccatatcacactgtcggactcacgcgttgctgcacccgacccatttccttgaacccactaccgggacgaccaatcaaccgctgtcaggccttcactcgtttggtctaacgcaggaggactgctgggggcacgctaagtattcagtgtgactcccttaatatgacgttaggtgcaaaataccaaagaccccgctgttctttgggccatggtactggggatattaggcacatccccttagtgcggatgttcttcaagtctgcgaagttagggtcagacgcacattggttgtggcgctggttcactgataaagacagagcgcgcccgtgcgctgaatggaccaccatggcacttctcttttcacatagactgttaatgttgcccggccactatgtggttgacgatccgacgattgaacatatgccaactactgtccacgtggtgcattggtttgtaatgcgacttggtacggactgtcgccttggatgcacgttcaccgcaacaccggcagacacgggcccgacagttgtttgttgctgcttggccatccttttctgagcttagtttgttcatcatacagactttttgttacacgaacccaaatttgagcgcccctgatccttgcactccaaaagataccattgaagcagttggatctatggtctccgccttccaagcgcgcgttgattgttagggcgctctcgcgtgacaactggatttccagacaactggctgtcgatgtaactgtatgaatgtcccctgaaataagaatccctccatttgggcaccgcacagtgtagcggaatcccgcaagtctctcatcacagcggtcttgcacgatctgacaacaacaatggccagaggcgcctcctgactgatggatgcaaaataatcaacaacaatttctgtatgtacaaatcactcacaaaacccgttcctgtatttgtgttctttactggcacgacaagtcagcataatatatttaataggtggagttgtagcggaatctaatggcgggaatactctaccacacgcaccaccaagcgatgattgtctgcgggtgtagccccgaagcctttcaaccgactctgtagcgggtgtgtcgccttctcgtcactcgtatcgctatgatgtgaaaaatcaccattcatctttccagtaaacaaattcggcatgagttcttgacgaaatcaatgaaggtagtattggttagagattccgtgtctatcacatgcggtgattttcgaaagaatggccacctgcaaaaacaacgcggcatgtccgtcgcaaaacagtggaagtattgctggtcgcaccacggttgtgtctaaggagccacctgagtaccatttagtacagttttgatctggtctcacgcattgggtacggcgcgaagtagttggttgaacactattggtcttcaatcgtgggcaatacgtcccactacaagaaaaaaatgtcgtacacctcgcggcgggcgaacaatggacctatcacgttgtccggcccacgagtgagttcacctagacatttccgcacacagacgtgttgaataatcactctgtcggatttttatcgactggcgttggtttcttggctatgtgcgttacagcctcaggcggcggaagcctatatagcgtgtcctgcttcactcgcgtttctgggttcacctagtacgattttccaaacagatgtgttgggcatattcaccgctcgctcctggttggagtcgccttgcgttggtttatctgtgatatgtcatttaccctcagcacaggcgccacgaccgtctcactctgctccgggcccctccccttagttgcttatagctgtagctttagcgggtgacaaccgaccaggaagactagatactcacctccctgtcgcgggattgctcaccgtcgttgccgacctaacatggtggcccaggcatacgaccaagtgtttgacaatcaccgtcggcacctcctgtcgttgatgtccgcgcttttaaatgacaatcccttacagaacgtgtggaaaacatatccaccgcttttcggctcactcagatggttcacttctgaacatgtcgtacacccacgctcggcgaataccatctcccccccctggtatatcacctcgtatcgcagcggcctcaactccgtttgacgcactctggataaggtcgttacaacgaagtggtgggaagacatgatcacgactatccgccctcacttgtagacacacttggattgtagtagaaccatgtcgggaatcggtatcgtctgccctgaactatcagacggctgtgtcttgcggactcacttcgttgatcacttggatattgctgaccgcttgtggacaaccaatatcactctgtccgtctcagctgtatgatgacgcaccttgcagttgggactgacctgtgcgttacccgtagtggtatcagacctcttcacgcgtgtgtcccgattcgcttcgtggtgttgatccgtcttaccttgtcgaccctcgaagacaggatcatgagcttcttgaccggctgtccacggttcggtctcacttcgttggttgcctgccctagccatttcacactcgtcaccgctcgatgaaccgactatatcaccgcacgacttacccgcctcattacttcgttgttgtcgcatcacgcaatattagcgcaaccgcgtgacgacccgaactaaccaacacctatccgcttccggcctcattcgttggttcactgaatatggagaccgtgcaccgcgtgggacgattaatattttcaccactggtccattggcccactttcatggtgccatccctggccttagtacgaaaacgcaccgactgtgggcgaccatatcccgcttcgggctcacttcgttgatttttttctctgaaaatgccggaaaacggttgcaagtagtaccgaatgttcccgttgagcgggaaggaggatttcaggtgcaacggaacgaactactaccgtcaacggccggaaacagtcgacttccattccgttggccatccgaccacgatgcgggcgtcggatattgtatttgtgatgtgtcaacccccacctaatgggtgtcttgttctcccggcctctttttacctttcttatatcaggattttttatgagccctctctgaacgattcgcgctagcttgagacatcaacaccaaggcctcacaactccgctcccataccatgttgggcaaccagtccaattcggcagggctggtccgggaagccttccaattgttgactcttgtattgcatggtcacacagccccgtggagcgatcaccattgttatggtacctttgctggccctgttaccgtgtatcgggatccgccgacgtagctgcctggtggcggttagatttatacgtacctacttccttggccttttaagtggaagctcgacattatccgatgacaagtggttatggaccggggatcgcgtgttgagcgacgcggcgtcaagtttatctctatctcctcccgcgttgcttatggctaaacgctccttccgtcaaggtcctccccgagtatacggcggtcgtattactcttcgataaaaacgatgagaggcggtgccgccgtgcgcgcacccgcaggcgtgcgacctggacacaaaggcgatccgcgagcacctgcagcacatcgcaggactggacgggcttttctaggactccgaaaaagcaaagtctaaagcgtccaggtcattgtcgattaaaaacttcatgcgcaagcaaggcaaggataccgtacagacgagcatttacagtggggacacactgtttgtcacctgctgctatgatgacatctattcgatcacggtgatcccgaacgaaaagcgacctagcacaccgctgtccgatgaggacacactgcgcagcctgtgcgcgctccgcgcagtcaaggtatcgaagaaatcccaacaacaaaaacaacaacaacaacaatcaaaaataaacaaagcttacgacgtggacggcccattcctggagactcgcagcacaaagcacaaaaacgcgaccgttgccggcgtggcgagacagctgcacgacgctgaagcagcggtcctggtacgagcgaacgaggagggaatcaccggcgcgcagatatttccgtggagcggcagaatcacaccacagggcgacgccttatacgagggaagcttccacgtctgggtgacgctcccgcacgatcgcattgtagacatgaccttgcgcgagtacaagctgctgcaactgcagcacgcgtacctgggccatcttctgcagacggttgagccattgctcataagtcttttctcgggcgacccccgcgccctgggcgacgacaagaacacgcacaaccgcgccagcatgcgcgcggacaccagttactatgccggatacggcaccacagccgtgaagtacatcgcacgagggccggacgtcgattcaattaccgggttccaggtcatgtggttcgaaaacgagtcggacatgctggcaagacgcggggcacgcatgcagctcgacgacatgtccaagctattcgtgtggatcgatggcaaaaaagtcccgttcacagcatgcattggctcacacatgcggaacgagtattattaccctaatcacacgtggaatatcccattacataagagtccagaggcagggacgggggccgacatccgcagcaggctctgcgactctttagacatgtccctgaagaagggctgggtgcccctctggctccgcgtccgcgacacactggaactccggttcgtgcttggagaggggacaccgaaggtcaaggtgtcgcggaacgcgccgattgacgcgaggcggtgggggaaggaactcgtcggcatcgagttccaagcgatcgacaacatgcccacgcaccaaatcgatcatgtgcttcacctcgtcgtgctcttgggcgcagccgccgtctcgcaggtcgaaaaaatatggcatgataacgccgactctgacccagacacccaagccttcttcgccacgcacgccgccaccctctcgccccactggaacgccgcgctcgacgccgtacgcaagcagggagcgaacgccccattacccaaggcgtacaccacctacatcgcgtcccaggcgggtatttcatccctgaagacacgcaatgcatcatccgccaccgcgttcggtgcgctgcaagacttcgcgaagagccttcacgcagagtacttcgcccactccgtcacagccctcatgcatccgcggtcgaacgacgaaggaccgcccgcgttctcgaacaccaaccaggaggcgtgggaagcgatgtacaacgaattggatgctacggaaaaaatattggtagaaaagtcaaaattggacgcaccatatctcgtcgcaatgatgaacagagcgacgcattctacagtcggcagaacagtaaaatgaaacatatatcagatggaaataaatgtacgacatcgccgttagaaaattggcgttaaaattcttgcgagtccaaagaaatattgcatactggaaattgattacaagctgacagtttctttagataacgcagtgtcgagcttactgtagtaattcccttgtccgagtgtaccactactgaatgttgaaatagactttaaggctattgatagcgattagtccggacagcggtgtcaggtctaccaagctgttggaagagacgttaaggctcttgagaaaggttagtccggacagcggtgtcaggtctaccactctggtgcgagcgacgttaaggcttttgagagcggttagtccggacagcggtgtcaggtctaccactctgttggaagagacgtcaaggcccgtaagagcggttagtctggacagcggtgtcaggtctaccacgctgttggaagagacgttaaggctcttgagagaggtaagtccggacagcggtgtcaggtccactactctgttgccatagaattgaatatc

SEQ ID NO: 208 - DNA, 21359 bp, unidentified
  source 1..21359: mol_type = other DNA
  misc_feature 1..21359: note = Fanzor polypeptide
cgtccaccgtgctttctacagtcgacggaatactaaaatgaaactgcctcgtgtactgcacaccgtacggtgtaacctaatgggtcaccgcattataccgttttttgatgtttcattttactgttctgccgactttagagtggtctggtatgtcgtcttgtggacgattgatatcacatggctaccactctcgtgacggcggatcctgtcgagtcacatggctaccactctcgtcactgcggatcctgtcgagtcagtcacatggagacttcatgatcagctcgtgcgtttcctttgccgcgtggtcttcatgcaggatgcgtttgatttcttcgtgtattttggcgtacttgattttggacatgtccgggtacgacgaccgatgaggacattatttaattttattctcaaaagtatttataatatgttcaaccaaacatttgacgcaagcacagcactgtcaagtattttcttatgggttttgttcggacacctgtccaaactattaaactgtgatctgcaacgcattatggtttcgcatccatttgttgtgcatttgattggaatcgctacatttttctttctttttacaatattggacccaagcaacaaaaaccacatatcgattgtatggttcaagactatatttgtatacacaatattcattataatgaccaagtcaaagtggtactttattgcaccaatattaggacttttgttgatagaccaaacactaaaaaagcacgtagccatccaaacagaacgcggtgacgatacagataaattacaaaaaatacaaaaagatatcagcaatatattagtcataattattctataattgattttcatcggagccgcgcattacatgtatctgcaacgcatagaatacaaaaacgatttttcgatgaccaaatttttctttggagtaacaacttgcaaaactaaaacaccgacgtacaaaacataattgtcataaaacgcagaaaaccaattcattcaatctttgtaaccgatactgtcttcagtcggcggaacagtaaaatgaaacatatatcagatggaaataaacgacatcgccgttagaaaattggcgttgtaacatgccttcctaatagagagaatcatgtcacacacaaacaacctctaaaacatatgtggtttgagatcaatccaccccagctccatgcgtgttccatgcatttgatgcgttatatatatggattttcattatattccctaaagagtctacgccgacatgcattataaatagggtttgtattgacatgtcgccatattttttgtatggttcttgctgctctacatctacgtatgatatcacaaatgtcttggttagataactgcaacatattggggtttaagctcaatctaccccagctccaatgtttattagggttgtcttgtataagatcccatgtgatactggggtttttactgatcaaaaaccagtcccatggtttatctgggttggcttgtataatatcccacgtgatgctgggatttgagctcattacacaccaaacccatggtttgtcggggtttgcttcgacaatatcccatgtgatgcaagggtttctgctaatataataccaatcccatggtttgctgggattatctcgtacaatatcccatttgatgcaagggtttttgctaatataaaaccaattccatggtttgtcagggttggcttgtataatatcacacgtgatgttggggtttttgctgatccagtaccagtcccatggtttgtctggattggcttgtataatctcccatgtgatgttggggtttgcgctcaactcataccagtcccattgtttgtctgggttgtcttgtataatgtcccatgtgatgctagggtttgagctcattacacaccaatcccatggtttgtcggggttgtcttgtataataccccacgtgatgttggggtttgagctcattccaaaccagttccacgtgatgttggggtttgtaatgacaatctcccatttgatgcaagggtttgcgctgatccagtaccaattccatggtttgttggggttgctttcgataatgtcccacgttaaagatgagttacaactcaacaaaccccaatcccacttgtgttccatacatttgactcgtctcgagatgtggttatttatttccgctgaaatcattaataagaatatcatcaatgcataatattattaatggtggagtacacgcatcgtgacacgcctccacgaaaacggcggcacactgtcgattcttgaagtacgggtttggcatcttcccatcccccattttctgacttgggtgtttaaaacttctgtgtttattggttttacaagaaaaacaaaaacaacacttttttgtttggcattttgggcatgttgcgtttaaaatctcacatatataatatatgcatgtcatgcaaataccatatttgttaacaataatacttggactagttggctcatgcacaagcataatattaccattaaatgaacaaagcattctcgaccaagtaaacgattatagaagaattcactgctctccaccagtttcatttaatccagcaatttcaatatccgcacaaacatggtccgattaccttgcgaaagaaaataagttcgaacatagcgattcaggtcgatatggagagaactttggtttgttttcgttttcagctttaaataccataaatttaacgcattattataccaggtcggtaagtttgtggtacgatgaagttgacttctacgatttcaatacgccccgtttttctccatctactggtcattttacacaattagtttggaaatttaccacagaaatcggtatcggtatttcgtattcagaatctaacaataatattcttgtgtgtatgcaatatttcgttcgtggaaatcaaaacagtgttgcagaatttcaaaaaaatgtactgacaggaaattataaatctcccattcttgagaactgcaacctacctagttcaccacaacattcaccatcaccatctcctcgaccacaacattcaccatcaccatctcctcgaccacaacattcaccatcaccatctcctcgaccacaacattcaccatcaccatctcctcgaccacaacattcaccatcaccatctcctctcccccctatcaagactccaaagaaggtgaagaaggtcaagaaatcgaccacgcaccacaacgaaatcgaccaatcaccacaacattcaccacaaaaatcgccatcaccatatcctcgaccacaacaatcaccatctcctagaccacaaccgcgaccaccaatgtctcaatctccatcacccatacaaattaatgagtatataaaggtgacaacccgttaccctttttcacaaattccatctccggacgaaattgcagtaacttacgtaaatgatactctttgtccagcatatatcaacctactaaatcgcgaaaacatgatacaaaatacttgtaaagtacaattggtatcatccactgctgtatactatgggtcttgggtgtacggtattagttataatcggttcagagagatgttacaaagttcgtattttacaaatgaagcaaagttaccatgcggtagcacggtcgctgtgtataacgtatcaacaaatgattcattcagatatgccgccaatcgcgaaacgtgtttaactgtataatttgaatgatatcccctgaaaccagatacaggcaatgaatgatctgcggaagacaacgacgtcttgcgaactcccacgttttccgccatctttgtctgtcgtcgactgaggtgtgcttgcatcatgcggtcgatgcatctcaatgaccaccaaacccaatacagtaagggacatttgatattggaacaccttctattgtgacaccttgtcaatacagatactgtcttcaggtgattgacacaaaaaaatcaaggcatctaaagacactgaatttacatgttcaaagtaccctgaaaactgatggctaaacatcgtgcgcatcaataatcctgttcaaagcgttactgtaatcaaatatatctgatagtcggagattccaggtgctcccgcacatatacgaaactttgtctggatatcttttacaaggaatgggcgttcctgcctcccggtggacttttactggttggcctggagcggaattgtgattcctctgtgctgatatctcaggctagcaagtctttccggagactctaaattctggtagaaatttcaaaaaatccgctgggaggaaggaacgcccatttaggggcactatttagtattttctgttccgctgactgtagcagcgtaagaacgtgtgaggaacacatcaatggccaccagacccatgcccttgagcccacagaaacgaatccactcgatagtcagagattccaggtgctcccgcacatacaacagcccctccaataagacatccgagtacgcagtcggggctttgtcctgcctcgcgagctgcatcttaaatgttatgtcgtccacaagagggtgccgcttgaagtagccgacgtaactcacacgggacttgacaccgcgccgaatccaaaggtcgtacgcgagcccatgtattaaatttcccaaggtatggtccaaaccgggaaaaagaatgctcctcgcgccacccgggacggtcgagtcctcaaacgagacgcgctcggcacggacgtcttccgagagatcaatgatggctcggacaaggaagcggaaccctagaaaaacgaggtagtaaggggacatgctcgggtccacgctctcaacgaaaaaatcgaacttgtcgggaaccgagtcgtcgtccaaaacaggctccttgtaacgaaaatagcaagagcagactggagaatatctcgcatgctcccgaccggagccaagcctcgcagtcgccgtgatgttcacagcctcaccgatgccgccacacatgatgttggggcgcaagacagtaagtaacacactgtcacccgaccgctggtcaacaggaaacagacacttcaaacgctccgtctggaacgagacgccttacgcgttacgaactacgaagtctacgctcaccacatcaaacacctcattcccggtgttccgcacggccaaggtgcattggtagtcgcccggggcgaagttctccaactcgttgggagtcagacacaaaggcacaagcgacacacggagagccaacatctcgttgtgcatcacggacgtgttctcaagtacgcgcacaccaccaccaccgcccccaggaggaaccacagtgtcgaacgccgcggtctccacacaagcgatgatcgcacgacgcaacgaattcacgatgcacaagtcgacgccagaaactgagaaggaccctccgatgttactatgtatgaagtgatccgtaccgactgagggtgaagggatcacaggagccagaacgtctcctacacgaatcgacatttctaaagatacgacaggaataatacacaacaatatctacatcatcgaagaaaacatttatactcggtttcaaaaaccaaatcgaaacaatctccaaggaaacaatgggcgcaataatcaaatatttctgctacatctggaattattgggcacatgcagcgatattttcgcttgagcaaactgaacaccagccgcctcaggatccatcaaaagcgtgcagacatcggcgtgatcttccttggcaaccgcccacaatgccatgctgttgacagagttcgcccaggccctgacctcaattccagcaaccgctggatcccatgagcagcttgcagacatctgcgtgacctgccttggcaacctcccccgaagcccagatgtgtgtagagttcgcccgggccctgaactcaagtccagccaccactagatccatgagcatcttgcagacatctgagtgaccttccttggccgccgcccacaaggccctgctgtctctagagttcgccctatccctgaactcaattccagccaccgctggatccatgagcagcttgcagacatctgcgtgaccttccttggcagcctcacacaatgcccagctggcgttagagtttgccctggccctgaaccccaatccagccacatctggatccatcagcagcttgcagacatctgcgtgaccttcccttgcagccgcccacaagacccagctgccgctagtgttcgcccgggccctatactcaagtccagccacctctggatccatgagcagcttgcaaacatctgcgtgacctttcgttgcagcctcacacaaggccctgctgtctctagagttcgccctggccctgaactcaattccagccaccgctggatccatgagcagcttgcagacatctgcgtgaccttccttggcagcctcacacaatgcccagctggcgttagagttcgccctggccctgaactcaattccagccacatctggatccatcagcagcttgcagacatctgcgtgaccttcccttgcagccgcccacaagacccagctgccgctagtgttcgcccgggccctatactcaagtccagccacctctggatccatgagcagcttgcaaacatctgcgtgacctttcgttgcagccgccaacaaggccctgctgtcgcttgagttcgccctggcccttttctcaattccagccaccgctggatccatcagcagcttgcagacatctgagtgacctgccttggcagcctcacacaaggcccggctggcgttagagttcgccctggccctgaactcaattccagccacatctggatccatcagaagcttgcagacatctgcgtgaccttcccttgcagccgcccacaaggccctgctgttgatattgttcgcccgggccctgtacttgagtccagccactgctggatccatcagcagcttgcagacatctgcgtgaccttccgttgcaaccaccaacaaggcacagctgtcgctagtgttcgcaagggccctgtactcaattccagccaccactggatccatgagcatcttgcatacatctgcgtgaccttccttggaagccgccatcaaggccatgctgttcatatggttcgccctggccctgtactcaagtccagccaccactggatccatcagcagcttgcagacatcggcatgacctgcctttgcagcctcacacaaggccaagctggccatatggttcgccctggcccttttctcaattccagccacctctggatccatgagcagcttgcaaacatctgcgtgacctttcgttgcagcctcacacaaggccctgctgtctctagagtttgccctggccctgaactcaattccagccaccgctggatccatgagcagcttgcagacatctgcgtgaccttccttggcagcctcacacaatgcccagctggcgttagagttcgccctggccctgaactcaattccagccacatctggatccatcagcagcttgcagacatctgcgtgaccttcccttgcagccgcccacaagacccagctgccgctagtgttcgcccgggccctatactcaagtccagccacctctggatccatgagcagcttgcaaacatctgcgtgacctttcgttgcagccgccaacaaggccctgctgtcgcttgagttcgccctggcccttttctcaattccagccacctctggatccatcagcagcttgcagacatctgcgtgaccttccttggcagccgcccacaatgccaagctgtcgccatagttcgccctggccctgaactcaattccagccacatctggatccatcagcatcttgcagacatctgcgtgaccttccttggcagccacatagagaagattgttttcattttggttcgccctcaattgtaggaccccgttcacgtgtacaagaggattggacaccaagcatactgctagaaggtcggcgcgcccccctttcgccaacatctctccaactctctgtggtggttggatcagtacggtaaggggccatccagaaaatcttttgtgcagagttttacacactaatacaatctttgggttggaagataatagggcaatacgatcaagaatgtcatggggaaacgttaggaatgatcgcgtgtgcgaatgcatgttcgatgaacatgtttgtacaatgcgtgcaagcgcacaggatggtataaataaataatgagttgggataaaccctataaaccctataaaccccataaaccctataaaccctgggttgcacttgcctggcggtatctgcaagcggtacagaatgggtgttcctgcctcccggcgatttttttgaattttccaagcagaagttagagccgtacgaacgactcactcactcgccaaccagagatttagttctccgatgaatttcgattccgaccagaccaggttccgaaaccagtcaaaacccctccgggatgcaggaacaactagtaatgggcgttcctgcctctcggccgatttttttaaatttctagtcaggatttagagcctcttgaacgactcgctagcttgagacataagcaccaaggaatcacaattccgctccataccatgtttcgcaaccagtcaaaatcggccgggaggcaggaacgcccatttcgtgcaaattgtcaatacaacagatattgtcttcaggagattgattgacacaaaacattcaaggactgttacatcttcaaagtagcctgaaaagtttgaggagagtggataaatacttgctctacggtggcaagacccagctgctgtcaagattcacaatggccctgtactcggggccagccgcctctgcatccatcaaaagagtgcagacatctgcgtggaccggccttcgcatccgcccccaaggcccagctgtcgtgagagtcctccctagccctgaactcaattccagccacctctggatccatgagcagcttgcagacatctgtgtgaccttccttcgcatccgcccacaaggcccagttgttgacagagttcgcccgggccaagacccagctgctgtcaagtttcacaatggccctgtactcggggccagccacctctacagtcggcggaacagtaaaatgaaacatatatcagatggaaataaatgtacgacatcgccgttagaaaattggcgttagaatggtcgctgacttgggtgtgttaaaaacttctgtgtttacgaacatcagtcgttctactctgtggaggtggaaacgctttggtgtaaatcgaaaacgacgtgaatttgtaagcaacctttttgagacggataaggatttgttaaaatcgtttttattgtcaactcaatgcacaaccgcaagaggcgtcgttgcttttttcaaaagtactcacaatgtacgattatcaactaaaacagtgtatcgtttcataaaactcattggttttacaagaaaaaggagcaaactccgtggaaagtgtaaaggggacttagttccacttgtcaatgaattttgtagtaggtacaaggagacaatcaatgctgggaaaattttagtatcagttgacgaatgtgggtttagtgagcgtctcaagccgcattatgggtattcccctgtaggaaaacctgttatcgttaaaactactggtgggtgggtacaccacagtttgttgatggcaggtttttcagatggtaggaaagagttcgttgtgaagaaaggatctgtgaagaagacggaattcgttgcatttattgaatcattgagtttgtgcaataactcagtagtaataatggacaatgccagtatccataagaaattggtcctcagtcaccccgtcaatatttgttacacacctccttacagtccagaattcaatgctattgagctatgcttcgctaaagtgaagagagactttcgtcgtctgaactacataccgaatgaaacaaagacgcatgtgtctgatacgatttccttagcattcggcaacctcactgataaaattattatgggttgttttgaacacgtttggaacacttatgtgtataaagcggtctgtgacgtattgattatggaagatggcgacgaaacctccgacagtcgcgaaattaaaggagctactgaaattggctgaagtaccatactcgtcgaagtccaacaaggacgatcttgtccgtttatgcgaagacaatggtctcattgccagagaagagatcttagagaaaggtctggagattccagacctgtacaacatgaaagatacctactggaaggattggctccgtatcggggtagacggaatcttccctgatgaggaaagcaagatatcgtatgaagctgtgaaggactccatcggcgatgttattggtaatgacgacgctgactacatcaagtcttatccgatctatttcgatcaggtattgaactatgcaggtcacacattgagcactgtcgtgtcaaacaatgcatgggttcctttgataacacgtctggccacactcacttccaccactttaaataaattaaatgccccgaagacgctggacacatcgaagatcattcggggatacgacgtgatgcatgctattcagcaagaagtccaaaacatggagggatggccagagtctgttcaagagtacgtcaatgaagttagggagatgctgagtgttccagatggaagtcgagtttatgataactatggtaaagacatggactttccgaccatggtccggtttaattattggatacagacactgttggaggatatggatgcacgtcgcatccgattgatgcccatcttcaatgtccaacgggtgcatgttcgccttgacctgaagaccctcgtgaacctgttcaggcacatgttccccaatgaccagaacatcgttgagctttccaagtgggaacatgtaaagaatcccgacagcttcatgttgccccagaggcctgcacagaagaagaaaaaatcatgtggtcctggtgaatgggaggcatacaagtcggtcctgaagcagtacgatgatgatgttaaggatatcaaggctactgacgagtacagacatgcaaagggtttgtatgacacgcttgtgaacgcccgaaaaacagtcgcaggttccttcttcagaaaaccacctgtcaagaatgggtgggttttcgactgcagcatctgtactgacggagtctccttgagcatgcagtacagcaagacagtacaggtccttgtctcagatctgaagaagacctgtaagaagcctcgtaaagaagaaggtatcaagatcgcagaaaaatacgacggctcacttaaaacgatattgcccgatatgggtatcgtcgtcctgggtgtggacccaggacggagcaacatcgctacggtaacgtatttggcagacgataaaaataagacatggacgctgacacgtggtgcattttaacacaagtcgggtatcaagaagcagacaaggcagaaggaactgcgttttgctgacatgattcctatgtgggagtctctgcgtgaaaatggagcagctttgagtacatcgaggacggataagatctcggcgtacttgtcaaattacgctaagttttctgaagagtggtggagattggctttgcgacgccgagaatcccgtgacaacttgcagcgttacatcggaaaacgaaaggtcaaagactctttctgggcgggtatcaagcggtgcatgatgaaagaacttcctgctatgaaggtttgcgtggcctacggatctgccatcacgaaactgaagcctactggaccgggagaagttgcagttcccactggggccatgttcgcatcgtgtaaaagagttttcaaagaggacgtttctgtgacagatgagttcaaaacgactcttatgtcgtgggagacgggtaaagtgtttacaagatcccaagcgttcgttcagcagacgtgaagcttaggttgggtggtgaacgttttggtcacacgaaatcgaaaactatgccaaaggtcgctgattgcgaccacttaggggtaaggttgtacaataaacgtaaaggcgcacaagagaagcacaggaggggtggcttcgccacttcccttgtcgattctcaaaaatcgatcgagcggtacccagaggtacgaggactgcgattctctccagaaacatgcatttactcggaccgggatcgctcttctgctctcacaatcgcaaggctgcactgcatggaattgatgggtctaggacgacctcttccatttgcccacagcagctctgttgttgttgatgaataaaaactcgtattgttgtagacaccactcggtccccctccggtggtcgcgacaacattaggttacaccgcaagttgtgccgtacacgaagcggtttcatttaagtattccgttgactgtacatccatcaaaagcaatcagacatctgcgtgcccttcctttgcagcctcacacaatgcccagctgttggcagagttcgccctggccctgtacttgggtccagccaccgctggatcccatgagcagcttgcagacatctgcgtgacctgccttggcagccgaccgcaaggccctgctgttgacagagttcgcccgggccctgaactcaattccagccaccgctggatccatcagcagcttgcagacatctgcgtgaccttcctctgcagcaacccacaaggccctgctttcgctagagttcgccagggccctgaactcaagtccagccacctctggatccatcagcagcttgcagacatctgcgtgacctgccttggcagcctcccccaaggccctgttgttgatattgttcgcccgggccctgtactcaattccagccaccgctggatccatgagcagcaagcagacatctgcgtgacctgcctttgcagccgcccccaaggccctgctgttgatatggttcgccctggccctgtactcaagtccagccacctctggatccatgagcagcttgcagacatcggcgtgacctgccttggcagccagccacaatgccctgctgtttatatggttcgccctggccccgtactcaagtccagccaccgctggatccatgagcagcttgcagacatctgcgtgaccttccttggcagccgcacacaatgccctgctgtctctagagttcgccagggccttgtactcaattccagccaccgctggatccatgagcatcttgcagacatcttcgtgaccttccttggcagccgcacacaaggccctgctgtcgatagagttcgccagggccctgtactcaagtccaaccacagctggatccatcagcagcttgcagacatctgcgtgaccttcattggcagcctaccacaaggccctgctgtcgctagagttcgccagggccctatactcaagtccatcaaccgctggatccatcaaaaacaagcagacatcggtgtgaccttcctttgcagcctcacacaaggcccagctgtcgctagcgttcgcccggaccctatactcaagtccagccaccgctggatccatgagcagcttgcagacatctgcgtgaccttctctagcagccgcccccaaggccctgctgttgatattgttcgcccgggccctgtactcaattccagccaccgctggatccatcagcagcaagcagacatatgcgtgaacggccttggcagcctcacacaaggccatgctgtctctagagttcgccagggccatgtactcaagtccagccaccgctggatccatgagcagcttgcagacatctgcgtgacctgccttggcagcctcccacaaggccccgctgttcgtagagttcgccgaggccatgtactcaagtccagccacatctggatccatcagcatcttgcagacatctgcgtgacctgcataggcagcctcacgcaaggcccagctgttcatatggttcgccctgggcctgaactcaattccagccacatctggatccatgagcagcttgcagacatctgcgtgaccttccttggcagccgccccaaatgccctgctgtttctagagtttgccagggctctgaactcaagtccagccacctctggatccatgagcagcttgcagacatatgcgtgacctgccttggcagccagccacaagaccatgctgttgatatggttcgccctggccctgaactcaattccagccacctctggatccatcagcagcttgcagacatctgcgtgaccttcattggcagccacatagagaagcttgtttttattttggttcgccctcaattgtagggccccatcaacttgtacaagaggattggacaccaagcatactgctagaaggtcggcgtgcccccctttcgccatcatctctccaactctctgtggtggttggatctgtccggtaaggggccatccagaaaatctgttatgcagagttttacacactaatacaatcttggggttggaagagaatagtgcaatacgatcaagaatgtcatggggacacgcaaggagtggaaacgatgatcgcgtgtgcgactgcatgttcgatgtaactacatctttctttattactttaagtatttctgaaaagtttgaggagtctctcagagtggataaatacttgctctacggtggcaagacccagctgctgtcaagattcacaatggccctgtactcggggccagccgcctcttgatccatcagcagcttgcagacatctgcgtgaccttccttggcagcctcacgcaaggccaagctgtgcgtagagttcgcccgggacctgaactcaagtccagccaccactagatccatcagcagcttgcagacatctgcgtgaccttcctttgcagccacccacaatgccatgctgtcgttagcgttcgcccgggccctgaactcaagtccagccaccgctggatccatgagcagcttgcatacatctgcgtgaccttcattggcagccagccacaatgcccagctgtcgctagagttcgccctggccctgaactcaattccagccaccgctggatccatcagcagcttgcagacacatgcgtggccttctttgtcagccgcccccaaggcccagttgtcgctagagttcgcccgggccctgaactcaattccagccacctctggatccataagcagcttgcagacatctgcgtggcctgcattggccaccgacaacaaggccctgctgtctctagagttcgcccttgccctgaactcaattccagacacctctggatccatcagcagcttgcagacatctgcatgaccttcctttgcagccgcccacaatgcccggctgtcgttcgagttcgcccttgccctgaactcaagtccagccaccgctagatccatcagcagcttgcagacatctgcgtgacctctctgtgcagccgcccacaaggccctgctgtcgatagagttcgcctgggccctgaactcaagtccagtcacctctggatccatcagcagcttgcagacatctgcatgaccttccttggcagccagccacatactgctagaaggtcggcgcgcccccctttcgccatcatctctccaactcgctgtggtggttggatcagttcggtaaggggcaatcctgaaaatctgttgcgcagagttttacacactaatacaatctttgggttggaagagaatatggcaatacgatcaagaatgtcatggggaaacgttaggaataccgatgacttcatgttcgatgcatgtacaatgcaatgcatgaaatcgcacaggatggtttaataaatactgagttggaataaaccctataaaccctgggtttcactttcctggcatgcaagcggtaagcggcacttgcctggcggtatctgcaagcggtatagaatgggtgttcctgcctcccggcgattattttgaattttcaaagaagaagttagatccgtacgaatgactcactcgccaaccagagatttagctctccgaggaattgcgattccgaccagacaagggtccgaaaccagtcaaaatccctacgggacgcaggaacaaatatactggtgcaaattgtctttctttcttacattaaggaattcaagtttcataaagttttgtaaccgatcttgtcaatacaacagatattgtcttcaggaatctgcctaacacaagacctagctgctgtcaagattcacaatggccctgtactcgggtccagacgcttctgtatccatcaaaagcaagcagacatcggcgtgaccagccttcgcagcctcacgcaaggcccatctgttgacagagttcgccctggccctgaactcaactccagcaaccgctggatccatgagcagcttgcagacatctgcgtgaccgtccttcgcagccgctcccaaggccctgctggcggtagagttcgccctggccctgaacccaattccagccacctctggatccatgagcagcttgcagacatctgcgtgacctgtattggcagccgcccacaatgcccagctgtcgttagagttcgcccgggccctgaagtcaattccagccacctctggatccatgagcagcttgcagacatctgcgtgaccttccttggcagcctcacacaaggccctgctgtcgctaaagttcgcccgggccctaaactcaattccagccaccgctggatccatcagcatcttgcagacatctgcgtgaccttcattggcagccgcccacaatgcccagctgtctgtagagttcgccctggccctgaactcaactccagccaccgcaggatccatcagcatcttgcagacatcggcgtgaccgtccttcgcagccgcccacaaggccctgctggcggtagagttcgccctagccctgaactcaagtccagccacctctggatccatcagaagcttgcaggcatctgcgtgaccgtccttggcagccgcccacaatgccctgctggagctagagttcgccctggccctgaactcaagtccagccacctctggatccatcagcagcttgcagacatctgcgtgaccttcctttgcagcctcacacaaggccctgctgttgctagagttcgccacggccctgtactcaagtccagccaccgctggatccatcagcagcttgcagacatctgcgtgacctgccctggcagccacatagagaagcttgttttcattttggttcgctccaattgtaggccccccttaacctgtacaagaggattggacaccaagtatactgctagaaggtcggcgcaccccccctttcgccatcatctctccaactctctgtggtggttggatcagtcccataaggggccatccagaaaatctgttgtgcagagttttacacactaatacaatctttgggttggaagagaatagggcaatacgatcaagaatgtcatggggaaacgttaggaataccgatgatagcgtgtgcgactgcatgttctacgaacatgtgtgtacaatgcatgcaagcgcacaggatggtataaataaataatgagttgggttaaactctataaaccctataaaccctgggttgcactttcatggcatgcaagcggcacttgcatggcggtatctgcaagaggtacagaatgggtgttcctgcctcccggatatttttttgaattttcaaagcagaagttagagccgtacgaacgactcactcgccaaccagatatttagctctccgcggaattgcgattccgaccagaccaggctccgaaaccagttaaaatacctccgggaggcaggaacaaatgtactggtgcaaattgtctttcttacttacattaaggaattcaagtttcatcaagttttgtaaccgatcttgtcaatacaacagatattgtcttcaggagattgacacaagacattcaagtactgtaaagacatagaagttacatcttcaaagtagcctgaaaagtcaaagtgctggctcacatcgtgcgaatcaataatcattttcaaagagttcctgcctcagaatcaaatatttatgctacatctggaattattgggaacacacagcgatattttcgcttgagctaactgaacacatttttgaaaagtttgaagagagtggataaatacttgctctacggtggcaagacccagctgctgtcaagattcacaatggccctgtactcggggccagccgcctctggatccatcaaaagcaagaagacatcggtgtgaccggccttcgcagccgcccacaatgcccagctgtcgacagagttcacccgggccctgaattcaagtccagccacatctggatccatgagcagcttgcagacatctgcgtgaccagacttcgcagcctcacgcaaggcccagctgttgacagagttcgcccgggccctgaactcaattccagccaccactggatccatcaaaagcaagcagacatcggtgtgaccggccttcgcagccgttcccaaggccctgctgtcgctagagttcgcccgggccctatacttaagtcaagccacatctggatccatcagcagcttgcagacatctgcgtgaccttctttggcagccgaccccaaggccctgctgtcgaaagtgttcgccctggccctgtactttagtccagccacctctggatccatgagcagcttgcatacatctgcgtgaccttcctttgcagcctcacgcaatgcccagctgtcgctagagttcgccgggccctgaactcaagtccagccacctctgtttccatcagcagcttgcagacatccgcgtgaccttccttggcagccacccacaaagccctgctgtctatagagttcgcccgggccctgaactcaattcctgccactgctggatccatcagcagcttgcagacatctgcgtgacctgccttggaagccgccctcaaggccaggctgttgatattgttcgccctggccctgaactcaagtccggccactgctggatccatcagcagcttgcagacatctgcgtggccttctttggcagccgcccacaaggcccagctgtcgctagaattcgccctggccctgaactcaagtccagccacctctggatccatgagcagcttgcatacatctgagtggcctgcattggccgccgaccccaaggccctgctgtcgctagagttcgcccgggctctgaactcaagtccagccatcgctggatccatcagcagattgcagacatctgcgtgaccttccttggcagcctcacgcaaggcccagttgtcgctagagttcgccagggccctgaactcaagtccagccaccgctggatccatcagcagcttgcagacatctgcctggccttccttggcagccagccacaatgcccagctgtcgatagagttcgcccgggccctgaactcaattccagccaccgctggatccatgagcagcttgcagacatctgcgtgacctgccttggcagcagcccccaaggcctggctgtcgatagagttcgcccgggccctgtactcaagtccagccacatctggatccatcagcagcttgcatacatctacgtgaccttccttggcagccgcccacaatgcccagctgtctctagagttcgccagggccctgaactcaagtccagccacctctggatccatcagcagcttgcatacatctgtgtgaccttcctttgcagccacccacaaggccctgctagagcttgccagggccctgaactcaattccagccacctctggatccatcagcagcttgcacacatctacgtgaccttccttggcagccgcccacaagaccctgctgtcgatagagttcgccggggacctgaactcaagtccagccacctctggatccatcagcagcttgcagacatctgtgtgaccttcctgtgcagccgcccacaaggcccagctgttgacagagtttgcctgggccctgaactcaagtccagccacctctggatccattagcagcttgcagacatctgcgtgacctgccctggcagcctcacgcaaggcccagctgtcgctagagttcgccctggccctatactcaagtccagccacctcttgatctattagcagcctgcagacatctgtgtgacctgcctgtgcagccacccccaaggccctgctttctctagagttcgccagggctctgaattcaattctagccaccgctggatccatgagcagcttgcatacatctgcgtgacctgcctttgcagcctcacgcaaggccccgctgtcgctagagttcgcccgggccctgaactcaactccagccaccgctggatccatgagcagcttgcagacatctgcgtgacctgcataggcagcctcacgcaaggcccagctgtcgctatagttcgcccgggccctaaactcaagtccagccaccgctggatccatgagcagcttgcagacatctgcgtgaccttcatatgcagccgcccccaatgccctgctgtttctagagtttgcccgggcctgaaatcaagtccagccacctctggatccatgagcagcttgcagacatctgagtgacctgccttggccgccgcccacaaggccatgctattgatatggttcgcccttgccctgtactcaagtccagccaccgctggatccatcagcagcttgcagacatctgcgtgaccttccttggcagccacatagagaagtttgttttcattttggttcgccctcaattgtagtccccccttaacctgtacaagaggattggacaccaagcatacttctagaaggtcggcgtgcccccctttcgccatcatctctccaactcgctgtggcggtcggatcagtccggtaaggggccattcagaaaatctgttgtgcagagttttacacactaatacaatctttgggttggaagagaatagggcaatacgatcaagaatgtcatggggaaacgttaggaataacgatgatcgcgtgtgcgactgcatgttcgatgtatacagtcagagacagaatttatgggacacccttaccggtgacccttgaacccaatgggtaggtcagctaaaggttttgtatcaaggtcccaatccttcgtgtccttcatcctgtatttcagcatttaagctggcccagaggataacaattgtaagctgctaactgacccaggtgggtcggttggttgagcgcccacatttgcctctccggaaactgtggtttttggggtgggcgatgaggagggcacacaaaatgccgctggtcgctctttcccgtccatccacgtcgtcagaagcagaagaaggttcttggcagcgttcacgtctcggttccaggttgcaccacagcgcacattggatgatgcgcttttgacactgttgcgacagtgcagtactttgtggaccttaacgttcttcaccaccgtcttctgcttctcaaacgttgttgttgttgttgttgttgttgttgtaggagccccgtcgatgagggcggagggct

SEQ ID NO: 209 - DNA, 21014 bp, unidentified
  misc_feature 1..21014: note = Fanzor polypeptide
  source 1..21014: mol_type = other DNA
atcgccttgttgggtttaggctttctctcagtatcatggatcaagttggaccacctggacatcagaaagcaggccgagacagaaacagaggcccctgtcattgtgtctaaccacatgggttggtcagatatcttggtgcacatgtcaagaagctggcctgcttttgtggccaaggaaggcattgataaggttcccattgtagggtatatcagccaacacattggatgcatctatgccatgcgagccatcaaggagactagcaagagtgcggctgtccagctgaaggatcgtattgctgcaaaagccattgaccctaccagctctgtacgccccatgcttgtgtttcctgagggcaccaccaccaacgggcgctacctctgcaagttcaagaccggagctttcctggcaggggcacctgtacgacccgtggtcatgcacttcctgaaccaagactacgtctccccgtcgtgggagagtatcaacatcaagcgacacatcttcatcatgatggccacactcttacacaaagtgatttgctacgagctgccaatctactacccatctgatgcagagaaagaagacccggttctatttgcagaaaatgtgcgacagaacatgttaagctactgcgggaatcagggagtccccaacctcattccatgtgactccaccctggataacaagttggagtaccacaagctgagcaaggcaaccattgcagagcactccggcaagtttcgaaagagcatcaagaatgagtgatattggattggattacagtcaacggaatactaaaatgaaaccgcttcgtgtacggtgtaacctaacttagtcaatttctcggctgccgatatcttgactgaagacgcgtccaccgcgatccacagctgtcacgatcatacgacgaattgtcacagatccaagtgttgtttcgtctgtcatgtcaatgttgatgagatgcggtatccaggacgacagtctactcgcgcacataatggcctgctgtatggctttcaacaccttcgcatttccagtcttggcaggggctttgaggattttcgtctccacgacgaaaagtgtgttgatagcatgtgagaatacaagggcgtccccgttggcgcgcttgaagcagccgtcatcgaagacgtactccacagcgactaggaacaaccgtgacgatggggatgtgtggtgtttttgtttaatcaggtggtgcaatgcgttatactccaatacgcgtggatcaccggaagtagccgatgacgtccgcagtgcattgagacggctgacattccggcagtgtaggcgatcaagaaacttggatgtgtcgagactgtccatgtccagcgcccttcctagttggcggactggctttgaaatgggctgacaaggttgtgtcggcatcgcgtcgatgaagactcttttcttcgcgcatacgtggatgtgcaattactccaatctcaaaagaaggctttaaatacactcgacggaatactaaaatgaaaccgctttctggagtgtacggcacaccttacggtgtaaccaaatggtgtagcaacccacggggcagtggaacaccaatacgattttgaatcaacaaattgcaggatgttaacgagaatatcgtggttcttttttagatcacggctctccatcctgcagactccgtatcattcttttgtcggtactttcgagagtgtccattgaaggaccagccgcacttaagcgatcgactcttccccggtaccgtggcccaaaagaacacggggtctttgttgatgtgcaatgcgtcattaaaggaggtttctttgctggacgggccattttgtaggaccatccactcgtacactataatgtctgtcgacgccttataccgtttattgggatgtttcattttactgttccgccgactgtagctaatgtagggaagagaaaaaaaaaatatgcagtctcggggcgaggaggtccttttaattcccggctatcgtacctccagcaatacacaaggattgggcatgcctgtgtgtgccattcgacagtgttccgccgtttgcgtgagaatgagtgagagtggttggtgggcatcaattcgacagcagccgccgctacgcgtgtgtgaggatcatcttctgtgtcaagtttaagttgtcgtcgactgtgatgtagtgtttggctgtcttcacaatactgtatcagataagacgatcttcctgaaaaaattgtcacaatctagaacaaaaacgcaaattgcattctctccaaatccagccatagcaaatcattacaatggggtacaacaacatcgcaacttgttgatgcgcagatgacgtggctcacgcacgacctatgattgggagtaagatctgtaaacctgtcacacaacacaaacacacgatgttttaaaccaagggcattcaataacacaaaatctggctcaatgcgcacctcctcaatgtcatcaaatgcatatgctaaatgcccattctgcacacaaagtatgacaaatggaatgtgtttgtgagggacaaccttaaatgcgtcttggacagtattgaaccctgtaagcacacacactgtcggcttcgacaatacggattcctcatttaaaaatcccatctgtaccaggtatcattatacccaatcaataaaagtcctgaattaaaacccatgtcctctcccggtggtgcaatgagaaaatgacggtcgcataaaaaagatccctatataattcaatattagaaatcctcgaagcttcacacgagtcagcagctcaatttcagacaaacatggcatctcgggaagatccccttaccgacatcctcacatcggcaatcgcccacatcaagcgaacgcttccagattggtcaccaccagacctcgggcacccatatgctaacctgacgccgtacaagagcggctatgctatgctcggcaagcttaagcctggcgcccagatcatggtcaaagacgcatccggttacaggcaccatggcatctttgtcgggcagcaagtggtggcaccaggggatatcgaagtcccgacagtcgttgatgtgtggggaatttcgaaggagcaggccaacgtctccttgcgatcctacgaagacttcgttgccaacggctctatctttgcggaggctttgtacaccgaaggggctgctccggatcagaccctctcggcaagccttgccctcgctctggtcaaagatgctgagcaaaccccatttgtctacaacgccgcattcaacaactgcgagcactttgcaacgatgtgtcgctgcctcaggtgtgcatggaatttatccgatgcaagggcatgccatctcatcattgacgcacagtttgctgaactgaatacattccctgcatcacatctgcctccccgcggttttgtaggtatctgaatgaatcatcaacacaactgacatggatactaccggatccctattttaaacggaaaatgaacaataatattactaaggatgacccgttgaacaattttacacatcattccatccatttttcaagtacgtcaacgaagtgagtcctgccagcggtgatatgtcgtccacgtcggtgttcgaactgtccaggtgaaccaacgaagtgagtcctgccagcggtgatatgtcgtccacacgtgtggacgccatgttcaggtgaatcaacgaagtgaggccggaaagcggtgatatgtcgtccacgtcggtgttcgaaatgtcgaggtgcaccaatggagtgagtcctgccagtggtgatatgtcgtccacacgtgtagacgccatgttcaggtgaatcaacgaagtgagtcctgccagcggtgataataggtgttcgcccacccgtgtgtacgccatgttcagatgaaccaacgcggtgagtccggaaagctgtgatagcgaaatgtctaggtgaatcaaagaagtgagggcggccagtggtgatatgtcggttacaagtgtgtgcgccatgttcaggtgaatcaacgaagtgagtccgtacagagcttgtatgttgtacagaggtgtgtgcgacatgttcaggtgcgtcaacgaagtgagtccggacagaggtgataatatgtgttcgtccacgtaggtgtgcgacatgttcaggtgcgtcaacgaagtgagtccgtacagtggcgatatgtcggtcacgtaggtgttcgatatgtccaggtgaaccaacaaagtgaggccggacagcggagatatgtcttggatcttgtcttcaatagccgacattgattggtagggtacgtattccccacgattgacacctattttcaactctttgagccttcaaatgcgtgataatgcgtattccaaactgttataatgtcttaagtggatcattgtgacacaccggggtgcggcgcatttccactgtttgcaaacgagaggcacttgttggaggtgggattcgttcgaaatcgcattggctagaatgatctccaatacatcttcattgatttcgtcaaaggaactcattcgtttgtgaagtgtgctgtgctgatggttgtttatactgaagaatggttgtttacacttcagtcgaggggggtgtttttttcacatgaacacctctgaaaagactctccatctcgggaacaacaactatttgaacaaaaataaatactgaagaatgccggaggctcacatcaatccctattttaaacgtgttccgccgtttgcgcgtgtcaatgagggcctgcgtgtgccattcgaccgtgttcggcctcttgtgtacactcctatacattcgacagtgttcggcctcttgtgtacactcctcctatacattcgacagtgttccgccgtttgcgtgtgtacactcctatacattcgacagtgttccgccgtttgcgtgtgtcctccgatggacaagtcagatcctgtgtcacagaagactgggggtttaaatatccaaatttctaggacattgcgaatgtccaaattgacactaatttctgccgtttctgctaaaggtatcgttcattacaagatccttgatcacaattgcaagaaagtcgactttgtacagtttgtatctgagtttcatgtacagcggggtacagtcgctgtccttgacaatatacagttccatcattcaaaggagacgatttctatgttcgattctgtaggaatacgaccactctttgtacctccttacagtccagagtttaacgctattgagaatgtctttagtttgctcgagcgaaaatatcgctgcatgtgcctaataattccagatgtagcagatatatttgattacagtaacgctttgaaaaggattattgatgcgcacgatgttagccatcagtttgacttttcagggtactttgaacatgtaaattcagtgtctttagatgccttgaatttattgtgtcaatcacctgaagacagtatctgaattgccaagatcggttacaaatcttgaattggtcaacttttcagaatccccaaatataaggtgtcccaatatcaaatgtccctagctgtatgggtcttcctcctccaattcttagtaaatttcctggctgtggatatcttgacagaagacgcgtccaccgcgattcatagctgtcacgatcatacgagaaattttcacatatccaagtgaggttccgtctttcaggtccatgtttatgagatgcggtagccaggacaaaagtctagtcgcgcccatagtggcttgctgtatggctttcgacaccttggcatgtccatactgggcaggggggggtttgaggattttcggctccacaacgaaaagggtgttgatagcatgtgagaatacaagggcgcttccgttggcgatcttgtagcagccgtcatcgaagaagtactccacagcgaccaggaacaaacgtgacggtggggatgtgtggtgtctttgtttaataaggtgaagcaaagcgtcatacttcaagatgcgtggatcaccggaaacagccgatgacgcccgcagtgcatggagacggctgacattctggcagtggaggcgattaagaaacttggttgtgccgagactgtccatgtccagcgacaacgcctttcctagtttgcggactggttttgaaatgggctgacaaggtgggatatacatatcggtcggcatcgcgtcgatgaatactctttttcttcgcgcaatcgctcaatggtttttatcaggtatgtatgttgcgttgtttagactcgttttttagaaacgcacacgaaacacttgtcgtcgattaaagccgcattgagtcttacgcaaccgcattcactgtggttgctactgctgttctttgagtaccccattgctatttggggccattggctgccatgcaaaacatgcgatgtcccgtatgattcaaagagcatcagaatcaccataaatcgtcttcccacaccacttgtaccgaattatttagagtgaccagtactttatgttcatatgtcccaagtccgtgatacttcgtagcaagaataatgacgttagtctgcttatacttcctagcacagactttgtcaaatccccaccagaatccatcttcatccatccatgttctcttgttgtgcaactggcactggagctcgttaggaatgtatcgttcgatgtaatcactaccccattcaggcacgaggcctctcatgaggcgggccaattccaatgttttttgcttttcaattgtatcatcttggaccccagtgcaaatcaagtcggacgtacccgacacagtgatgtccgaagcgtaatctgtcattctgtagttattctcaaataaagtgggacaccctttataatgatggacgaggccgtcacatccaatccaccaaggagacaccaatcatcatcgaatcacatccaataagtgctcccccaagagtatcatcatcatcgaatcacatccaatgagtgctcccccaagagtatcgacatcgttccgcagtttgagataagatgattttgtgcgcggtgatcgtcttaagacgtcttggtcagtcagtcgtcgtattgtggtctgcactcacctgtgaaccattagctggccatccgaagatccctttcaaccttgcaggatacagcagtgccctcccactgccaccaggccagtgcctctgcaagagctcatcaaggcgctcgtaggttaagatcgactctgcgtcaaacattctgcccagggcagcgatgaagggtgtgcctgccttgccacctgccgtttcttcaaaagtcctagttgccaacaacatcacgtccttgtgtgcaacgcgatggaactgtgcatcatgatctgctcttgctgcgtcacgcagagatcttccgtgctggaacggcagaccagtgccgggggcaatggcatctgcttcgcacatgttgagcacgcggatgagtgtgccgcaaaaacgttgcgcttccaccaccgcatcgatggcctcagctgacaccagctgtttgtaagaacatactaatgtaccgtgacgtggcgacccctcattcatgccatgcccacagaataacaaaatagcaacgtccacggagggctccaacaaccaagccaattggtccatgacggtcctccggcacacggtgccttcgagaacactgatctccataccagaacccaaaaccttgttgacaaaaacatcctggtccttcatggctccgccacatctgtaccccttcaagtcccttggcagcgtaccacactcttgcaatgtgtgcataagcacgggtcccaacccgtctacgtagtaacttggaaaaattaacaaggcgcgacgagtcttaacggacgccatcatgtgctcctactctcaaataaagtgggacacgctgtaatttcctttttgatgatccggtaccgagaattaataataagaagtgtctgtgataagagtccgccgtgttgttgttatgctgcaataaatgacgatcgatttccattgttgccgttgaatttaagctacccgtatatcctcgaacctatgaatttcttataacacatccgggggtccgggggacatgtagtaagaaagatttgacacatgcctgcaggtgggatgccggtgcccaggatgcgccactggcagagaacaagaagcgctccgcaaaaagctcctgcacgaaacacgaatttgcgtaagttttaccctgtagtgcatcccggtgtatcatgcagaagcaggggcacaagccaagccgcctgcttgagacggcagttcatgaaaaagatgaatctcggattcgaggaataattcctggatgttggtactgactgctcaacataaggagtaaaaagctgtgcatatataatcaagtatgcctttcaaggtgggttttaaatcgttgaacattggagagcaatgtgcaaggtatgccgatgtgcgtcaattgtttggatttcctgaccgtttgcaggttttgtttctacaacgcaatgcgttcgaggcgtacgtcaaggacgatagcatacccttagacccgcaagaagtgtggcatgagaatattcatatccgcaaatgcaatctcaaaggactcgtctgtgcgcttatgaggagactgacactgttggagcacatgcgagcatgggagaacaataaggatggacctagacggggggcatgcattgttgagatttatgtggagtggaatgtattagaaaggagactaacccgcctcattgcatccgacgctgttgtgggcgattccgtgatcctcttctgcccaaacgaaagcacatgccttgccagacagttggacccaaccttattgtcatcaattccacctgacgtgatagagaacataataagtatggtaggggagccagacgcgaatgcgctacgcgcagcatctcctaccatcgacgctcagtatgtgccgacgaagattaggaagatgttcgtcgttctggaccagattgctgtttagttttgtagtattattaaacatcctggaccgcatcgtgcttcctgtgcttgttgaggagttctggttcagattgtgatgatgtgtacaccgggtcatcgctgacttaccttaacaaggaggtgctagagactttggggtatgagccaagctacgacatcctcaagagggacgagatgttcgacgtcaagatcaacgggtgggccatgcaagtggggctctgcccgaaagagcgttgcaagcacgtgtgtctgttgggtcataacgttttcagaacgcacggtcttaatgtggccatcaactacagtcggcggaacagtaaaatgaaacatatatcagatggaaataaatgtacgacatcgccgttagaaaattggcgttaagaatggtcgctgacttgggtgtgttaaaaacttctgtgtttacggacatcagtcgttctactctgtggaggtggaaacactttggtgtaaatcgaaaacgacgtgaatttgtaagcaacctttttgagacgaataaggatttgttaaaatcgtttttattgtcaactcaatgcacaaccgcaagaggtgtcgttgcttttttcaaaagtactcacaatgtacgattatcaactaaaacagtgtatcgtttcataaaactcattggttttacaagaaaaaggagcaaactccgtggacagtgtaaaggggacttagttccacttgtcaatgaattttgtagtaggtacaaggagacaatcaatgctgggaaaattttagtatcagttgacgaatgtgggtttagtgagcgtctcaagccacattatgggtattcccctgtaggaaaagccgtacacaatgttccttcaagtgtattgttatcgttaaaactactagtgggtgggtacaccacagtttgttgatggcagttttttcagatggtaggaaagagttcgtaccataccgaatgaaacaaagacgcacgtgtctgatatgatttccttagcattcggcaacctcacttatcaaattattatgggttgttttgaacacgtttggaacacttatgtgtataaagcggtctgtgacgtattgattatgaaagatggcgacgaaacctccgacaatcgcgaaattgaaggagctactgaaattggctgaagtagcatactcctcaaaggacaagaaggacgatattgtccgtttatgcgaagacaatggtctcatcgccagaccccctccagaatacaagacggtggaaaagatgtgtgtcgtgaaatgcgccctgaagaaggcaatgagtcttgacgatgaagaattcggtaagtttagggagcatgtggaccagctcgtcaatgtggtgagccgcatattacggcggtccagtctggtgctgactttccacatcacgagtctcttagagaaaggtctggagattccagacatgtacattatgaaagatacctactggaaggattggctccgtatcggggtagacgaaatcttccctgatgaggaaagcaagatatcgtacgaagctgtgaaggactccatcggcgatgtaattggtaatgacgacgctgactacatcaagtcttatccgatctatttcgatcaagtattgaactatgcaggtcacacattaagcactgtcgtgtcaaataacgcatgggttcctttgataccacgtctggccagactcacttccaccactttaaataaattaaatgccccgaagacgctggacacatcaaagatcattcggggatacgacgtgatgcgggctattcagcaagaagtccaaaacatggagggatggccagagtctgttcaagagtacgtcaatgaagttagggagatgctgagtgttccagatggaagtcgagtttatgataactatggcaaagacatggactttccgaccatggtccgttttaattattggatacagacacggttggaggatatggatgcacgtcgtatccgattgatgcccatcttcaatgtccaacaggtgcacgttcgccttgacctgaagaccctcgtgaacctgttcaggcacatgttccccaatgaccataacatcgttgagctttccaagtgggaacatgtaacatgaatgggttcccattggctgaacacagaaagaatgagggtggtggatagagcacacatccctcgctcaatgagacactgtcaaatgtgtgggttccaaaaacctgaggatgaaatgcatatgtttgagtgccctttttataatgatattcgcctccgctaccagaagctgtttacagatatttataggcatgtccatgaggataccaacttaaccgtatggaatgtggaattctgcgattccacattcagaacctttatgaatggaaatggcactaagtctttttggagcaacctagccgactatctttctacttgtagaagagcaagacaggaagccctggactgcttagtggcaccgtaatttatcatccctttttttcttcttcttgtgacttctcatttgttagcttcttacctccgccactgtaagtggttgagatctgggtccggctctaaggggtttaatacctacgccaccaaaacggtggttgggagtttggtttgtttgtcctcgacacacccctgatgtaatggggttttttgctttgtgggtgctttttctttttgtttaaagcacagagtctcatacaccctcgcggtgtcaagtagactttaacatgtaatgtaatgtaatgtaatgtaaagaatcccgacagcttcatgttgccccagaggcctgcacataagaagaaaaaatcatgtggtccaggtgaatgggaggcatacaagtcggtcctgaagcagtacgatgatgatgttaaggatatcaaggctactgacgagtacagacatgcaaagggtttgtatgacacgcttgtgaacgcccgaaaaacagtcgcaggttccttcttcagaaaaccacctgtcaagaatgggtgggttttcgacagcagcatctgtactgacggagtctccttgagcatgcagtacagcaagacagtacatgtccttgtctcagatctgaagaagacctgtaagaagcctcgtaaagaagaaggtatcaagatcgcagaaaaatacgacggctcacttaaaacgatattgcccgatatgggtatcgtcgtcctgggtgtggacccaggacggagcaacatcgctacggtaacgtatttggcagacgataaaaataagacatggactctgacacgtggtgcattttaccacaagtcgggtatcaagaagcagacaaggcagaaggaactgcgttttgctgacatgattcctatgtgggagtctctgcgtgaaaatggagcagctttaagtacatcgaggacggataatatctcggcgtacttgtcaaattacgctaagttttctgacgagtggtggagattggctttgcgacgccgagaatcccgtgacaacttgcagcgttacatcggaaaacgaaaggtcaaagactctttctgggcgggtatcaagcggtgcatgatcaaagaacttcctgatatgaaggtttgcgtggcctacggatctgccatcacgaaactgaagcctactggaccgggagaagttgcagttcccactggggccatgttcgcatcgtgtaaaagaattttcaaagaggacgtttctgtgacagatgagttcaaaacgactcttatgtcgtggtagacgggtaaagaaaaaaaacgtgtttacaagatcccaagcgtttgttcagcttgggacgtgaagcttaggttgggtggtgaacgttttggtcacacgaaatcgaaaactatgccaaaggtcgctgattgcgaccacttaggggtaaggttgtacaataaacgttaaggcgcacaagagaagcacaggaggggtggcttcgccacttcccttgtcgattctcaaaaatcgatcgagcggtacccagaggtacgaggactgcgattctctccagaaacatgcatttactcggaccgggatcgctcttctgctctcacaatcgcaaggctgcactgcatggaattgatgggtctaggacgacctcttccatttgcccacagcagctctgttgttgttgatgaataaaaactcgtattgttgtagacaccactcggtccccctccggtggtcgcgacaacattaggttacaccgcaaggtgtgccgtacacgaagcggtttcatttaagtattccgttgactgtacaagcaacaaacggtgaaggtcgccaaggcaaacgaataatgtcggacggtgcgatgagaaattataaattcaggtcaaaataccttaagggggagctgaatgagataatggatcggaagaatgcagtgggagaacaaagtgctagtgctgtcggagggtcagcgcgaggtgagctgtcctgcgctagactgggatgcggtggcgagcgaggttaggggtgctctagtgcccggcaaggcggtgtcatgtatagcgttcataggggctgggagcgcagagaacgaggtggcgctgctgcacgctatggggaatgtgggcgggtgtttatgcactgacggggtgcggaagcaacaggtagcttttctggacacatgctttaccacgcgatcgttacagaatgttaagtgctatgcggacgggctgagtgatcagcagccccgaccagcgttgttgttttcattcaaggacctgacaacattcttgcagcgacagcatgcgctgcggcctgcggagcagttcatagtgctcggcatcaacgcggggatgaccatgaacagcgcggaggagctgtacgaatgtcaccggttcctgtgccagtgcgcggaatgggcggcaggtggcgctatgcaccagcagtacatgaatttcatgggggtcgccaaccactggagggttccgggccggtcggtgcatctgggcaccgggctgtggtgctaccagagtccctggtgggagctggccaagtacctcatgacagatacaagcgcagaactgctcctgttgggacggcgaactgcctgatgctgaggtcaacatacactctctcgatggaaacacgcattgatcgagtgcattgtttctgttcctgcttgaccctgacatccggattattttttaagacctaaaaaactgagaacaagaatgccattattttgttgataaataatataagaatctctacaactaaatggatatcatccccagaatgcaacacccgcgtgggaggacaagaatgcaacatcccgagttcaaactcagtgaagaccttctaaaccgcaataggggcaaacacatttggaagtgtggtctgctagaaatggcagaattacaaccataccgatgcttgaaatgcaacctgacaattgcagatctgcagcaacttggcaacactggagtttgctcatcggaatacagatacactcgacggagtgtacggcacaccttacggtgtaacctaatggtgtagcaacacggggtctttgttgatgcgcagcgtcgccggtgtgaggggtggtcgaggtttcaagaaccttgtcttcttcacccccgattgcagagaactgttaacatcagtcagtgccatctcatggagcatcacgacatcatcgcatgcacagctcagcgaaattccatgcagcatgaaatttccaacgaggcttcaaaagccgccgtgtcgtgggtgagaatgaatggacggatggggggcatgcgaaagctgcatgtgaaaaaaaaattgactgaattgtcataaaagaaaccgataaccaccacaaacacacacaaatacccacaaatacccacaaaaacccacaaaaatggcaaactttactgaattatacaacgatgttgccaatgacacttcgggcgttccgtcggatccattttgcgatcgcgcaagagaactcattccgcccatggcgcgcgtttgggaggtacttgcaaagctcgccgttcaatcgtgggacaacgaaatacaacaggtctgccaatggtcaactgacatgactgccaaagacttcacagacggaaaccacgccaagctgtttatcaaccatctgataacagaaccgccggacggatacacatgctatccccgcttccaaggcatgtttcttggtttggaagccgtcttcccgtacacttcttggtgttccgtagattacattacccacacacgcaagattttaagcagcctgttcattgagttggatgagttcagtatcgattgtgtggcatctgatggattcgccaatcatgaatgggacattgtacagaacatagcgtcccagtggttgcgagcgtggtgctcggcgcgcaagatccagcgcacgtaccgcaagtacatcgagcacaaagagatccagcgccaaaagcgcctcctcatcacaatccccaggatcgtgtcattgctcaaggattgcatgggtcgcgaataagtaattattcgagaacaacttttttttttttttacattcgatgatgaagaacagggattttctgttcgaacagccttcaggaagatgccagctgcccccacaatgtctctgtcgcaggtgaattgacagttcttgcaggtgtatgtctctccacacttgttcaagaaaccgcacatagggcatgtctgacttgtgtaatgctcaagcccccacaatatcttcaacctgctgcaccccccaacgttgccccaaagcaactatctgcagtctggatgagtataaggtgtgtcccactttatttgagaacaactgtaagggtttaccaatatgatcgtgatcggggcagatgccaccggtgcctgtgagaagttccccagtcatgtcccgtgcgccattgtcaccattcctatgggagaaatcgttgagatattcagtctgtcaggcgacggcacattcaagaccggtgccaccctgcaactcaaaataggtgacgaacacacatggcatgcggtagccgccctacgaagggacatgatcaataaatagtttgatgtggacaaggcggtgttcctgccaccacggaccatcacagtgttcgtgcctcgttacaccaccatctatgacacgagtggtgctggcgagggcacatgcagcctgtcatgcaccactggggacacgcagttgcatgtcggagaccgcattggattgtatgccacactgcgtagtttcggcaaacatacggtttgtcatgctgacgattcatatcacagcttggcgttcgaatgcgaaggcatcacggcggtagtgaacgagttgatcacaaactctggatcacgccggagcgcataaaaatgtgcgtactacgatgtccatcctgtatacaactttactgttccgccgactgtagcgagtcgttcctatttttatatttttatacatgtatacatgtgtatgtaaaatgtcttcaacaccccgcaattcctcttctacctcaaaacgtaagaagacttctggagatgcgacttttgcagctaagctggctgtgttcatgttgaacgctcaatcacacgacattcatttttccgagaaggagggcttccttcactcgagtgattatgtgaagggtgtcatcccccttttgcatatgaacatcagtcgcgaggggtttcaagtggttatgagcactacgaagggtaatttgtccattgccctagctcagttgtgtagtagcaagaacatcgaggatattctttctttcgaaaagttcagttgcctgcgtcagtgtgcttttacaagtgacgttcttgttgaccgtttcgtagacacgattgatacttcttatgagacccgcaagaacggaattaagttggtgaagcagttggctaagcaccagagatggcaggtgagtgccggtatcatccccgagtcctcgatcgcgtggtctgagaatctttaaatacaaaaaaattgaaaggtttttcggaacgttaggaatacaacaacaacctcctcacaccccttaatatactgcatctgtcatacgaaatgtttggaatctctgacgtcttcgcaatcattgcgtcccgacccaaggtattcgtcatttacgacaacccgactttcgtcaccaagcctgtgttaacacgcaaagggatgtcccacaccaagaagtaatctggatgagaaggtgtttctgtttcaagtatttgaaacaaaacggggccaaaatcagcacctccacgtggtggccctggatacccaaccaagctgaaacaaataaaacaaatagacaataaaaaaaacggttgtctatttgttttatttgtttttgtatgtttcattttactgttccgccgactgtagttatgtctaatgcttgatgtgaactgtgaactgtgggctcccctccggtcgcccccggtcggttcctcgcggactcctttgtgggggctcccctccggtcgcccccggtcgctccgctggggggaagaggtgaaaggggctccgccgcttgttgaatactatccgttgtttgccgatggactatggctgtctgtacatggacatctcgtgacacgaaagggcatcggtggcgtgcgcgttgagtggcgtgaggtccttgcgcatacagctagggacatttgatattgggacaccttatatttggggattctgaaaagttgaccaattcaagatttgtaaccgatcttgtcaatacagattctgtcttcaggtgattgacacaaaaaattcaatgaaatgctaccccaaccgaagcacacgccgtcctatactccgcaatatgtttaggagtcatagcaacaacgtcatcaggcgagaacgacaacaacttttgcctgagacggtcctcagccgcatgacgggcagtagcttcattgtcggcacggtcctccgcctcacgccgggcagtagcttccgcacgaagtgcagtagcttctgcgcgacgtgcagtagcttcattgtcggcacggtcctcagcctcacgccgggcagtagcttcattttcagcacgataggcatcagcacgacggtggaagtacatgaaaagcgcaatggttgttgcaaccgctacagtcagcggaacagtaaaatgaaacatgaaacatgaaacatatatcagatggaaataaataataatgtacgacatccccgttagaaaattggcgttaagaatggtttctgaattgggtgtgttaaaaacttatgtgtttacgaacatcagtcgcttcagaatttgggattccccctcatccctgagcgcgtgcacgtatgcctcgcggaacgcctgtgcctgaggtccgcagtcagggatcgcaaacgatccgaacatggggtcccccatggcaccgtgagttgcctcggtgggggccgggaagttcttgacatgtgccgccgccagaataacatcaagtgacatattgagtgtttaataaacattgtatgattcttctttaagcttttccctcactatttttgccagatctttgattgccatatttctgtttctttggtattcgcactgttttgccgtgtcccttgctccatacattggtccctccgggtcaaactgcataatttccctgaattctgtgagtagccttgctaggatgaccccttcgttttcttctttgctgactccgatgagtatctccttgaatttttcttctatctgtctgtaccgcctctttgatagcatggactgcccctttttcatgggggcatcagaagcagtagcagtagcagagtcattagcagaggtaaatgatgatcccgtattgtcttcagccttagtgcccatactacctgattgatttgtcttagtaatgcttgtgagattagtagtagtaatgccgtgtattatcgttttcactttatacataatcgattggattgtttctcccttaaattcccctccaaaaagagatcgagtgcgcatgtgcttcgcagagcgcaactcccctgcactttgcttcacctcccaagcgtttcaatgaaaatcccaagcgttacatcgagaagcccagtgcatggtgtatgtaagtcaattaacgttttaatgttttaacatcacaatgttatgatgttaaattgaaaaaagaataatgattctgaaatgaaactcgacatcttcttctctactttcgtcaggtactctcactcccaaaacgacaggtaccacaagataccctattaaatatgtggtgaagttggtatcgttggtatcgttggtgacatggtttatgaagtgaggaagataattcagatgatgaatcaacaagcgaagagagtagacgtcatgcgtcaaaagaagaccctgagtaggaatgtaccgttgttaccgttgttaccgttgttaccgttgttaccgttgttaccgttgttacaatttagttggttacactgtttatgaagaagatgagaattcagatgatgaatcgtcttgaaaaaagaaggatatcatgaattgataattaatattaccatgttaccaatgataccaataaaaagtaagtatattaaaatgtcacttttcacttttcaatatgaaaaatgaaaaatgcaattttctcataaccctattaaatctgtggtaacgttggtatcgttggtgacatggtttatgaagtgaggaagataattcagatgatgaatcaacaagcgaagagagtagacgtcatgcgtcaaaaaagaccctgagtaggaatgtaccgttgttaccgttgttaccgttgttacaatttagttggttacactgtttatgaagaagatgagaattcagatgatgaatcgtcttgaaaaaagaaggatatcatgaattaataattaatattaccatgttaccaatgataccaataaaaagtaagtatattaaaatgtcacttttcacttttcaatatgaaaaatgaaaaatgcaattttctcataaccctattaaatatgtggtaacgttggtatcgttggtatcgttggtgacatggtttatgaagtgaggaagataattcagatgatgaatcaacaagcgaagagagtagacgtcatgcgtcaaaagaagaccctgagtaggaatgtaccgttgttaccgttgttaccgttgttaccgttgttaccgttgttaccgttgttaccgttgttaccgttgttaccgttgttacaatttagttggttacactgtttatgaagaagatgagaattcagatgatgaatcgtcttgaaaaaagaaggatatcatgaattgataattaatattaccatgttaccaatgataccaataaaaagtaagtatattaaaatgtcacttttcacttttcaatatgaaaaatgaaaaatgcaattttctcataaccctattaaatctgtggtaacgttggtatcgttggtgacatggtttatgaagtgaggaagataattcagatgatgaatcaacaagcgaagagagtagacgtcatgcgtcaaaagaagaccctgagtaggaatgtaccgttgttaccgttgttaccgttgttaccgttgttaccgttgttaccgttgttaccgttgttaccgttgttaccgttgttaccattgttaccgttgttaccgttgttaccgttgttaccgttgttaccgttgttaccgttgttaccgttgttaccgttgttacaatttagttggttacactgtttatgaagaagatgagaattcagatgatgaatcgtcttgaaaaaagaaggatatcatgaattaataattaatattaccatgttaccaatgataccaataaaaagtaagtatattaaaatgtcacttttcacttttcaatatgaaaaatgaaaaatgcaattttctcataaccctattaaatatgtggtaccgttgttaccgttgttatgtggtaccgttgttaccgttgttaccgttgtaacaattagttggatacagactgctatacactcgagcgaattgctgaatgtcgaacagcgcagcgattctgagactgcatatcgcggaaacgcattcaatgttgaccgcattagtgactgtacgcttgcacgcactgcatggctggtggcatgatgtggcatgaccgggccatcatcaggagtttattgtgtacataagggggaatcgtgtgtttattgtactcagtg

SEQ ID NO: 210 - DNA, 21188 bp, Ectocarpus sp.
  variation 18582..18743: note = n is any nucleotide
  variation 41: note = n is any nucleotide
  variation 18890..20521: note = n is any nucleotide
  variation 17704: note = n is any nucleotide
  source 1..21188: mol_type = other DNA
  variation 18310: note = n is any nucleotide
  variation 2498..2729: note = n is any nucleotide
tgcagccaaatcacatcaatcacattttggcctcgagtgantgttcattggctggctcgtgtgatttttctcgttgtacagaagaacggggggcggtccatcatcaccagctagagaggggggtggtatccatcatcattcgctagaggggggggtggtgacgatccctcaacagcttttttttgcaaaacaaaacaaaaagcgtacccctaacgggacacacttttcacaaaaaaaaactaatatagaaaggtgctctctggtgcgctgacagagttgtaggaccacgagacggcaatacggcctgctcctcatttattccaatcctccgatcctccggcgcggtgaaaacgcgaggaagaagataagtaagtgtggcatgcagccaaatcacatcaatcacattttggcctcgagtgaacgttccttgctaacctcgagaatacgcagagggtgacacgggcagtggcacgggccttgagattcgggcgggtgtgagccgacccggtcgccatttcgctttgaagctaatatattgtgctttgctcacaacgaacggcttcattctttgtgcacttcacgaccgcctacatatggcaacagcctcacaacgcgtagtactacatatgcgaaatatgcgataaggtatgtagcagccggcgactcatgtctctgttgggatgtacctgtagcgctgtcctgatgctgctgattacgcgactcgtgcagaggtggaatcactggtggctaagccagtgtgttgaacaacccttgacgatgttgtgaagtttcgcctgtgtgcctctgatgatgtggtgggttgttcttgaactgctgtagctcgatggctgtgtttagaaggtgatagttggaagtgagcccggttggcgagcatgttctgtacatccgtgtgtctcgaggacccaaagatttgatgatccggaaacgttctggaaccctacgtaccgttctacgtagtacctgagcgacagttctcgagaaatcctcatgaatcgcattctaattggtacgtacttgaactgcctttgtcccttccaacataagtaagtgctgttcctgtcatcgttcccggtccaggaaactcagaaacctcttgggatattccttggggagaaaacacgcgttcaaccccaaatgatattattcactactctgttggtaatttcgccaaggcggtccacggggctcaccgtggtcaactacggcgaacaccttttgttagccacggtgaaccacggagaaccggtcttgtctataggctatgctctccgcgatacatcgtggcggcagccaccacggtgcgacccaccgaaatctaaatctaccgttacaatatccgcgatgcgccgtggcggccaccactgctgtgcggtcgcccaccgaaacctgggtcctccaaccacaccaggatgtgggcatcttagctcagtcccgctcagtcaccgggctcatctgcctactaccgcccaccgcgctccctatgttctcatgtgcatgattcaatggccaatcacttcgtctaccctcagaggagcagccagcgacagcggcggggacttttgggtcgggatttcacgaagagtcttcgacgacaaacgtactctgtacataaatttaacgactaacaaagtatgtcagccacgctgcgtactaccttcgaaacaacccgcagagtacttgatcgtatatagagagagtgttgcttcattcttgagtgaatgtgttcgtttccctcttagcgccgactgagaagacggcttatttcgctcgaaacacaatcatatcagactccaagatgaaacggcgttctagagtgtgagagaaagccatgttcgtatagttgatgctgtgtgtgtcgacagagtgacgtagaacaacttgattggacagtttgcattgcgggactgtgcgcgttgaagatcgttgagtagccacatattatcagcacagcaaggaacgttctgtgggaatgttcttcgtggatggtgcattaccccgagtgtgtttcttgtggatagtgcatcagtcagaggattcatggtacgtcgtgatgtacgtttacccctgtctgttgagtctttgtgttccgatatcattgtgttctgcttttgtgcgttggtcgagcgacatgggtggtggctgcggtgctgcggtgctgtggtgctcccgacccttgctcacttcaccttttgacctgttctcctggtccaaggtctcaacaataaaacatcttttgcttagacatgggttgtagtgaaggggggggtctttctggcgagcagggctagactcaccctcaagggatgaccgaaaccttcttgctgctgcgcatatgccgcgaggagtgcgtgtggtggtagagttgggtctgcactgatggggtcaggcgggaaaatgtagatgcgtgggcctttctggccgtcggcgtaggcagtgatgcccatctcatttttgtgcgcggaggcagacaccatcannnnnnnnnnnnnnnnnnnnnnnnnnnnnnnnnnnnnnnnnnnnnnnnnnnnnnnnnnnnnnnnnnnnnnnnnnnnnnnnnnnnnnnnnnnnnnnnnnnnnnnnnnnnnnnnnnnnnnnnnnnnnnnnnnnnnnnnnnnnnnnnnnnnnnnnnnnnnnnnnnnnnnnnnnnnnnnnnnnnnnnnnnnnnnnnnnnnnnnnnnnnnnnnnnnnnnnnnnnnnnnnnnnnnnnntcttttcctgactttccgtgttggttttgtgtgatgacgtcgtcaccagttttgtagagagacccgtcagagatggcgtggctaacccgggtgccttggttttgtgcctgatcgtggaagaccccttcaatgtggaacgattcttagctattgtcgatattttcactgcgtgcctaacgcagacgatcgggagagattcgggtgattgtccattgcaatcatggctttggttggttgttctttttcactgtacgtccgcagacacattctgacagcacttcagacagcagctttgtgccccgccagcttcttgttccatgcctaccatggtgtttttgtacagacagcacttcagacagcagtatgctgtagtcgggaatcttccgttttggtatagagtgggacagggagggggtgatgctactgtagtcgaacggtgggacggacgtgctgcagttcagtttttgggcacgcatacggtgctgcagggatttttaggtgtacctcttcgggctcttggatacctttttctcgttatatgtgtgcgtgttctttagatcctcagatagctctagcactttcgtgaccacaggctgagagtctttgctagattttggcatttagcaactgacatgcggtttaatgtgacgacaacaacaacaacaacccagcaatctcttccggaaataccggcctaaaagctttcttgcccggcttggccgcgttagccgcctactgcctctccccaagagtatcgcacgccatgagttctaaccaacatttgaaacgaacatattgacggtatgcttcttgtacaggtccatgaatgaagcaatgtatgcctttaagtgcaaaatatctttcgacccgacacagatacgacgatgctcgttgaccgcggcccactcgacaatctcacgcttgacaccatcctctcccttcagatttttatgggagatcatcccttgcattagcgttttcagcacaacagacgccggtactcctgctaccaagagctcatttaagctatccctgacatcaatcagctttcgcgggctctgctccagaaaaacacccgtgcatatggattcgatgtacttggcccacaccatcgtgtcggctctgcccgccttggccatgaacatcgctcgagaaatggacctcccccagctttccacaatttgcgaaaccaacgccttgtcatcgatgtcaatctcctccgctaaattctctgcgctaggaagtggcacacgtatcaacacgcaccgcgaccgcagaggctcgatgactctcgaggcaaaggtcgacaccaacaccaatcgacacgaggcggtgaacttctccatcatccttcgcagacccgcgtgcgcctgcttgcttaaattggcggcgccgcgcaacacgatcgtcttgtgcgtcacgtcacagtttttgaagacggcggcgatggacccgttgttggccatctccttgatggcgtgctgcaccacacacgtgtcgttggcgccggcgtcgctcggttccatctcgatgtggtggttggatacgcgaacgtcgatctcgatcgtatgctttgacgaggctgtctccaccacgcgtttttcggtagtcaccctgtttacgcctggaccatacaatttctttaaaaggtgtctaactagcgtcatcttgcccgattctcgtgggccgtggaagaggaggtgcgggctgtcgccgtggcgcgacatggaagtcaggcgatcctcgatctcggggtgcatggcttttttttaaaagttgttttatgcgtgtctcacgaatcaaaatttacagttgaatgtcgtgaagcacggggatgtctttatagacgtccttgaactcgtcgcgctgcggatgagtgtgggattgacaagttggtttccgatcggccacgaacaggtcgtggtacattcggcgacagagcaaatagaggaggcaataaagcatttatagtttatgaaaaaaaaaaaaattctctgtgtttccgcaactaaacttccgacgacgacgcaaaaatattgagagcatgacaaatgtcggccaccgagaaaggttttgtgatcgaaagagttctgggatcgccggactcgtgactatcaccgctgcaaagaatggatggcaaatctcttggcaatcccatcaccccacctctccgcacgctgcaaaaaaaatctattcccgtctcgtctccgatgaagctgtcggtgatcaccacatcgaactttcatggacgagcacgagactcttcggccgaacacgcattcacaacctcgcaaccaagcgaactcaagtacttcgacaatggtctcaggatcaggactgaatcgtccatcgcaagaacgcgaaacgaaaatcgcgtcgatacctgcttttgtctggagacgatgctgcgacgttttcgtggcaaaaaaagcgtgaacgtgcttcctttaccctcgccgggactcgaaacttctaccttcgcgtctatcgcatcacaattttttttccacgttggacaaaccaaggccagttcccgaattgatctgtgatgctcttccgctcctgaaaaagagatcaaaaactttgcaaacgtcggcctcgcttagaccaatgccactgtccatgacgcgaatctccacggtgttttccgaagcgcaacggcgcccagaacgattttcccgctctgtgtgtacttgacggcattgctcagcaagttacacacgattttatggaggcgctccctgttggtctgtgctccgaagttttcgccgtcgtcgtcgattctcacgcccactgtgatgtctttgtcctttccctccaacagcagcaatcccgtaccaaccatggaatacacattcaacagctctgcgatgtcgacatcttctttggggacaacacggtgtacttgcttgccgttgaccatgtcgaccatgtcagacactagcacgttgccaagaatgttgacggacttcacagtttccagaattctgttgtccgcatcggtctcaccgacctcgcatattgtctgaattaaagttgcattgtttttcatatcgtgcccgatccggtataggtcaagggtctgcctctcagccagctcttccgcttgacaacgagagatcctctcgaacttctgtagatcgcggagctgtgataccagaatgaccacgaatgcgttcaaggccgacagcgccgcgattcccatctgagtactacctatcaacacctcttctgcttcaccacccttggtgacatgcacaaaaggtcctcggccagccgccgtgaaccctaagattgaccccgtgaacgcaagctggacgagacttgcttggaactgatcaacatatgcactgactccaataagcagagcatacattattccgacgatcgacgccaaacccaagaggtgatagttagaaacgggacacatagatgtgattccgaggaaagcgctgatgccgcaaaccagcgcgttgggcgatcgaggtcgggttttccatagggtcggcacgatcagtagagggtacagtagtgttatcgttcctgaaatgtgtccaagtgtgtagtttacgaccactgaagacagttcgacgtccgtacctaggaagtaaaacgcaaggctcccgggaatgctcgcgacgatactcgcgataatcaccggaaaagcaacaaatattgcaaggaatctaagcgttccaacttcctcggatgatagcaccggatagaagtgcttcattgagacgtacccaaacaattgacccagagaattgcttgcgcaaacagctaacagcaatggtaccggaaacttcctgaagcgaaaagggatgtagggtaacgtgctgctcgcgatgtgcccgacgcgctcgggccaatgtgtatcgggggtgtgcagcattgccgcgatcgcgatcgcagtctgtgtccatgagaagatagtacctccaggtgacgcaaagaccctgatgctagcgaggacgccgatgtattgtgcgatgaaaccacctaaaatgcgaccaacgcatggaaacatttgtgcgagtcataattacaggataccaaatattactcaactcaactctccttcttcaagcatctctcgataatggtagcgtattcgtcgatgtcgtggtcggacaccgaatccaatctccaagttttgagaaaacctgctttacaccagttattaatttactcgtaagaaatgaaaaagaaacatccaaaagtggtcattagtgtaaagttaagcatttggaaagttaatatattttcatacgacaacatgaaaaatgacttactcgacacaccatgaaatatacgacgccttcaagaaatgtgacgaacgatggatacagcgacgccgaaaaatggacacatcgtccactttctacacgctgatcaggtgttgtattcaaggaaggggtgttggtcatattctgaggatgggcgatgaacaatattcaacaaggttttcgtgtgattgagagcgaagtttctgattgagagcgagattgcgcgatgcgctgtacctggactaccgctgagaggtggagcttgctgcgtggcttgaattgaaggcctagcccgtagctacaagccgataccctggtcatcctgtgggcgtctctcgttgtggagctacagcggggagcagaatctgcagcagagctcaccgcgcgcgatcaaatcgccctgaaacagtttgaggcaggaatagccaatctggggaaatctagcaacttgtctagctcctagctgcagcatccgatcgcgatgacacgcatatgctcgtatgctcgtgacgctgctgatgagaccttccatttgcgccgcttcttggaagagcccgccccctacttcccaagaaatggcaagaagaggcgtctggccccgaaatttcaatatttttggctcccgctctcaatcgtatactccgctctcaatcaggcgaaaaccctgttattcgtcacacacaggaaattcatctcgccaggaaaaaacttcccacgggagctttcaaggaagtgaatcgtttcttacacagaggaccacatgaacctcgtgtttttgccatcgatggatcgaaggttcatgtcaatccttccttcatcggcgaaaacccgaacaaacgataagccagtaccgcgtccagcaaaaaaaactctcgtcatgctttcttcgatggttgatgtgaaaaccagagcatgtatgtgtggacttcgaactcacgagacactttaatgaaaggaaggcggccgtatcaatgctccgaagcgaaagaaaaggtgacacgctggtgtttgacagaggatattactccaaagacttggttcgcagcgttcacgactcataggcgttcggagtttggcggctgaagataagtgcattcaagggcacgaggtctttcttcaattcgtggaaaacagaagcaacatgtcttctgcttggcttcagggctagtctcatgaaatatttcatcaacggcaaaacgtatgtttgcctaacgaacgacccgtctttgtctcggagagacgtcaaggccatctatgcgtcgaggtggagagtcgaggagtctttcaaacggttgaaatcaaatctcaagcttgagaaagctcacgcaagaacacccgctctgtacatccaggaggtagaggctagagtcttgcttgacacgatcactttgaggttgcaaaaaaagataaaggagccatcgtatatttacacacttgacgcgtacgtcacaagtatcctgcgtaacgtgagaaagtttctagtcgcgcgaaatacaggtcagtcagcgcaccagcgccggaatcaagtaagtgtggtcggcatcatgtaaccggcaactaccaactacctccaaactcgtgttccacagagatgcatccccatcaacttcaccatcccacgggtcctctttgtgtgaccaatcacatgcgccggtgaacccaagccatgtgtgaatttacagtaaatagtggaagaaaaatgctcccccttcccgtcacaactcattgacctgcaacaaaacagcatagagtccgaagaaaacaacatcagctgcagcacacctccgaaacgaaaagcacacgattcggccacggagaatgctggtgatgacggtgataacaaagaagacgacgacaatgacgaaggctctacaagcgtcgcaacgaaagatgaactcaagcagtttgccgaagtgagagggatcaaagacgactcaatacgagtaaagagtgtcaccacgtccgttgatgcttgtgtacgagacgacgttgtcggcaaggacgttctgcttggacagatcgacaaagacgcgagatctctcggtattcttcgtcacctcgtctctgtatgtctaaactttcttgcagaagaggacccttcgaacccgctcatcgtcaaccggacgtttctacaactactattgtctcacatctctggaaatgaactacatagtcgtgcaaagatgctacaccatcctagcctggaggcctacttcgagaagcacaagttggacaaagagacgctgaaggaagtgcgatctttcccccttcgttccagggacgtactgtgcggagagatgctcacctcgatcaagaaacacattgctggaaacttcgaaaagagagcaaccgagcacttggcgtgtgagatcgagaaaagactctgggagtttctggacgacaagtacttttggaccaacgtttcaggggcggcgactcagctgtacagggctgctggacaaaagcaggaagaacgaactctgtcagaaatacacgtcttcgcatcaaaacaaagggggaaggacaagagaacgctacccagcgagtggaaaggtgtactcgaggacctcttgatcaatacaggactctctttgaaccccttcattcggcgtttcgaccacaaaaatcttcgagaagccctcgaagaagccgcgcaaaaaacgtccaaagaaaacccacgcaggaaacagcagtgccgaacaaggaaacgcgccaccaaagtcatccgccagaagaccgagtgtgaagaagccgaccgggcgggaggatttcttctacaatgtcaaggccaagctaaacactgttctacaaattgaagcgacgtttcgagaaaaaagctttcaacctgacgagaagaagaagcgagtactgggccgtgatttacgagaggcagccgactatcaacaagtctgacacgaaagaaggctatctgaaacagcgacacctcttgggggagctcccggtcccagtgtggttcggtgaaggcatcaacatgaccgacaaggtctcggctattctactgcgagatgtctccagcgcccggaaagatatgtggatcaccatgagagaaccaggcacggaaacccccccaaacctttttccctgatgccgcatttttctcttacgagagccttcgtcaaatacgacgaacgaagtctaggccctctccttcgaaaccttgatctcgccgtgggcaagaacgatgttaacttacgaacagaagaggtcaagaatgccggacgacaacaaaggctgtggtggacaggggccttcgactttcacaccgagagaatggtgcgcagaccacttgggacccggaagaaagctcaacgcggtaaggggaaaaaggtccttcgtcaagtgacccgcttccggaaggggattgggttgttcacgaaggatccgtgggttaccgacgacctcttgtatgaagcaaatataggggatcctacttgcgaagttccgtggctcgtcaactccatcaccactgacggtttgcaggataaggtgtgtctgacgacgctcgaaaagtccaatccgcttgcgaaaggtgtaaaagagctcgtgaaggaaggattcacgggtctttctccttctccgttcgccgtctccaagcattcgtcgggggtttttggaaaagcaaagaaactgacgaaagtcgccaagtccagtctctcatctgaagaaaatcacatcgaagtggtcggtgtcgatcccggacaagtttctatctacgcagcggttcgagcggacgtgaaagatcccgacgtcttcgatccagcttcgttcaagggatcgccatcgtcattgtcttctcgggagtacaaataccagtctcttgttcgattcagtgcaaagtccgagactagacgaagggagcaggacgtcgagcatggggaagctgtcaaagcttttgattccgtctctttgaaggatccgggttcttcttttgcctactctgccgtaacctactcaacgctgagagcaagagtagctgagcttctgtccgaagagcgtagacgcgaaaggttcgctaggcttcgtgcaagacaacgttcagtagatggtatggcgagagacatcgcgtttagtgacgcgtataagcaagagattgccgaacgtccaaacaagagggccggaaaatctctcttcagaggaagaaggaacttctgaagaagattagagcaaagaggagcgtggtatttttcggaacggccagttcggccatggttccagggggccttgtcccaggaaagcattgatcagagctttgggtgctgtgtccggtcgttctggtcgatgagtttcgcacatcaaagtgctgcttcggttgcgatactccacttaagcaagtggaagggtctcgggtgtttcgctgtgaaagccagacggacaagaacctttcttgctccgtgggcttcatcgacagggatgtcaatggttcggttaacattggagtgtggtatttcacagctcctaggatcagagagaccgacatatctttgtcgagagtctagcggagtcaaatgtgttcagacgcattttcagaattttctactaacttgacagtaatgaaaagtggtaggcctcgtttaggtcaaaagagtctatattcatttattatttttgccttccgacaattgcagatgtacctcagaaaactttcacttaatgtctcatactctacatgagtattaaaccaatgcgaagtacaacaacatatgtaggacttatttctactgtcatttacatcgtaaaagtatctcctcttcaacttgaaataaaaccaatgataatcctgatggtatcctatatgcgttcgtaagcttgctaaaatactactgcgttgatgtccgcttgtaaaagctgaaatccaacaaatgctttgatccatgctacatctccgtgttggaaaagccctttcatctccgttcatgataacatcttaccctattctacgcaaatctgtcacatctactctcaaacaagacgccaacttcaaacgaaaacgcgttctacgatgcgtctacactccatccccatatcattggcgttgactggtccgaggtcgatcttgttcgcctgttttcggcgtcttgacgcccgcgcaatgcgaacttgtacctctgcactcgccgagatatggccacctgtatagccaccgaaacggtagtctatattctcgaaagtaaccacttccggacatgtagagagatcgtaaccagttattgccgtacccgaacagatcgagtctaaggtggcatctaccacaccgagtacttccgacttcacaaacttgtaaacctccttgtttacgcaattctgaagacggctcttctccttgatgtagtagttcctcgccccatgcaaatccctttccacgtttcttacacaacaaccagaacacgagtaaacctcggatgatccgggatcgttgcggagaccacagaccccacaacactttgtggttccccactccgaccccccgatcaccgtcttccctagggtgttcgctctgtgcctgagcttctgccggaaaccaaagtgtctctggtagagcatcctctttctggtcttgacgccaaatacaaagcttacagttctcacagaaccccaaattttgtcacagaaacactagcatcctctacaagcctctcgggaaatatatcgcagtgagataaggtaggtccatgtcgaataggatagccccgttactctagaccgaccgccatcgccctgaacctgtatcaaccgtgcttccgctgcaaagtagtttcgaaaagccaacaaaaaactactcaggcgaaggccccaaagccaaagtggcgcatttttttttaacatactccttccatgaaagagtcaggcggttctcgacacagctcttgatcaagatgttacgagctccgttctcgtccctgtccatgactaccccgcacgactgacagctgaagaccttggaccttcccagggcgcgatgtagacgtccacaacacgaacaggtcttggacgtagactcctctgtgacgatgacaagcttcacaccttcgcggagcgctgtggtttttagcagctccttaaacttgtagtgagatcatgtcatcatcccccgtgccgtaccattaccaatgttccgcttcgccctgttgaccacgtctttcgtgttgaacttcgggaggaagacgacgtcgtagttcttgcaaaggtgcttcaccgtcttgttcctcacgtccgtcaccagatgtgttactctcttgattgcccggtgccatgctttgcgtagacgatacctcttcttgctgcccacggacttgtcgaaagctttggactgtagtaagtccatgtggtgacaaagaggatagatcctccccgcgtccccaggagcgaactcggtagcatttccctttgtgtccaccccggtgttgaacgtcctaactccgggatcaagcgcgatcactttcaagtcttcgtggtactcgacttgaggagggatgtcggactgctcggtgacgccatgaacttcctcacccctgggtctgttgagactttccggttgaccccctcatgtagggacgaccgtcgaccttttcaggaaagcaaaaatagtatctcccatacacgcgacaaatccttcctcttaggcttgagcctctcttccttcgtcgcttggttgttggtcttcttcttcttcttcttcttcttcttcttcttcttcttcttcttcttcttcttcttcttcttccactttttctggccaaaactcttgagcttctccatgtttgagtggtaagcctcgtatgcatcaacggcagcctggtgaccacacgtgatcggtcggttgttggtgtgccggcgcgatgcttggagctgggagacacgacggaggaagaggcgctcgagctgctgctgaagacgagcgggactgcgggacggcctggggacgctgtccggacacagatgaccaaggtgatgatatgcgttgaatctttcgtcgaggtgttgtatctctagcgcatgggttgagacttcctcccttgtttttgtgccacctgatgctgagtgtggcatcgattggcggcttggcctttgagtgtacacaggtggtcgaaacaagcatcaggtacataggtttgaaccgtgttgtagtttaccaccacctctcattcgcaattattccgtggatgtggtacgaagttcatcttcggtgatgaaacggccctgttgctagcgatattcccacgggggaggggtatagcgcctgatcgtgtgtcgacgttgttcctggatattgtctcacaccacatgacgatcatcctccttaaagttgatggggctagtagacacgaagtgccgttgttgcgtgctggttatttcgcattgtccgcgttttttgtcaactcaactcccaacaatcaccgatccaggttgttgagcgctgtggacgcctgccgctgatgctcgccatcgcgggttccatgtccgtcgttgaagggagaggcttgaccgccggcgcctgggaagagctgatcaagctcttcgagaacacggcgacgatgatgtgggagtcgggactagaggcgacatcgctggatatggtccttggggccagcttcagtgctttggcagccaagaagcggaaggagtttctcaagatggctgtgttggcgccgggtgctgttgcgccgatcgcgatgctgcgaaacctgtgggagaccgaggtgcgttgcggcgtcatccttacctgggtgttttgtttgcagatgaatgcctattggaggatagacgcgttgtgtggattgcgtgaaaggttggacaagcgctactcctctgcgcttctttgtgtcctgtgggctgacgtcgatcatgtcctccatgttgtttaattcgcaggacaacaagggtgcgcgagaggaagctgacggtttaacgagcaagagcctgctgcaagatgtgggtggtggtggtgggtatcgcgtacatgacctcgttctggacttcgtgaagatcaaggtcaaggcagacgtggagatggtacgattggttaccgcgcttcaggcgcattttcttggaagactggatgtgctgaggggttttgataatccagagcatggtcctggcaaccaaggcttgttcgttttggatgccctctggcgctcggtggaatagctctcgggaaactccaaactggaggtcgcctcgtatggcaccagccttggggagttggagtcgtgcgaggcaactacggatgtggctggttcctactcgtctgtcggttttttgttcattcaggtacggcacatatttttattgaggattctgcactgctgttccgcattcgttgtgcttacaatggtgtgatggcgcagtacccgtgcgggtttctactcactcggcctggtaaacaattggattttcgaggcgttccatgacacactcgttcgcagctctggatagggaatctgttcgcgagggctttcatctcggtgaggggacttgcgtacacctggcaaagaatgagcgcattcagtaaacgggctttctctaggtagcaggtggctgtcgttggtcccaggagctctggtaagaaagtgtctacgtatggtcttgtttgttttttgtgcattctgcgtgaaccactgccgtataacgacgcactgatgttcgcatagggcaagttcatcgagggcgaaccattctatgagagagcacaggctacacaaaagcagatcttgggtccggagcattcggatgtggctacgtcgctcaacaaccgggggttgttgagaactttttctccacaatcccatttacgactttcacactgaaatacgactccaccacgctgtcttcactgcatccagggcaaatactcggaagctgagccgctgcatgagcggtcacaggccatcagagagaaggtgctgggcccagagcaccctgatgtggccgcatcgctcaacaaccgggcggggttgttgagaaaatgtttctccacaatcccatttacgattttcacgctgaaacacgactcatcacgctatcctcactgcatccagggcaaatactcggaagctgagccactctatgaccggtgtcaggcgatgaaggggaaggctctaggccctgagcacccaagtctagccgcaacgctcaacaaccgggcggagttgttaagagcgcaggtgagagccatcagaaaatgccaagaagtttcttgtggtacctgatagatttcggcagtgctccacaacagggcggggttgttgagcaattgttagcccgttgtcaatccccgctagcattgaccacacttctgacgtgcttgcccttcacgtctcagggtaagttcgccgaggccgagcctctgtacaggcgggcgaccgagactttggagacagcgttaggtcctgagcacccgaacatggcagcagcgctcaacaaccgggcggggttgtcgacagatattccccccgccattactattttgttttgtctttgaccacactcgcatgacggtttctcacgtggcgtttgctttccgcttccaggggaagtatgctgaggcagaccctctgtttcttcgagctattgagatcggagagaaaacgctgggccccgaccacccagatcttgccacaaggctcaacaaccgggcggagttgttgagagcgcaggtgagagccatcagaaatttccaggaattttcttgtggtacccgatggatttcggcagtgttcaacaacagggggagggggcgaccgaggttttggagacagcgttgggtgctgaccacccgaacgtggccacagcgctcaagaaccgggcggggttgttgaagcgccaggtgagagccgtgagaattttccaagattttccgtagggttcacacttgatttgagagtttggttctctctcgcccagtcgcttacaccgccccactgcttcgtacacagggcaagcacgacgaagccgaccctctctatctgcgagctattgagattggggagaagacgctaggccctgaacacccagccagcccttgccacccgactcaacaaccgggcgtggttgttaagcatttgttccgccgcaatgtttttttcaaacttgagcacgcccccaccttgctgttccctcgcgttgtagggcaagtacagcgaggcggaaccgttgtatgttagggctatcgcaatcggagagaaagccctgggtccggagcatccagatcttgccgtgtggctcaacaacagggcggggttgttgcagagccaggtgagagccaaacgatccctctagatggttctagaaaataatgttcgtccgcacttccacatccgaccctccactaagcgacacggcagcgacacggacatcccggcgctccgcgggcccgagggaagctcgcccgctttggcgagccggcggagctcaccagccgccgactcagggagaaccctcgccggaacacgaggtacgagtcgtcgccgtctccaacgagtgccgaaggcctgctcgcccgccatgcgtcggcggcggggctgcccatcctgcccatcaacagcacggaggagcacacccgctggatgctcgcgtgtgtggtcgacgtggtgaaaaagctagaggcgagggcagtgcaagcgctgctgtgcgagcgcgcggagaaggccaacatcgcgcgccaagagnccgcatcccccgaacgtggactacttccactcatcctccccttgcccatcatccgcatccaataaactgatgctcgcggtagccaacgagaaatcgctgaaactcaaccactgggatgtcaagcaggcgtttacacacgctaagttggacgaggatgtgtttctgaggctccccgcggggtgcggggaaaaatcccacaaagttgtgaaggctgagcgtgctatttacggcttgaagcagagcggcaggcagtgggggtaccacgctgccgatactcttgtagaaaacgggttcgagcagtgcaaggctgacccgtgcgtcttccgcaagatgaaagacgatgtcgtggtgatgattatcgtgatttatgtggatgaccttttggttgctgggtctgatgatgattgcaaggagttgcttgattccctcgacaaggcattccccaccaaagaccttggagagtgcgtgtggttcgacgggtgtgccgtcgagagagacctagaggctgggacccttagaatctcccaaaccgcgtacattgacagcatcgtgaatcgctttgatgtgcagtcgacctcctccatccctgcttcccctggtgtcganggccggtgagggaggccatcggcagcatgatgtgggtgtcgacgttctcgcgcccggacatctcgttcgccgtgcgtgcggtagcgcgccacgcccatgcccctgccgagaggcactggaaggccatcgtaaagatcctcgcctacctcaaagagacgagggacctcgggatcacctacaaacggggatcggggttggggctggcggtgtacgtggacgctagctacgccgacgctgaggataggcgttcggtgtcagggctggcaacaacnnnnnnnnnnnnnnnnnnnnnnnnnnnnnnnnnnnnnnnnnnnnnnnnnnnnnnnnnnnnnnnnnnnnnnnnnnnnnnnnnnnnnnnnnnnnnnnnnnnnnnnnnnnnnnnnnnnnnnnnnnnnnnnnnnnnnnnnnnnnnnnnnnnnnnnnnnnnnnnnnngtaccaccggcgcaagttgatgaatttgccggagtagctagcagtttttagcacttgggagcggccatgtttaccatgcgggcaaatcgcattactgtcgcggtctgtgtacccatggcaggggtagggggcgttgggaggccatcnnnnnnnnnnnnnnnnnnnnnnnnnnnnnnnnnnnnnnnnnnnnnnnnnnnnnnnnnnnnnnnnnnnnnnnnnnnnnnnnnnnnnnnnnnnnnnnnnnnnnnnnnnnnnnnnnnnnnnnnnnnnnnnnnnnnnnnnnnnnnnnnnnnnnnnnnnnnnnnnnnnnnnnnnnnnnnnnnnnnnnnnnnnnnnnnnnnnnnnnnnnnnnnnnnnnnnnnnnnnnnnnnnnnnnnnnnnnnnnnnnnnnnnnnnnnnnnnnnnnnnnnnnnnnnnnnnnnnnnnnnnnnnnnnnnnnnnnnnnnnnnnnnnnnnnnnnnnnnnnnnnnnnnnnnnnnnnnnnnnnnnnnnnnnnnnnnnnnnnnnnnnnnnnnnnnnnnnnnnnnnnnnnnnnnnnnnnnnnnnnnnnnnnnnnnnnnnnnnnnnnnnnnnnnnnnnnnnnnnnnnnnnnnnnnnnnnnnnnnnnnnnnnnnnnnnnnnnnnnnnnnnnnnnnnnnnnnnnnnnnnnnnnnnnnnnnnnnnnnnnnnnnnnnnnnnnnnnnnnnnnnnnnnnnnnnnnnnnnnnnnnnnnnnnnnnnnnnnnnnnnnnnnnnnnnnnnnnnnnnnnnnnnnnnnnnnnnnnnnnnnnnnnnnnnnnnnnnnnnnnnnnnnnnnnnnnnnnnnnnnnnnnnnnnnnnnnnnnnnnnnnnnnnnnnnnnnnnnnnnnnnnnnnnnnnnnnnnnnnnnnnnnnnnnnnnnnnnnnnnnnnnnnnnnnnnnnnnnnnnnnnnnnnnnnnnnnnnnnnnnnnnnnnnnnnnnnnnnnnnnnnnnnnnnnnnnnnnnnnnnnnnnnnnnnnnnnnnnnnnnnnnnnnnnnnnnnnnnnnnnnnnnnnnnnnnnnnnnnnnnnnnnnnnnnnnnnnnnnnnnnnnnnnnnnnnnnnnnnnnnnnnnnnnnnnnnnnnnnnnnnnnnnnnnnnnnnnnnnnnnnnnnnnnnnnnnnnnnnnnnnnnnnnnnnnnnnnnnnnnnnnnnnnnnnnnnnnnnnnnnnnnnnnnnnnnnnnnnnnnnnnnnnnnnnnnnnnnnnnnnnnnnnnnnnnnnnnnnnnnnnnnnnnnnnnnnnnnnnnnnnnnnnnnnnnnnnnnnnnnnnnnnnnnnnnnnnnnnnnnnnnnnnnnnnnnnnnnnnnnnnnnnnnnnnnnnnnnnnnnnnnnnnnnnnnnnnnnnnnnnnnnnnnnnnnnnnnnnnnnnnnnnnnnnnnnnnnnnnnnnnnnnnnnnnnnnnnnnnnnnnnnnnnnnnnnnnnnnnnnnnnnnnnnnnnnnnnnnnnnnnnnnnnnnnnnnnnnnnnnnnnnnnnnnnnnnnnnnnnnnnnnnnnnnnnnnnnnnnnnnnnnnnnnnnnnnnnnnnnnnnnnnnnnnnnnnnnnnnnnnnnnnnnnnnnnnnnnnnnnnnnnnnnnnnnnnnnnnnnnnnnnnnnnnnnnnnnnnnnnnnnnnnnnnnnnnnnnnnnnnnnnnnnnnnnnnnnnnnnnnnnnnnnnnnnnnnnnnnnnnnnnnnnnnnnnnnnnnnnnnnnnnnnnnnnnnnnnnnnnnnnnnnnnnnnnnnnnnnnnnnnnnnnnnnnnnnnnnnnnnnnnnnnnnnnnnnnnnnnnnnnnnnnnnnnnggcgctacttttcattccccagagagcaaaatgtgccaggcaacgaccgcacgctccggtacactttgacaaaatcaaaacaaaccaagcctggtgtcgacgctcttgatcacatgctgaacgaaaatccaggcaccggcgccaaccaagagctagacgttgctcacaaagtccttcgagagaatttcaatggaaggagacacgatttccacgtcggcgcaatacttgtagatctctgtctggcgttctgtgtatgcgtttcggcatgggaaagcctaggctgatgggtgatttgatcgtggaggccctccgagaaattgaccggtacaacggacttaacgtccatcagggtaataactacgagggatcgcacatgtcgagactctggaattggatgataacaatgagtgatcacgcgacaacaatggctcttcctttgttgaacgagaactcagtcaacaccgtggagatggtgaacagaggctacaactcagggaacaagcaagaaaaaaaatagataatttcgcaccactcctaggaccgcccgaaaacacggtgcatcaagtcgcaagaagagtgaggctccgaaacaatcaaatgcaatacttggaaacaccccccgagatatacaccgggcatgtcgtcgcccccggcgtggtcgctgagc

SEQ ID NO: 211 - DNA, 21188 bp, unidentified; identical to SEQ ID NO: 210
  source 1..21188: mol_type = other DNA
  variation 17704: note = n is any nucleotide
  variation 2498..2729: note = n is any nucleotide
  misc_feature 1..21188: note = Fanzor polypeptide
  variation 18890..20521: note = n is any nucleotide
  variation 41: note = n is any nucleotide
  variation 18310: note = n is any nucleotide
  variation 18582..18743: note = n is any nucleotide

SEQ ID NO: 212 - DNA, 22091 bp, Chloroidium sp.
  source 1..22091: mol_type = other DNA
cagccctagagcactggcaaggaacagcgtatggattggcggctattctggccataacgccatgcctcggatttgctttcaaggtcaacgtgctgaggctatgtctttgatattctgtccatttcttcgacttgtaaagactgcaccaccatctgcagggcttgttagctaaactttctagtccgcaggcaatttctatgaagccagcagagttcagcataggactggctttgttttgcgtcataggactggctttgttttgcgtcatgccaaccacacttgcggcagaaggatgtcggtccgaatgcatgcaagatgtctctcaaccctgtcacaatattcaataattcgcaattgcgaactcttgcatgtgcagatgagagcaactttcactgaactccatccaagatcgtcctcaatatttttcttcttgacagctggtttggccaacattggtggtggatggctgaaggcatattcatcactacgaaaaactcaacatgaatataattcactccacttcagccacaatcctagaggccacagccaaccctatatctttacaggcacacccttgctccagtcttccttacacctacaacctagctgagctgtatcacagtaccacatgtacgacccaaaaacccacagtctctcagaaaataaaattcaactcgatcagaatgattcaaacctcactttgcactgcagcacttttttgcggagctgcagcagcttttctctgtcagttgggagaccacgtccttggtgcactcatatgactctggaacagcagaacttgcgcctgaaagaacgctattcttggcgctgcagcaacttttcttcggcagtggtgtgaccaactcagcggcgcattccgttttacatggagtttcgcgacttgcacacgatgggatgtcatggctcgggcagcatgatcgcttggtgacctctggcgggtcacagcagccctgccgtcctccctgctgtgaacagcaggcggggggatcctcagttccagtcgccgaggagcgcgtgcctgcctgcttgagacaggcggtgtcgctccgcgcaagcctccagccccaaatggaccctgtgtcaatgctccagcgcaggcagcgcataccgttcaggcagacagcacatgccgtccccacgtccaccaacaccgcgccccagagggtgaacaacccaagcgctgccaaaaccaggacggccacctgcgtcagcatctcgattcactattgcctcctatcaccaacaaaatcgcgccccagagggtggacggctcaagcactaccacaatcgcagcctgtgacagtccattctaaggatccacttctcctgccaacaccaccgcgccacacaaatcaaacagcctatcactgccagcagcaggacaggaacctgccttgcgaataccatttgttttttactccttccaccgtaccgtatcgacgcatatcatcagccctaaaacgacttctgccaatttggccggacaaactgcgtcaaaaatccataatatgcccttggcttgcagtgcaactgccattaccttggtgacaatgcagaccgcgatgttgaacatgatgatgctccgcaccgtgcagccgaggcggatgatgggtgcaaggcatctcaggtcgttggtgaacagtgtgatatctccagcttccacagcaattgctgcccctgcattgttttgcgaggacttcaattgtgttgcaggtgatgcagttcaaaatttgttggcagataaaaaaaccactggtgcagttcgctcagacgcgcttgccattcagaactccaaaggaggcgttcccaggggttgttcgagacgttcctcaacaagggttttgtgcaggaggccctctgctgtgctgttctgctggcgtatcattgacaacatgtttctggttcgatgcacacagctcctgctcttctgtgacactacacatcacttgtgtctctccacacatagttatgcgttttggcgtaaatatgccatcagctctatcgcgcatcctttgcgtggcatgaaagtctttttctgcgacacagaaatccagcgtcagcctacctgatgtgcccatggagatgcccacggaggctgcagccaaggctggggcatcgttgactccgtctccagtgtgcaggactttgccttgggtctggagctcctcaatctgcgtgcagagtgcgataatttccttgccagacttcattatgggatttcgatggaaggctggcatttgcaactgtctccttgcttcatatggcaaaatactaaaatcgattgtggttcttgagaggaccatccttcagaagacgatcagattgaagtcccttgatgatatccaaagcacgccaggaagacaacttcttaccgtcattgtgagtacttcttgacccctgtccccaaattcaggggaaaatatcgtggattactggcaaaaggttgtcctcacatgggacttacccgaattgagtagggaatgtgattggttggtaaatttgttgtgctcacagtgtcaacttccggctgcaagcccttaccagattcagcttgccttcagggagcagcgctgcatgcacatcatcgggttccatgccaattgctaccgcaactgcataggctggccctggcgcatctccagtcaccatctttgtcccaattcccagtttctgcatacatgaaaaaaatctctcttgctgcaagccggctattgtcctggttaaatgatctaaatgatccaagtggagagcaggcagcttgaatgcattactggcagagcttgtctcaattttaaatctgcacagcgccaagaggttcttgccacaaggccctcggtgaactacctataccaggggtgagcaataatccacgtgcattactgccaggagaggtcatggcagtgctgttatatttgatcagacgtcaagatctcctatgcagcatgcaagccaacgcctcaacttaacaatgcttgacgactgaaaagagtctccacaccccccacaaaggtcttgcatccaaacagatcactcgcagcctcagcgtcatgcaagcaaacgcttttaatttgccgacgcctgaagcacaaaataaggcctcgcaaggtgcacccaaaaagattcacctgcaatctttgaatcgcttcagctgcctcgggtcgcactgcatctgccagtgcaagagcgccaacaagaaggccatcacgcgcaacaaagcagatggtcgcacctggcagtatcattgttcttttgcacatgttaaatttatacaagaacaataacactgaatgctccagtcagacatcccatacgaagcatctttggggggaagaattgctctacaactgcacagttgtgcatgcttctgggactgctcatacacttattggcttatctagaaaggacatcttgccatttgactgaaaagcctatgttcctgttcttgactgccccgctgagagatttgcgtttagtggagcatcaaataccagctcgacagccccgctgaggttaaattgcttgtagttaagaaatagccaagacaacaagattcatacatgaatgacatattgcatggaatgaaccacatactgctgagagacttgcagcggacgtgcagtgaagttgtaacaggtgggctgagattggaggtcatattttcccgtgccccgtcaatgattcagattcaggaatcagtaatgttgttagtgaacaaacttgcttgggttaggcagcaagggctgaccttcttccccccagctcgcttcaacgctgtcgatcacattgctctccatgattactcccttttgcacaaggagcgctttgctgccaagcaatacttgcatgccctgtatgtaacccatcacacctaaacctgcaaatggcagagaaattgaggggaacaccttcgccatctaaacaatgcagcttcgcaactccaggaacaatcatgatacgcatacgctttgcaggtgtccactcacacacaaatacgtcgctgtggcgagggacgcagcagtctaaagtattaacgccctcaattgaccatctctagaaaagacttcctccctgtcacagtaaaggctcctccacagttgaccggctgcctgggtcaccgtactcaaaaatttcctaggctgttctctaccctgcaagagacccataggggttagggtttagggcagatcatcacaccggccacgcaggggtacccctttcgggtgtcaatttgtttccatcaggctgagagaaagcaccgggcagattctcaaaagctgtgacgtcaaggttgattggggagccagcgacagcagcacaggcgacaatgcaggaggcaattggatgcgttgacaggcgttctaggctgcctgcccatgccagcagatctgcttcagatgtactaattgctttctttgcaatcacctgcaagcaatgtggtgtctctgtgagtcgtgactgactgatgataggaagtgtctgtattaaaaatctgacacgtgatggggcgtgttatgtcatgtcctgtcctgagtgtcaggacacccaaaccaaagactggtgtgtccattgtgtgaaggcatatatgacctatgagacagatcaatgtcaggtgcggcagggcaagacagaaatggagatgcgagatcatggaacatgctcatgggagaagcagaaagagcttgctggcaagcgagtcactatggccagcagggagtgcagaacgttcacaagtcaggatggaaagcccagtgcgcacctggaagcgaccttttgtgagggtcccggtcttgtcaagtgtcactatcttgatcttcgccagcgcttccaagtgcgagccaccctgaaggcatgggaggtgatcatcctttatgtactgctctcatgattggtggcatgtttgatatgcagcatcttgtcaagactcctggcagcaatgacacacattttgtgtcaataattaaaagtatgccaaacagtgagctatgcagtcagtgagaatgatgccatgaagggaaggattgccagacaagacaagccaagccacctttatgagcacgccctggcgggcagatgcagctagtccggcaaccacagtgacgggggtggacaacaccagggcacatgggcaagccgtgaccaggatctggagggagaggtagacccaacgagacttgtccctcgctccagctgcaattggaatcagagctatccccaggcatgcagcaatgatgatgggcgtgaaccaggtggcaaagcgggtgatgatggactccactctggattgctttgatacagcctgcaggaaaacaatgttgtttttgtaaatctaggcctcgtcgtctatcaacttgactcatcttgagtctacttgattcatcaagtatattgcaccaatgatgatcaaaccaaaaactatgacagccaaaacaaaaattccaacaatgattgaaaggctgatcaatattgaaatccagagttcagtttgacacatataattgatttgccgctgatggctaaatgggtgtggatctcctaataacaacttaatattggatcgtgattcctacctgctcaacgagctctgccatgcgggccactgcgctctcaccagcagtggcagtggtctcatatgtcagggcgccagaaccacaattcaaggttccacccagcagctgcgcaccaaattataaagggattgaagggtccgtatcgacagacagcattgagcaagatgaagatcaggcgcgttggtattcgtggcctctagacctgctgaggaagcctgtgaacattgcaattacaagtacagatgtgcaccacttagctataagagatgttcagaagggtgtaatatatgacaccggcattgatgactgaaaggctgctgacctgatcactggcggatctcttgactggtttcgactcgccggtcagaaggctttggtcgacatctgatgatccagtgacaacagttccatcaatggcaatccgttcccctggccggacaagcaacaaagtcgatacagccacagtgtctgcaggcacaagggtacctgcaccacagcaaccagatgtaatgagatagggtgttctcgatagacatcgttggagctacttttcacaatatggtaaaggccaaagataatgatgtcacgacgcaggaccgggattgtcatgtacttgtctcagacttgcagtgtttattccagagaaaacaacaagattacctgcggggagagctgcagcaagattaggatttgctgcaaaaggtgttacctgaattggcgaggacagcaacttccggcttcaaagccagtacggccgcaattgcatttcgggctgatgaagtgcaggaagattccaaccaatcggcaagcgaaaagaggacaaccacagctgctgcttccgtcacatcctgcatgtcatgtcccatttggtccctgaagaaagcctcaatctgggcaaatttcctgtattctccgcaaaactgctccagaagcagaaatgatcactctggtggtcgtcagcaggggcatatacataaacggggaagcctcggcaagacagctcctcacaaagaatatgtggaactttctatatcagctcactacaaatggggcagacctgaagtgccagagcgcctcccactgctacagtcatcagaaagttgatatccaggcgctgcaatgctaacatgtcaggtcaggccaggttgggggaacatttacatgttgtgctaagcaaagaacaggacaatgcagggactaggtgatacttttggaccatcacgtgtctgaatttaaacctgggaacgcaaattgactcacctttctcctcaaagatgccagtgccttcaatagtattctggggatggctatcacgatgctccccattgcaatccactgttacaaacagcccagctggtcacatccaaacccaaatccgcaaaggttatagtttaaagaacttatcagactttggactggccagagtgaaatggaaactgcacaccttcatgtactctagcttctggttgccaattctgctggccaggtagtggaagagggagaccacaagcaagaacgctgcaagaaggactgcacagggagagagctcatcacacctccaagaatacaatctggcccaccttggaaaacttctgagcaacaatccagttaacaagattgcgtgtggactcaagtggtgctgctggcatacctaatgctactgcatcgcttggggagttgaggtctccaatgcaaatatgcgcagtggcatgggtttgcaaggaagagatcttactgttatctcctctgcatgcaagaagctcaccattccagctgggaaggtactgatagcgcaactttccctgctgccttggcgcttcacaagaagcgtccagatgggcatggttcagacaggccgtgagtgtttgtggcaggacagccgctgtgtgcttgatcacagcagacctcgtgaccactgacacatcgacctgcacagtggaaaagcagtcatttgatgtacgacacgagccagaacaggaaaatgggggatttcggagcaacatgagcactgtggcacatcagatgttcaacggagttcaaaacaggagaatgtggcattttctgacctgcagaactcctgggaagttgtccaacaaatcgtgaatgatggtcgcctcgcttgagcaacacatcccctcaatgtacagcttggtagagattacggcaccctcgggtctgccatgctctcccgcgcagtcctcaagggactccgatgtgaggatatcacagaggtcggctgtctggacatcttcccttgtcctcctggcacagattgagcagcaaagtttgcatgggtgaagcagcaatcatccaggcagacactgcttaggcaacagcaattcaagcatgagcatggtggcacaggtgccggaggggtgaatgaatcgtggaaggggaaagatctgctgggcactgaggtcagcaaggacaagctcttaggtgcaaacctgttccgaagcaccgaagcatctccatgatcgaagatgaatcctccctttgtcagaggtatgcactccttgtcgcagcacttctctgagatgtggtacaacttgctgtttacctgtcaccgggcaagctctggtaccaagccatggggcagataagggtccaatgcagagacagtacatgcaaagaaccagcaggtgcaagatctgtggcaacgaaacatgtgttgctcaccaggtagtcccagtggtcaccatgtcggaccagagggtactgtgatatctgagaatcaaacagctccccagcgtaatcctcaagatcaggagttgtgtcgtgagagataaagtatccgttctttacggacacgaagtaccgccccgccaccacgcagcctgcagaaaggcagaatcaggttgttaaatgttttcactgatggcagcagaaggcttgggtccaattcggaggtcggttggggccaccaccttgcaagctggacgcgagcatgatcagttgtttgtaagaagcaaagacagcaacgctgctgctggcgaggctttttacaacccttccgactcagaatgttgcaccatgagatgtcgcctaagctcttgcaactcttttccgttggcaaacatcatcatctaggcttgtgactacactgtctaggctgaactgtatatacagacaaatacagtatacttcagcctttggcgttattcaatacacttcgctctgtatttttccaggtatctgatgcgtactcctcctgaccctaaccctagctgatgcaatgggaccccccacgccgcccttaccctcccacttacccctctattttgacctcgtcactgcatttggcgtcagctccagccaaccagtagcttatacgagacgacagtgtattcaatactttacatgacagtacagtgtattttatagcaaaaagtcttagtatggtcacaaccctacaaacttggcggatccgtggtggtattctccgtcgcaaacccttcggagaacattctcgacattttctggttcgctttgatccatgcggccccaggctcaacgagacctcatgttcagtttgctcgataggggcagaagtaaatccgagattgccgatatccttcaaatttcgcggatgacattgcatcgctggcagaaggcaggacgcggacgaatacccaaaagggggcccagattggggaaaagaagattgaatgtgcttcaagagcaagctgtggtttgccgagtgaaacaggcatctacatccacgttgggcagtctatgcagattctcatactatgtgttgggggtgaagatagccgtctccaccgctggtctgattttgaaacgggcgaattacacgcacaagaaagctgtcaagcgaaacacggaatacgacgtagagaaaggcatgtactttctcaacgagcttcgttctatgttcagtattcggcttgcgtctatcgatgaagcctcgttccatttgaacagtgcaccgcggtatgcgtgggctcctaagggtcatcgtgctatcatcacaaggcctatggtgcgcggtcagaggttcagtctcctgctgtgtgtcagcccgacaggagttctggggtacacgttggtgccgggcagcgtcaacagtgtcgttttcacccagttcgttcagaccttgccgcgcgatctgaccctgttattggacaatgtcagcacacacaaggccatgaagtcgttgacgaagaaaggtcaccccaccgtcagggagtccgccgattcccgcgatatcgctttgaagtataccgtaccgtacgctccgcatttgaacccggtcgagttttgcttcaacaccgtccgcaatttcataaaccgtcgtcagcccagaaacgaagaggcgctgaggacagtcgtcgctgaggcattggcatcactgagggcgccttcgttggatgcattgtttaggagagtgatctggggtgatccttgagtgcacagtattcagatccgtcaaaaacacaagtgcgtttaaatctcagaatttcgttatacagcaattgtatgtcatgctatgcaccctcaaccatcccgcgaagccacctgcgaggatcaagcagacacctgaagaagtgatcgaggatagatgtctcgccggcgccaggatacttttcggtggaccgatgagattggaggcggtgaacaggaacgagcagaaaaaggttatggatatcacggtcgtcaagaccacctggaacagattctgtagagacgagggccgtgcactggcggtggagtccgtgttgaaagacatgaacaggaccgtctgtgaggcctatcttctggcaaacttgcacgtcattcgaatctgcaaagccaacaaacctctgccggcgatcgaccaatccttcttctacaactgtctgaaaggcgtgagcgtggggaacaggcagaaatctgatatcaaagaccccgacctgaaagacacggcggacttgtatgcttcgctgaggccagccggataccaagcgccgagatctgatcacttggccgccggcttgcatcagaacgccagccaacagatggccatcaatgccaagaactatatcagcatgacgttctacaagaggctcaccaggtatttgaggcacagataccagttggacggccgggaagcatacaaaaagatagacgacatatatgccctacaatacgacggggacgacgccatcgtcaaaaagtacaggaccaagatccctcgcagacctacagtagggaatctggaagggacaccggagctgtacctgccgatgctgtttgagatcctgaagtactgcgaaaaacataatcctttcgagaatggagatgggcaatatgacagcagggtcaagcaagttcgattgtttactcttcttcccaccaagcagggtttcgaatgcagcaacgtcaagatctgtggcactggactcttcaacattctgaagagacaaggcttggaatggacagaggacgaatttgacgatgcaaaggaggagtggtggagagctctcttccgtatcagtgattttgagacaaggaacaggaagttcgcgaacgagatcctgactgacggtgtgagtgtgagcatagtcatgagacgtctgaaacccgaagaccaagtccaaagagaagccgagatagctcggaaacgaaaggaagacagagagaatccggtgaagaagaaacgaggcaggaagaaggatcagcccaccaagaaacgagatcacgaccacgacatagatctggactcgtacgagcaggtcctcggtctggatccgggaaggagcttcatgttcgtaacggccgacggccaggggaagcatatgcaatgctccacaaaagagttctatcacgacgccaagtacacagagggcaacagaaaggtcaggaagtggatagacagggacagcagagtatcggatgccatatgcaatatgccttctcccaaaacagcagaacaggcgaaactacaggcttacatcgaataccttctgcctcgcctggacaacctgttgacattcttccagcagaagaaatttcgctcccagaaattcaaaaggtacatctacagcaaacggaaattgcgggagctggggctgaaattgactgctggtaagaagacgctcgtgggttttggtgactggagtaacaacgatacagctggtgtgatcaagagatgtccggctgggccagtgaagaggtttgagaaggagctcaagaaattctgcagggtgatacccatagacgaatactgcacgagcaagaagtgtaacagatgcagaagtgaacaatataacgagaagaagatcgtgaatggaaaggatggcagaacgtatcaagtcaaagttcacagtgtgctccattgtcacaacaatggctgtaaaggcatgacggtgaacagggacgagaacgcatccaagaacattcgcgacctcttggtgatcgcagctcgcaaagagtcgaggcctgcatgcttctgccgatcggcgagaagcaacgatccaataataacagttcccgtgtgcgcctgagtctcgacgagggtgtaggatgggaagtggttctacttcgccaaacgatgtttggtgcttcgtgaagtaggaaagggcgagcagggtggtaggaagaccgccacgtccttcccatattacaatcgccgtttcgcctcagaatagggttttgccatttacgaagaatggtttcgcccggtgtaacattctgagtcggaagggccgtaaacacgtatggtatagcggttaaaacaagtcgttgccaacgactagacccgagttcgactctcggtacgtgtatgtttgtttttcagcatctcgactccttggtaaaccctcattgacatccctgcttggtgtcgccttttcctctcgacatatttctgtgctctccgcgcaccagatgctcacaggattgtatcgagagcagaaagggaggcagtctcagcggcatgccatgcgcagtcagtgtagcgcaggatgcttcttctcatgtccattgtcagactatggaacactagtatggtgcgtgttcctcgactgaagagctgcatcatcggcttgatttctcggggggacaggagaaagccatttcaaatttgctccctgggattctcgagcaaggcgcggctctgaggtattgctgccaaggctgctcatcagcaacttggaagagagtcatatccgtatgtaatagagttgagacaatttctgacaggacagaagagtgaaggccaggaggcaggaaaacttctgtgtcagaggcactgcagattgtcctgcgcagaggaggcgctcaaacgcagataggctgttgtaggccattttgccataggatccgagactgctctagcatgctctctatgggaaattccagacctccctgaaatagtggtgacaggcatgctcgcaatctgtagccctggggtcctggatcgactttttcaggcgcagtatactgcatggaggaagggtcttgctcgatgcttgtgggccggggagcgccgctggatcttatgctgctctcgcttgtcttgaaaggaaagtcaagagcctcctggagcagcagcatcaggaacaggcatgatacaaagctgctgagccttccttttggattatgcaggcaagaatggcgagatgagggatttgcacaatcaaggcatagggtgcgttaaaatccggcagcactctggcagctctggcttgctttgaaaggtgatctgagagccttgtgattaggaggagaagggtgcgaatggctggtggcaagattacattttcttgactgggggatcatgtaagacgtttctgtgccagtatagggagctggcggaccgctgggtctggctggataggcaaattgggttgttgacctcattgaggcagatcctctgctttagaaaggggaatggaggtatggttgcgtcagggcagaggatgagcttaatggcaagagcatctgagatgctcgagtgccaccagaggaagctggcaatttgctcgagatcaccaatcttgcagaccatgcctcgaggattgcgggaggaccagagaagattgcaagaggccggggctgagcaaagagaccgagagctatgcaaggtgagcatgcaagactcttctgcgaagccgtacaaaggtggcgcaccgcttggggtagccagatctgcagttagggacgctgatattagatctctgtcccttgggaggggggaaaggagagctttcgtgcgccacaccaacggacggcattttggattggatggtcagtcagaggtctttacaatcgcattactgagatcaagctttattgcattcttgaaagttgagctcaaatgggtttcatgccttagggtggggagaggggaatctgcctcagggtcttggactgatgttttgacctaaggatcattcataggtctttatattcctcctacaattctgacgcaccctccaatcagccagatttgcagtctgggatgacaagctcagcagggcttttgcccagagggaaagggagaggggatttgctgcgccaggggtcaggactgagattgtagatctgggatcatctagttgccttaatgatccttcactgatgctggcacagcactgtcacttcctgaattcgcagtctgggaggccgagctcgctggggttcatgccgagggggatggggcttgggggtttctgcgccaggggtcaggactgtgaatcttgagcaggggatcattccaaggtctttgtgatactcctacgatgccggcacatcgcttcgacttgccaattttacagtttgagatgatcagctcactgacagttctgcctggggggagaggaaggagcattttctgtgttgggagtcaggactaaatcttttgaccaggggaacatttagagttccttctgattcctctacagttctggcgcaagccttaaacctgtgggagctgcattcttgaatgtcgagatcggcagccctcctgccttggagggggggaagggacagtttctgcgccacagatctgcactcatgttctgacctgagaaccatccaggagtccttctggtccctcaatggtgttggtgcatccctaagatcagcgtggactgcattcctgagagtcaagatcagcaggccttctgctcccgggggcgggagtttctgcgccagggttgggggccctgaattttggcaagataaccatgtgagacacttccgtgtcaatacaggaagccggcgcatcgcttttacctgaaagatgtgctttccagaaagtccagatcagcagctctcctccctaggagggggggagcagggattctctgcgtcaggagtctgcgctgatatatttgccccagggatcttgtaagcagcctctttgacactgcaggaagctggcgtagcgcttgagatgaccagtcgtgcgggcccaaacctgaagaatcactggagtagaggatctgagggtgcaagcagctggagcctgaaaagaggattggggacagatttcttgacgtggtgagcatgcaagactgttgttggaggacataccgtcctggcgcatcgttagagctcaagcagatctgcagtctgagatgatctgctcactgaggcttctgcctagggatggggggaggggcgttttctgcgctggtgatcagtactgaagttttcgaccaggggagaatttagagatctttgtgatgtttccacggtgttggcgcatcgcctaagtcacccagatttgctgtttgagataatcagcccactggggtatctgccctgggggggcggggggggtgcatttcctgcaccgcaggtcaggactgagatttgagacagggaagcctgtaagacgcttctgtgccattccaggaagctggcgcggcgcttgagatggccgtacttgcagaatgagcctcaagggtcgccggtagacaagggaggaggggtgcaagcaactgacgcttggggcaaagggacttggagctttgcaaggtgagcatccaagactcatgttggaggctatacgagaattacgcaccgctaaaattagcctcgtttgaatccttgaaagttaaattctgcagggtttctgcctgggaagggtgagacgggagtatcgccagagcaactgatatgatcttggactggagaaccggtcagatgtcatcatggctactcagaaggtgctggcgcacaccttaattgaattcttgagagtcgagctcactgggaaagtggattatgggagccagtgggacaaagctgagattgtaatcagaaagagcatttgatgccttccaattcaatttccggtgttggcgcactgttgcaatcagccggatctgcagtcttggataatgccatcgaggtcctttccttaggggagggcggggacgggggaaggatttcttgcgccgcggtttggggctctgacttctgacctggggatcagtcaagaggactaaagcacccaaatcatttcacagtggtggtgcatcgcttgaaagagatgcactgaaacagcctcatttgcattcttgaaagtcgagcccagcagggattctgccatgattgaaagaaggaggattttctgcgccgggggggggggggggggggcaaaaaaacggcactgacttctaggccgctggcaaggttgtcacctgccggtttgggagttttgccttggcatccctgggaagctcggcccacacagctagagcgttcagcggtgatgcatagatggtcaattgttgggtggtgttgtgctgacggtcgaacctttcccgttcacccagccccggctgaacaagccccttttggatcttgtcgatcccgcttgctgggttggtagaacggcgaagcaagatcaggggttttgcatgtctttcagccacatcaagcagatcgagtggacaaaacttgtgcccagtggaacaaacaggacaccaatgttgccatctagctcaggttgaagtccgcaggaatgaagagtgttgtggtgtacctagcggtgggcacatcaaaagccaccggggagaaagaagacaaggtgaactgaagcctacttgggagttgtggcactgtgaatccatatatgctagaaatttgatggcgtgttacctcaatatattgagtcttccacaggtaagcagctaattggcctgaacattctgcaaatacactaccacgtctttggtagtgcaacagaatagctatggctggttgactgtgtggagccccaaagtcaagtcaatcctgcattttactttcaccttcactactgcgcggcttttctgaagtctgtgcatgatgtcccctcgcaactctgcctgttgtgcagtcctgcacgcaacaaagctgttcaagactgcaagggaaaagcacaagacacaccagcaagtctgcttggcgattgtcatgctgacagcttcaatgcctacgttgtctggatcttgcccaatcaaggtctagcttcaatcaattgcaagcgaaaaggtatagaaagcttacctggatctcctcttccagtgaattgcactccatcctcatttcgagggcttgtgaatagagcaactcagtcatcttatcgaggaattcctctttttggcacaagcaatcgatcttgtaggaaagctctggccattcttccatgtagtcattctggcgagtcttcaattctgctacctgcacaacttgaaatcgtcaagaacatattcggatgcgatcatcctgggcaatacacggcaggctgccctaattctcataccttctcctgtacttctctcaggattgcaggtgctctctgggcgacctacagtgagaaagccatcagtaaaaacatacgcatttacgtcgtagaaagagcaacactttctttaatcctgagctcgcgacgtctcggtgtttgagtctcacggaggtcgcagtcgagcggcccttcgtcagtgctgaggcttcgtgctgcttgatactcatacttggtcaaatttacacgtgtcgaggctgcttgctaatctcttttggctcactccactgcagagatgatcatccaataatcatagttttatttgtgactctaaacctctcgggggtttagtcacgtaatccaagtcacttttctttttcaaacggctactcttcgaatgcatggagcctcaatgcaatgcactctcgtcccaatgaacgcagatgcaatgagaagacttcctgaattgttggcatcctgcgtaatgtctctacgaagtccgatgcacggtttgattatccaacttgtggatgagtctgtgacaaaaggtatattacgttgaaggcgaacgaacctccaggcatgtcttcaagctgtttgcctgccagagagggtttgtattttctcgaaggaaagacgtggtacagtcttttcaccaattgtatgttgatgaacaaaggacccgtcccttgtatgatttggaattctgaattcttctgagcaccttacatctccagcaatgagccttcaaatgtaaatgcctcttttcattgagtgcctctggcaagcagactattttcactgccttcatgtggggctgggtgagatgcctgcattttccataggtggaccagatcaaagctatgcttgcctgagagcgcggcaacagcagcaattctccatggttgtgcagcaagaaaagccgagccacctgaagaggttgaagtgaatgcaagagtggccaccgaggctgctggcttcacaccccaccaaagtaaggagaattgcgctcacatttgtaacagctgcaataagttcagatgtgtagctgggcagccagaaggggtgacgctatgcgagaagcattcacccagtgcaaagaggaggagcttcactccttggacagctgcttcgccatgactccaggttggttctgtgcacttatgtaggaggaatctcagtcctttttttcacaccctcatgcacaaaaacgggtgtgaggaattatagggaaatctacaactagaggtccttcaccaggctgtctatcgcaatccatatggagttcttgctgcagatattaaatgctaagcaggccccgattgaaccagaccaggggtctccaggctgcaaacgcgtggatttacttcaaccaaacatgatgcacgcccacacattgttcagaggtaacattggagagctgcgggtcaaggatatcaagagtggccccttggcaatgctggctattgcaggcttccttgcccaagcttgtgccaccggcaaatcgctcctgcaggtcagatttttgcctgctacttgtgaaggagtctgtggagctacagaggagggctgggggatttggcatgcgagcatgcctgcatgctgaagtgtgctcgtctgatccagagatgcaagtgggtggaggtaccatgctgaagctgcatgccatcacaaggcttgtgggtttccaatcaagcaagatagccattccttccaacgcatgaagtccacaattcttacttggcaagtgcgaatgccttcctactccctgcaaagcaaacttgtctagactgtatggtgttggaagcaatccctcaaagtgctttgtctttgcagctggtgggcttgcccaccggaatgatgcaggccaggggccccccaaaaactctccccgtcgtccgcgagctgggagatggatgactctgactcggaggatgatctcacggagctcaagaacagatagatgaagaggctcaagaagggcaatgaggcagaggaccccaatgaggcagaggttccggtccaggtgccgaagaaagggagcgggaggaggaaaaagaagaattctgtttagggcatacagaatacatatatgagatgtgaaagctggtcaaagcttgctgtcaggaatgatgacgatgtgtggttacaaagagaacagcaaagatgaggtctatgataagtgtctcatggctaatgatgtttctgtgatcctttctgatacatgtctgatacatgtttccaatggattctgatgtcatgtgatgcttgtgtaatatcttctgatgtggcattcaaagatgtcttatttcttctgatgcttttacattgtcttctaatgtggcattccaatgaaatcttatatccactgatgcttcttaatgggaacttctgatatattctgattccttcttatctgaccttctgatccccttcttatttgtctaatcaaatcttacagctcctattttacatcttctaatacgagtcttatcccgttctgatgtgtctgatcattgcaccatgcgccactgctatgtccatcagcaactctgatatgaactctcatactttctgagattgcaacaatcctttcttatgggtgagactcacgtctaatgtccattccaatgatcagatccatcagaagctcatcagacaatataattcactattcctgcggaacagcgaaatcccacaagctgttaaagaggaagaccaccaggtctctcactgctcacaggtaaaagagagacaaaccacattgggacggagagctcgtttggcatgcgcgatctctttcgtcaccgtttcaaatgaaagggaaccgagtaagtcatggcagaaaccttgacagcaattttagcgcctttccaatttcctgcaaccgcaacaaatggcaatcgtttcaagcaagatctttataagaatgttataatcattgagtgtacctgcaaatactcttcctgactcgccggagcccagaaagggaccaaatttaaggtcgccaagagtttgttgcggattggatgtaatgtccggattattgtgatgatcgttgctcattctcaagccatttcatctgcttgcatacaagatgtgcacagacactcactggttaatattggagcaatattaatcatcatgcatgatatgataacatctgggaaagtaatcctgcgcgggtcggcaattttcccgcatccgcgcagttccgcacgtatacgcgcagggaaaaatcgcggaaacaagcagatcttttggtcgcgacgatctgctaacgcctgcaacacacagatcatcacctcaatcctagcaaagcagatacaaacagatccgcaacagacagatctgcatttccaattatgctagcgtatctgtacatgtcacttagcagcgcggatctgttgcgtgcagatctgttttgaaccacactaagcaatcaaattacagatctgctttatgggatagtgcacagacctgcagatgtgcgtcatatcacggttctgtttttaagcgcagtgtgaggacctgtagtatgcagacttgagagcatcctgtgtgtagtgttgcaggaatggaaaggtggtgtttgttgccaaagttcagatcgaacttaccaccacaagcttaagtagccacaagtacaaatgggacaacaacattcctacacttctcaggacagtcgacgctgccagacatgccagcggtcctcaagcaaggcaacctaatcttagcaaacctcttgtccgaaccattcaaaccccatgcacgatatcgactggatctcctcccctcggcaccccttcccttggtgcccctcagctatgtcagcagcttcacgaacttggacttgcgtgccggcacatcctccttgagcagcctacgtgccttgtccaccatgggactcctgcctatactgctgtgtaagcagaagctatctccctgcctaccagcacgacaccttgcatttgcatctcaaaagcacatgattacatgtcccccaagaacagcaatgcaaagtcttgcgcattcgctgggaacccgattttgcgtatttcaatcaggtactcccaatcagagtctcaccatgacctccagcacgacgaggattccaaccccaacccggaggtcatccaggttgacatcctcctccaaaccagctgccttggcaatcgctcgcctgtaccgcttgctttggtagggttcagttccgggctccttcttggtgtccttgtgaacccggtagtatgcatctgcattgaatgtcagtcgttcgaaagctcagttatttcttgcaacgtaagcctgctcaggagcaggtacagatccactctgtcaatcagatcgacaattacagtgaaagaacattgcagcgctacaattctaatatgtctccatggtgccaggacagcactgttatgctgccacacgattttccgcccttaggaggaatctggtagccgttcagctcggcaagctagatccccgctcacctgttcacccaggcaagaaatgattcccaaatccatgattgcgcttcatgcaaacaggatctcaaggtaacgttgatgaaatgttacaattgtgttgcaggtgatccgccaaatcccttggctctactctgtgcacgcaatgatcaggtcagatttttggcttgcaaccttctcttccaattagcacgcacatcctgacatgcctgctgaggctgccacgtgagatctactatgttgccaagttcagctgccttctggtggcttgca

SEQ ID NO: 213 - DNA, 22091 bp, Chloroidium sp.
  source 1..22091: mol_type = other DNA
  variation 16200..16201: note = n is a, c, g, or t
  variation 17134..17135: note = n is a, c, g, or t
cagccctagagcactggcaaggaacagcgtatggattggcggctattctggccataacgccatgcctcggatttgctttcaaggtcaacgtgctgaggctatgtctttgatattctgtccatttcttcgacttgtaaagactgcaccaccatctgcagggcttgttagctaaactttctagtccgcaggcaatttctatgaagccagcagagttcagcataggactggctttgttttgcgtcataggactggctttgttttgcgtcatgccaaccacacttgcggcagaaggatgtcggtccgaatgcatgcaagatgtctctcaaccctgtcacaatattcaataattcgcaattgcgaactcttgcatgtgcagatgagagcaactttcactgaactccatccaagatcgtcctcaatatttttcttcttgacagctggtttggccaacattggtggtggatggctgaaggcatattcatcactacgaaaaactcaacatgaatataattcactccacttcagccacaatcctagaggccacagccaaccctatatctttacaggcacacccttgctccagtcttccttacacctacaacctagctgagctgtatcacagtaccacatgtacgacccaaaaacccacagtctctcagaaaataaaattcaactcgatcagaatgattcaaacctcactttgcactgcagcacttttttgcggagctgcagcagcttttctctgtcagttgggagaccacgtccttggtgcactcatatgactctggaacagcagaacttgcgcctgaaagaacgctattcttggcgctgcagcaacttttcttcggcagtggtgtgaccaactcagcggcgcattccgttttacatggagtttcgcgacttgcacacgatgggatgtcatggctcgggcagcatgatcgcttggtgacctctggcgggtcacagcagccctgccgtcctccctgctgtgaacagcaggcggggggatcctcagttccagtcgccgaggagcgcgtgcctgcctgcttgagacaggcggtgtcgctccgcgcaagcctccagccccaaatggaccctgtgtcaatgctccagcgcaggcagcgcataccgttcaggcagacagcacatgccgtccccacgtccaccaacaccgcgccccagagggtgaacaacccaagcgctgccaaaaccaggacggccacctgcgtcagcatctcgattcactattgcctcctatcaccaacaaaatcgcgccccagagggtggacggctcaagcactaccacaatcgcagcctgtgacagtccattctaaggatccacttctcctgccaacaccaccgcgccacacaaatcaaacagcctatcactgccagcagcaggacaggaacctgccttgcgaataccatttgttttttactccttccaccgtaccgtatcgacgcatatcatcagccctaaaacgacttctgccaatttggccggacaaactgcgtcaaaaatccataatatgcccttggcttgcagtgcaactgccattaccttggtgacaatgcagaccgcgatgttgaacatgatgatgctccgcaccgtgcagccgaggcggatgatgggtgcaaggcatctcaggtcgttggtgaacagtgtgatatctccagcttccacagcaattgctgcccctgcattgttttgcgaggacttcaattgtgttgcaggtgatgcagttcaaaatttgttggcagataaaaaaaccactggtgcagttcgctcagacgcgcttgccattcagaactccaaaggaggcgttcccaggggttgttcgagacgttcctcaacaagggttttgtgcaggaggccctctgctgtgctgttctgctggcgtatcattgacaacatgtttctggttcgatgcacacagctcctgctcttctgtgacactacacatcacttgtgtctctccacacatagttatgcgttttggcgtaaatatgccatcagctctatcgcgcatcctttgcgtggcatgaaagtctttttctgcgacacagaaatccagcgtcagcctacctgatgtgcccatggagatgcccacggaggctgcagccaaggctggggcatcgttgactccgtctccagtgtgcaggactttgccttgggtctggagctcctcaatctgcgtgcagagtgcgataatttccttgccagacttcattatgggatttcgatggaaggctggcatttgcaactgtctccttgcttcatatggcaaaatactaaaatcgattgtggttcttgagaggaccatccttcagaagacgatcagattgaagtcccttgatgatatccaaagcacgccaggaagacaacttcttaccgtcattgtgagtacttcttgacccctgtccccaaattcaggggaaaatatcgtggattactggcaaaaggttgtcctcacatgggacttacccgaattgagtagggaatgtgattggttggtaaatttgttgtgctcacagtgtcaacttccggctgcaagcccttaccagattcagcttgccttcagggagcagcgctgcatgcacatcatcgggttccatgccaattgctaccgcaactgcataggctggccctggcgcatctccagtcaccatctttgtcccaattcccagtttctgcatacatgaaaaaaatctctcttgctgcaagccggctattgtcctggttaaatgatctaaatgatccaagtggagagcaggcagcttgaatgcattactggcagagcttgtctcaattttaaatctgcacagcgccaagaggttcttgccacaaggccctcggtgaactacctataccaggggtgagcaataatccacgtgcattactgccaggagaggtcatggcagtgctgttatatttgatcagacgtcaagatctcctatgcagcatgcaagccaacgcctcaacttaacaatgcttgacgactgaaaagagtctccacaccccccacaaaggtcttgcatccaaacagatcactcgcagcctcagcgtcatgcaagcaaacgcttttaatttgccgacgcctgaagcacaaaataaggcctcgcaaggtgcacccaaaaagattcacctgcaatctttgaatcgcttcagctgcctcgggtcgcactgcatctgccagtgcaagagcgccaacaagaaggccatcacgcgcaacaaagcagatggtcgcacctggcagtatcattgttcttttgcacatgttaaatttatacaagaacaataacactgaatgctccagtcagacatcccatacgaagcatctttggggggaagaattgctctacaactgcacagttgtgcatgcttctgggactgctcatacacttattggcttatctagaaaggacatcttgccatttgactgaaaagcctatgttcctgttcttgactgccccgctgagagatttgcgtttagtggagcatcaaataccagctcgacagccccgctgaggttaaattgcttgtagttaagaaatagccaagacaacaagattcatacatgaatgacatattgcatggaatgaaccacatactgctgagagacttgcagcggacgtgcagtgaagttgtaacaggtgggctgagattggaggtcatattttcccgtgccccgtcaatgattcagattcaggaatcagtaatgttgttagtgaacaaacttgcttgggttaggcagcaagggctgaccttcttccccccagctcgcttcaacgctgtcgatcacattgctctccatgattactcccttttgcacaaggagcgctttgctgccaagcaatacttgcatgccctgtatgtaacccatcacacctaaacctgcaaatggcagagaaattgaggggaacaccttcgccatctaaacaatgcagcttcgcaactccaggaacaatcatgatacgcatacgctttgcaggtgtccactcacacacaaatacgtcgctgtggcgagggacgcagcagtctaaagtattaacgccctcaattgaccatctctagaaaagacttcctccctgtcacagtaaaggctcctccacagttgaccggctgcctgggtcaccgtactcaaaaatttcctaggctgttctctaccctgcaagagacccataggggttagggtttagggcagatcatcacaccggccacgcaggggtacccctttcgggtgtcaatttgtttccatcaggctgagagaaagcaccgggcagattctcaaaagctgtgacgtcaaggttgattggggagccagcgacagcagcacaggcgacaatgcaggaggcaattggatgcgttgacaggcgttctaggctgcctgcccatgccagcagatctgcttcagatgtactaattgctttctttgcaatcacctgcaagcaatgtggtgtctctgtgagtcgtgactgactgatgataggaagtgtctgtattaaaaatctgacacgtgatggggcgtgttatgtcatgtcctgtcctgagtgtcaggacacccaaaccaaagactggtgtgtccattgtgtgaaggcatatatgacctatgagacagatcaatgtcaggtgcggcagggcaagacagaaatggagatgcgagatcatggaacatgctcatgggagaagcagaaagagcttgctggcaagcgagtcactatggccagcagggagtgcagaacgttcacaagtcaggatggaaagcccagtgcgcacctggaagcgaccttttgtgagggtcccggtcttgtcaagtgtcactatcttgatcttcgccagcgcttccaagtgcgagccaccctgaaggcatgggaggtgatcatcctttatgtactgctctcatgattggtggcatgtttgatatgcagcatcttgtcaagactcctggcagcaatgacacacattttgtgtcaataattaaaagtatgccaaacagtgagctatgcagtcagtgagaatgatgccatgaagggaaggattgccagacaagacaagccaagccacctttatgagcacgccctggcgggcagatgcagctagtccggcaaccacagtgacgggggtggacaacaccagggcacatgggcaagccgtgaccaggatctggagggagaggtagacccaacgagacttgtccctcgctccagctgcaattggaatcagagctatccccaggcatgcagcaatgatgatgggcgtgaaccaggtggcaaagcgggtgatgatggactccactctggattgctttgatacagcctgcaggaaaacaatgttgtttttgtaaatctaggcctcgtcgtctatcaacttgactcatcttgagtctacttgattcatcaagtatattgcaccaatgatgatcaaaccaaaaactatgacagccaaaacaaaaattccaacaatgattgaaaggctgatcaatattgaaatccagagttcagtttgacacatataattgatttgccgctgatggctaaatgggtgtggatctcctaataacaacttaatattggatcgtgattcctacctgctcaacgagctctgccatgcgggccactgcgctctcaccagcagtggcagtggtctcatatgtcagggcgccagaaccacaattcaaggttccacccagcagctgcgcaccaaattataaagggattgaagggtccgtatcgacagacagcattgagcaagatgaagatcaggcgcgttggtattcgtggcctctagacctgctgaggaagcctgtgaacattgcaattacaagtacagatgtgcaccacttagctataagagatgttcagaagggtgtaatatatgacaccggcattgatgactgaaaggctgctgacctgatcactggcggatctcttgactggtttcgactcgccggtcagaaggctttggtcgacatctgatgatccagtgacaacagttccatcaatggcaatccgttcccctggccggacaagcaacaaagtcgatacagccacagtgtctgcaggcacaagggtacctgcaccacagcaaccagatgtaatgagatagggtgttctcgatagacatcgttggagctacttttcacaatatggtaaaggccaaagataatgatgtcacgacgcaggaccgggattgtcatgtacttgtctcagacttgcagtgtttattccagagaaaacaacaagattacctgcggggagagctgcagcaagattaggatttgctgcaaaaggtgttacctgaattggcgaggacagcaacttccggcttcaaagccagtacggccgcaattgcatttcgggctgatgaagtgcaggaagattccaaccaatcggcaagcgaaaagaggacaaccacagctgctgcttccgtcacatcctgcatgtcatgtcccatttggtccctgaagaaagcctcaatctgggcaaatttcctgtattctccgcaaaactgctccagaagcagaaatgatcactctggtggtcgtcagcaggggcatatacataaacggggaagcctcggcaagacagctcctcacaaagaatatgtggaactttctatatcagctcactacaaatggggcagacctgaagtgccagagcgcctcccactgctacagtcatcagaaagttgatatccaggcgctgcaatgctaacatgtcaggtcaggccaggttgggggaacatttacatgttgtgctaagcaaagaacaggacaatgcagggactaggtgatacttttggaccatcacgtgtctgaatttaaacctgggaacgcaaattgactcacctttctcctcaaagatgccagtgccttcaatagtattctggggatggctatcacgatgctccccattgcaatccactgttacaaacagcccagctggtcacatccaaacccaaatccgcaaaggttatagtttaaagaacttatcagactttggactggccagagtgaaatggaaactgcacaccttcatgtactctagcttctggttgccaattctgctggccaggtagtggaagagggagaccacaagcaagaacgctgcaagaaggactgcacagggagagagctcatcacacctccaagaatacaatctggcccaccttggaaaacttctgagcaacaatccagttaacaagattgcgtgtggactcaagtggtgctgctggcatacctaatgctactgcatcgcttggggagttgaggtctccaatgcaaatatgcgcagtggcatgggtttgcaaggaagagatcttactgttatctcctctgcatgcaagaagctcaccattccagctgggaaggtactgatagcgcaactttccctgctgccttggcgcttcacaagaagcgtccagatgggcatggttcagacaggccgtgagtgtttgtggcaggacagccgctgtgtgcttgatcacagcagacctcgtgaccactgacacatcgacctgcacagtggaaaagcagtcatttgatgtacgacacgagccagaacaggaaaatgggggatttcggagcaacatgagcactgtggcacatcagatgttcaacggagttcaaaacaggagaatgtggcattttctgacctgcagaactcctgggaagttgtccaacaaatcgtgaatgatggtcgcctcgcttgagcaacacatcccctcaatgtacagcttggtagagattacggcaccctcgggtctgccatgctctcccgcgcagtcctcaagggactccgatgtgaggatatcacagaggtcggctgtctggacatcttcccttgtcctcctggcacagattgagcagcaaagtttgcatgggtgaagcagcaatcatccaggcagacactgcttaggcaacagcaattcaagcatgagcatggtggcacaggtgccggaggggtgaatgaatcgtggaaggggaaagatctgctgggcactgaggtcagcaaggacaagctcttaggtgcaaacctgttccgaagcaccgaagcatctccatgatcgaagatgaatcctccctttgtcagaggtatgcactccttgtcgcagcacttctctgagatgtggtacaacttgctgtttacctgtcaccgggcaagctctggtaccaagccatggggcagataagggtccaatgcagagacagtacatgcaaagaaccagcaggtgcaagatctgtggcaacgaaacatgtgttgctcaccaggtagtcccagtggtcaccatgtcggaccagagggtactgtgatatctgagaatcaaacagctccccagcgtaatcctcaagatcaggagttgtgtcgtgagagataaagtatccgttctttacggacacgaagtaccgccccgccaccacgcagcctgcagaaaggcagaatcaggttgttaaatgttttcactgatggcagcagaaggcttgggtccaattcggaggtcggttggggccaccaccttgcaagctggacgcgagcatgatcagttgtttgtaagaagcaaagacagcaacgctgctgctggcgaggctttttacaacccttccgactcagaatgttgcaccatgagatgtcgcctaagctcttgcaactcttttccgttggcaaacatcatcatctaggcttgtgactacactgtctaggctgaactgtatatacagacaaatacagtatacttcagcctttggcgttattcaatacacttcgctctgtatttttccaggtatctgatgcgtactcctcctgaccctaaccctagctgatgcaatgggaccccccacgccgcccttaccctcccacttacccctctattttgacctcgtcactgcatttggcgtcagctccagccaaccagtagcttatacgagacgacagtgtattcaatactttacatgacagtacagtgtattttatagcaaaaagtcttagtatggtcacaaccctacaaacttggcggatccgtggtggtattctccgtcgcaaacccttcggagaacattctcgacattttctggttcgctttgatccatgcggccccaggctcaacgagacctcatgttcagtttgctcgataggggcagaagtaaatccgagattgccgatatccttcaaatttcgcggatgacattgcatcgctggcagaaggcaggacgcggacgaatacccaaaagggggcccagattggggaaaagaagattgaatgtgcttcaagagcaagctgtggtttgccgagtgaaacaggcatctacatccacgttgggcagtctatgcagattctcatactatgtgttgggggtgaagatagccgtctccaccgctggtctgattttgaaacgggcgaattacacgcacaagaaagctgtcaagcgaaacacggaatacgacgtagagaaaggcatgtactttctcaacgagcttcgttctatgttcagtattcggcttgcgtctatcgatgaagcctcgttccatttgaacagtgcaccgcggtatgcgtgggctcctaagggtcatcgtgctatcatcacaaggcctatggtgcgcggtcagaggttcagtctcctgctgtgtgtcagcccgacaggagttctggggtacacgttggtgccgggcagcgtcaacagtgtcgttttcacccagttcgttcagaccttgccgcgcgatctgaccctgttattggacaatgtcagcacacacaaggccatgaagtcgttgacgaagaaaggtcaccccaccgtcagggagtccgccgattcccgcgatatcgctttgaagtataccgtaccgtacgctccgcatttgaacccggtcgagttttgcttcaacaccgtccgcaatttcataaaccgtcgtcagcccagaaacgaagaggcgctgaggacagtcgtcgctgaggcattggcatcactgagggcgccttcgttggatgcattgtttaggagagtgatctggggtgatccttgagtgcacagtattcagatccgtcaaaaacacaagtgcgtttaaatctcagaatttcgttatacagcaattgtatgtcatgctatgcaccctcaaccatcccgcgaagccacctgcgaggatcaagcagacacctgaagaagtgatcgaggatagatgtctcgccggcgccaggatacttttcggtggaccgatgagattggaggcggtgaacaggaacgagcagaaaaaggttatggatatcacggtcgtcaagaccacctggaacagattctgtagagacgagggccgtgcactggcggtggagtccgtgttgaaagacatgaacaggaccgtctgtgaggcctatcttctggcaaacttgcacgtcattcgaatctgcaaagccaacaaacctctgccggcgatcgaccaatccttcttctacaactgtctgaaaggcgtgagcgtggggaacaggcagaaatctgatatcaaagaccccgacctgaaagacacggcggacttgtatgcttcgctgaggccagccggataccaagcgccgagatctgatcacttggccgccggcttgcatcagaacgccagccaacagatggccatcaatgccaagaactatatcagcatgacgttctacaagaggctcaccaggtatttgaggcacagataccagttggacggccgggaagcatacaaaaagatagacgacatatatgccctacaatacgacggggacgacgccatcgtcaaaaagtacaggaccaagatccctcgcagacctacagtagggaatctggaagggacaccggagctgtacctgccgatgctgtttgagatcctgaagtactgcgaaaaacataatcctttcgagaatggagatgggcaatatgacagcagggtcaagcaagttcgattgtttactcttcttcccaccaagcagggtttcgaatgcagcaacgtcaagatctgtggcactggactcttcaacattctgaagagacaaggcttggaatggacagaggacgaatttgacgatgcaaaggaggagtggtggagagctctcttccgtatcagtgattttgagacaaggaacaggaagttcgcgaacgagatcctgactgacggtgtgagtgtgagcatagtcatgagacgtctgaaacccgaagaccaagtccaaagagaagccgagatagctcggaaacgaaaggaagacagagagaatccggtgaagaagaaacgaggcaggaagaaggatcagcccaccaagaaacgagatcacgaccacgacatagatctggactcgtacgagcaggtcctcggtctggatccgggaaggagcttcatgttcgtaacggccgacggccaggggaagcatatgcaatgctccacaaaagagttctatcacgacgccaagtacacagagggcaacagaaaggtcaggaagtggatagacagggacagcagagtatcggatgccatatgcaatatgccttctcccaaaacagcagaacaggcgaaactacaggcttacatcgaataccttctgcctcgcctggacaacctgttgacattcttccagcagaagaaatttcgctcccagaaattcaaaaggtacatctacagcaaacggaaattgcgggagctggggctgaaattgactgctggtaagaagacgctcgtgggttttggtgactggagtaacaacgatacagctggtgtgatcaagagatgtccggctgggccagtgaagaggtttgagaaggagctcaagaaattctgcagggtgatacccatagacgaatactgcacgagcaagaagtgtaacagatgcagaagtgaacaatataacgagaagaagatcgtgaatggaaaggatggcagaacgtatcaagtcaaagttcacagtgtgctccattgtcacaacaatggctgtaaaggcatgacggtgaacagggacgagaacgcatccaagaacattcgcgacctcttggtgatcgcagctcgcaaagagtcgaggcctgcatgcttctgccgatcggcgagaagcaacgatccaataataacagttcccgtgtgcgcctgagtctcgacgagggtgtaggatgggaagtggttctacttcgccaaacgatgtttggtgcttcgtgaagtaggaaagggcgagcagggtggtaggaagaccgccacgtccttcccatattacaatcgccgtttcgcctcagaatagggttttgccatttacgaagaatggtttcgcccggtgtaacattctgagtcggaagggccgtaaacacgtatggtatagcggttaaaacaagtcgttgccaacgactagacccgagttcgactctcggtacgtgtatgtttgtttttcagcatctcgactccttggtaaaccctcattgacatccctgcttggtgtcgccttttcctctcgacatatttctgtgctctccgcgcaccagatgctcacaggattgtatcgagagcagaaagggaggcagtctcagcggcatgccatgcgcagtcagtgtagcgcaggatgcttcttctcatgtccattgtcagactatggaacactagtatggtgcgtgttcctcgactgaagagctgcatcatcggcttgatttctcggggggacaggagaaagccatttcaaatttgctccctgggattctcgagcaaggcgcggctctgaggtattgctgccaaggctgctcatcagcaacttggaagagagtcatatccgtatgtaatagagttgagacaatttctgacaggacagaagagtgaaggccaggaggcaggaaaacttctgtgtcagaggcactgcagattgtcctgcgcagaggaggcgctcaaacgcagataggctgttgtaggccattttgccataggatccgagactgctctagcatgctctctatgggaaattccagacctccctgaaatagtggtgacaggcatgctcgcaatctgtagccctggggtcctggatcgactttttcaggcgcagtatactgcatggaggaagggtcttgctcgatgcttgtgggccggggagcgccgctggatcttatgctgctctcgcttgtcttgaaaggaaagtcaagagcctcctggagcagcagcatcaggaacaggcatgatacaaagctgctgagccttccttttggattatgcaggcaagaatggcgagatgagggatttgcacaatcaaggcatagggtgcgttaaaatccggcagcactctggcagctctggcttgctttgaaaggtgatctgagagccttgtgattaggaggagaagggtgcgaatggctggtggcaagattacattttcttgactgggggatcatgtaagacgtttctgtgccagtatagggagctggcggaccgctgggtctggctggataggcaaattgggttgttgacctcattgaggcagatcctctgctttagaaaggggaatggaggtatggttgcgtcagggcagaggatgagcttaatggcaagagcatctgagatgctcgagtgccaccagaggaagctggcaatttgctcgagatcaccaatcttgcagaccatgcctcgaggattgcgggaggaccagagaagattgcaagaggccggggctgagcaaagagaccgagagctatgcaaggtgagcatgcaagactcttctgcgaagccgtacaaaggtggcgcaccgcttggggtagccagatctgcagttagggacgctgatattagatctctgtcccttgggaggggggaaaggagagctttcgtgcgccacaccaacggacggcattttggattggatggtcagtcagaggtctttacaatcgcattactgagatcaagctttattgcattcttgaaagttgagctcaaatgggtttcatgccttagggtggggagaggggaatctgcctcagggtcttggactgatgttttgacctaaggatcattcataggtctttatattcctcctacaattctgacgcaccctccaatcagccagatttgcagtctgggatgacaagctcagcagggcttttgcccagagggaaagggagaggggatttgctgcgccaggggtcaggactgagattgtagatctgggatcatctagttgccttaatgatccttcactgatgctggcacagcactgtcacttcctgaattcgcagtctgggaggccgagctcgctggggttcatgccgagggggatggggcttgggggtttctgcgccaggggtcaggactgtgaatcttgagcaggggatcattccaaggtctttgtgatactcctacgatgccggcacatcgcttcgacttgccaattttacagtttgagatgatcagctcactgacagttctgcctggggggagaggaaggagcattttctgtgttgggagtcaggactaaatcttttgaccaggggaacatttagagttccttctgattcctctacagttctggcgcaagccttaaacctgtgggagctgcattcttgaatgtcgagatcggcagccctcctgccttggagggggggaagggacagtttctgcgccacagatctgcactcatgttctgacctgagaaccatccaggagtccttctggtccctcaatggtgttggtgcatccctaagatcagcgtggactgcattcctgagagtcaagatcagcaggccttctgctcccgggggcgggagtttctgcgccagggttgggggccctgaattttggcaagataaccatgtgagacacttccgtgtcaatacaggaagccggcgcatcgcttttacctgaaagatgtgctttccagaaagtccagatcagcagctctcctccctaggagggggggagcagggattctctgcgtcaggagtctgcgctgatatatttgccccagggatcttgtaagcagcctctttgacactgcaggaagctggcgtagcgcttgagatgaccagtcgtgcgggcccaaacctgaagaatcactggagtagaggatctgagggtgcaagcagctggagcctgaaaagaggattggggacagatttcttgacgtggtgagcatgcaagactgttgttggaggacataccgtcctggcgcatcgttagagctcaagcagatctgcagtctgagatgatctgctcactgaggcttctgcctagggatggggggaggggcgttttctgcgctggtgatcagtactgaagttttcgaccaggggagaatttagagatctttgtgatgtttccacggtgttggcgcatcgcctaagtcacccagatttgctgtttgagataatcagcccactggggtatctgccctgggggggcggggggggtgcatttcctgcaccgcaggtcaggactgagatttgagacagggaagcctgtaagacgcttctgtgccattccaggaagctggcgcggcgcttgagatggccgtacttgcagaatgagcctcaagggtcgccggtagacaagggaggaggggtgcaagcaactgacgcttggggcaaagggacttggagctttgcaaggtgagcatccaagactcatgttggaggctatacgagaattacgcaccgctaaaattagcctcgtttgaatccttgaaagttaaattctgcagggtttctgcctgggaagggtgagacgggagtatcgccagagcaactgatatgatcttggactggagaaccggtcagatgtcatcatggctactcagaaggtgctggcgcacaccttaattgaattcttgagagtcgagctcactgggaaagtggattatgggagccagtgggacaaagctgagattgtaatcagaaagagcatttgatgccttccaattcaatttccggtgttggcgcactgttgcaatcagccggatctgcagtcttggataatgccatcgaggtcctttccttaggggagggcggggacgggggaaggatttcttgcgccgcggtttggggctctgacttctgacctggggatcagtcaagaggactaaagcacccaaatcatttcacagtggtggtgcatcgcttgaaagagatgcactgaaacagcctcatttgcattcttgaaagtcgagcccagcagggattctgccatgattgaaagaaggaggattttctgcgccgggggggggggggggggggnnggggggggggggggggtggtgcaaagaaattttgataaggaaagcattcagtacgatattgattctacgatgccggcgcagcgatgaagtcagcctcatttgcattgagttgttcttgccatggaggaaggggaaagggattttctgttccagctgcaggacaatggaggaaatgtttgacaggaggactgagtaagaagatgctgtgcagatcccttgcgtatggcttgagatggcaaaaccctcgtgcctcaaggatcgctggaggatgagagaactgaagcggctggccgcagggctgaggggcctcagcgctttgcacggtgagcatccaggccttctttgtgcggccatatgaagatggcgcatcatttttaaacgagcctgagctgccttgtaaagagcggagtttagtatgattcctgcaaaggggaatggggatggggttggctgtgccgcggtgagggacatgttattttgagagttggattggccacagttctttcaatccatttcacggacgcctgaagtagcccgagttgcaaccgatcctggagagttgagctgactaaggtccctgcccaaggggccatgggaggatagttgctgcgtcagggcaaaatcaaatgaatgtcatcagatacgcttcgagatgctggcggaacactcagactcgtcagattcacaatcatggatgaagaggtcactgaggtgcctccattggtagggggaatagtgtaacatccaaaggtctgggggggggggtggtcaaggaaattccaggtacaggaagggtcatgctaaggcagacttaatggtctcacacacacaaggtggcatggagtcaccacccccagtttgagtgccaaaatttgtcagtcgtattgtgccctcaactgaattaggggaggtggagagggggggggggggggnnggggggggggggggggggtccacctgcggcactgacttctaggccgctggcaaggttgtcacctgccggtttgggagttttgccttggcatccctgggaagctcggcccacacagctagagcgttcagcggtgatgcatagatggtcaattgttgggtggtgttgtgctgacggtcgaacctttcccgttcacccagccccggctgaacaagccccttttggatcttgtcgatcccgcttgctgggttggtagaacggcgaagcaagatcaggggttttgcatgtctttcagccacatcaagcagatcgagtggacaaaacttgtgcccagtggaacaaacaggacaccaatgttgccatctagctcaggttgaagtccgcaggaatgaagagtgttgtggtgtacctagcggtgggcacatcaaaagccaccggggagaaagaagacaaggtgaactgaagcctacttgggagttgtggcactgtgaatccatatatgctagaaatttgatggcgtgttacctcaatatattgagtcttccacaggtaagcagctaattggcctgaacattctgcaaatacactaccacgtctttggtagtgcaacagaatagctatggctggttgactgtgtggagccccaaagtcaagtcaatcctgcattttactttcaccttcactactgcgcggcttttctgaagtctgtgcatgatgtcccctcgcaactctgcctgttgtgcagtcctgcacgcaacaaagctgttcaagactgcaagggaaaagcacaagacacaccagcaagtctgcttggcgattgtcatgctgacagcttcaatgcctacgttgtctggatcttgcccaatcaaggtctagcttcaatcaattgcaagcgaaaaggtatagaaagcttacctggatctcctcttccagtgaattgcactccatcctcatttcgagggcttgtgaatagagcaactcagtcatcttatcgaggaattcctctttttggcacaagcaatcgatcttgtaggaaagctctggccattcttccatgtagtcattctggcgagtcttcaattctgctacctgcacaacttgaaatcgtcaagaacatattcggatgcgatcatcctgggcaatacacggcaggctgccctaattctcataccttctcctgtacttctctcaggattgcaggtgctctctgggcgacctacagtgagaaagccatcagtaaaaacatacgcatttacgtcgtagaaagagcaacactttctttaatcctgagctcgcgacgtctcggtgtttgagtctcacggaggtcgcagtcgagcggcccttcgtcagtgctgaggcttcgtgctgcttgatactcatacttggtcaaatttacacgtgtcgaggctgcttgctaatctcttttggctcactccactgcagagatgatcatccaataatcatagttttatttgtgactctaaacctctcgggggtttagtcacgtaatccaagtcacttttctttttcaaacggctactcttcgaatgcatggagcctcaatgcaatgcactctcgtcccaatgaacgcagatgcaatgagaagacttcctgaattgttggcatcctgcgtaatgtctctacgaagtccgatgcacggtttgattatccaacttgtggatgagtctgtgacaaaaggtatattacgttgaaggcgaacgaacctccaggcatgtcttcaagctgtttgcctgccagagagggtttgtattttctcgaaggaaagacgtggtacagtcttttcaccaattgtatgttgatgaacaaaggacccgtcccttgtatgatttggaattctgaattcttctgagcaccttacatctccagcaatgagccttcaaatgtaaatgcctcttttcattgagtgcctctggcaagcagactattttcactgccttcatgtggggctgggtgagatgcctgcattttccataggtggaccagatcaaagctatgcttgcctgagagcgcggcaacagcagcaattctccatggttgtgcagcaagaaaagccgagccacctgaagaggttgaagtgaatgcaagagtggccaccgaggctgctggcttcacaccccaccaaagtaaggagaattgcgctcacatttgtaacagctgcaataagttcagatgtgtagctgggcagccagaaggggtgacgctatgcgagaagcattcacccagtgcaaagaggaggagcttcactccttggacagctgcttcgccatgactccaggttggttctgtgcacttatgtaggaggaatctcagtcctttttttcacaccctcatgcacaaaaacgggtgtgaggaattatagggaaatctacaactagaggtccttcaccaggctgtctatcgcaatccatatggagttcttgctgcagatattaaatgctaagcaggccccgattgaaccagaccaggggtctccaggctgcaaacgcgtggatttacttcaaccaaacatgatgcacgcccacacattgttcagaggtaacattggagagctgcgggtcaaggatatcaagagtggccccttggcaatgctggctattgcaggcttccttgcccaagcttgtgccaccggcaaatcgctcctgcaggtcagatttttgcctgctacttgtgaaggagtctgtggagctacagaggagggctgggggatttggcatgcgagcatgcctgcatgctgaagtgtgctcgtctgatccagagatgcaagtgggtggaggtaccatgctgaagctgcatgccatcacaaggcttgtgggtttccaatcaagcaagatagccattccttccaacgcatgaagtccacaattcttacttggcaagtgcgaatgccttcctactccctgcaaagcaaacttgtctagactgtatggtgttggaagcaatccctcaaagtgctttgtctttgcagctggtgggcttgcccaccggaatgatgcaggccaggggccccccaaaaactctccccgtcgtccgcgagctgggagatggatgactctgactcggaggatgatctcacggagctcaagaacagatagatgaagaggctcaagaagggcaatgaggcagaggaccccaatgaggcagaggttccggtccaggtgccgaagaaagggagcgggaggaggaaaaagaagaattctgtttagggcatacagaatacatatatgagatgtgaaagctggtcaaagcttgctgtcaggaatgatgacgatgtgtggttacaaagagaacagcaaagatgaggtctatgataagtgtctcatggctaatgatgtttctgtgatcctttctgatacatgtctgatacatgtttccaatggattctgatgtcatgtgatgcttgtgtaatatcttctgatgtggcattcaaagatgtcttatttcttctgatgcttttacattgtcttctaatgtggcattccaatgaaatcttatatccactgatgcttcttaatgggaacttctgatatattctgattccttcttatctgaccttctgatccccttcttatttgtctaatcaaatcttacagctcctattttacatcttctaatacgagtcttatcccgttctgatgtgtctgatcattgcaccatgcgccactgctatgtccatcagcaactctgatatgaactctcatactttctgagattgcaacaatcctttcttatgggtgagactcacgtctaatgtccattccaatgatcagatccatcagaagctcatcagacaatataattcactattcctgcggaacagcgaaatcccacaagctgttaaagaggaagaccaccaggtctctcactgctcacaggtaaaagagagacaaaccacattgggacggagagctcgtttggcatgcgcgatctctttcgtcaccgtttcaaatgaaagggaaccgagtaagtcatggcagaaaccttgacagcaattttagcgcctttccaatttcctgcaaccgcaacaaatggcaatcgtttcaagcaagatctttataagaatgttataatcattgagtgtacctgcaaatactcttcctgactcgccggagcccagaaagggaccaaatttaaggtcgccaagagtttgttgcggattggatgtaatgtccggattattgtgatgatcgttgctcattctcaagccatttcatctgcttgcatacaagatgtgcacagacactcactggttaatattggagcaatattaatcatcatgcatgatatgataacatctgggaaagtaatcctgcgcgggtcggcaattttcccgcatccgcgcagttccgcacgtatacgcgcagggaaaaatcgcggaaacaagcagatcttttggtcgcgacgatctgctaacgcctgcaacacacagatcatcacctcaatcctagcaaagcagatacaaacagatccgcaacagacagatctgcatttccaattatgctagcgtatctgtacatgtcacttagcagcgcggatctgttgcgtgcagatctgttttgaaccacactaagcaatcaaattacagatctgctttatgggatagtgcacagacctgcagatgtgcgtcatatcacggttctgtttttaagcgcagtgtgaggacctgtagtatgcagacttgagagcatcctgtgtgtagtgttgcaggaatggaaaggtggtgtttgttgccaaagttcagatcgaacttaccaccacaagcttaagtagccacaagtacaaatgggacaacaacattcctacacttctcaggacagtcgacgctgccagacatgccagcggtcctcaagcaaggcaacctaatcttagcaaacctcttgtccgaaccattcaaaccccatgcacgatatcgactggatctcctcccctcggcaccccttc

SEQ ID NO: 214 - DNA, 20621 bp, unidentified
  misc_feature 1..20621: note = Fanzor polypeptide
  source 1..20621: mol_type = other DNA
cggatgcgcccgttgtcgtggtcgacccgcccatcgatactattacggagggtaccaagcaaacgactccgtacaccgaggctccgactactgagctgccggaagggaccccggcagcgaaggtggactctcctgatgtagaccttctccggcgcaggcgttacgatctcgctgctgccaacgacaaagacgactgcacgccaggctggtaggcatcgaaacgaggggaggttgcaaccccacatgcatatttctctttatactttagccgtccacgtaaaatgaatgtccagccttctcgatttcatatctaaattgcctcgttagctgtcattgagcagaagcagtagccgtgtggtagtctcctcgcaccattggtctcggttgtgccagcttggtggggcttccagcaccgcacgattgtgttggtcgagtgggcacttgttctctcaattccgggcgataagaaatgccaactggccgaagctgcatatgaccagcgttaactcatgataactctcgtagcagacccccaagttgtttcgactggtaggggtgctctagcatgtgaacgtgggggggggggggcacgaaaggatccgtgggagatactcgcgttatgaggcgctagtcgccacatctggaagcggcttttgtgggcttgctctcgttggggcaccccacgctcccgaaaaccagacaaacgaatgcgaacgacgatccccatgtggtcgacgcctgtgtccataccaagccgccgctatacgcacttgcactacgcagactgacggccccaccgtcaaagtcactcttcaattgtcctcctcccacaacaacctccgcctccataatgacaatcacacaaacttcgctcgctctcctggtcattgccgctgccgcttccaatggcctctccgacgccgcaaacctgcgccaggcgcagcgcaacctcgccgccacctacagacagccaagcgactacctccccgccatggtggcccgagtcaacaaggagcgagctgctgtcggtcttcctccggtctgcgcgaacctgaagctgcagtcttcctcccagcgtcactcggacgacatggccgaccacgactacatggcccacggcggaacggacggctccacgatggagaagcgcgtgacggacactggttatgcttgggacagggtcggagagaacgttgctgctggccaggaagacgtcgatgcggtcatggacgcctggatgaggtcgccggagcaccgtgccaacatcttgggcgactacaacatgctcggcgcctcgtacgctttcaacgaacgcggcacgtaccagcactattggacgcaggacttcggcaagagcaaccgcgagtcgtgcagcaatccaggcagcatggccccgaactcgagtcctaacactcctggccgtgtccctccaagcaacagcgtacctcaaaacaacggcgtacctcaaaacaacggtggcgcccccaacaaccagacccccaagcagcaggaccaagagcagggcgaagctgaccccgcagtgcaggagaacattatgcattatcctgaagcccggagcgctctgagtgcgaaggagctggaggccgacctgggcgttgccgtctcgccggtgccaaagactgacgtgcacgttgtgaacgcgaagactccgtgccccgcgggtgagcggtcaatcgaggagccggtcgtccaatccgacgcggagaaggactgcgatcccaagttctaagacgataggaaagaagtgctctgtgttcctcaacgtataatatagctgttgttcaacatactctaccttggcaatagtacttgcacctctaatcactaccatgatggctgtcgtagcctacgaatctaccggtagttcgactcgcaggcaacgcaagtcaaactgcttgccggacgatcgcaatttggctgcaactcaaaaagttatctgacgcacttattaatataataatacatactgtaaaacctctaattgtgcccctggggtactaagttagtaccccacccacgcaaggggggtggggcactatttgagggtagtgcccagctaaatgcccccacaaagaccgaacacgctgctactacataaactacacagtaggcaaatactactttctgtgctatttggtgcagttttggggatagtcaatatatccagagtaaacaaatcagcggctgctatcgcgcagctgcgtaagataaacttaccttcggactggctggtaagataaattcgtttttagaaaaaaaatcagtggcctcctgtcgccagtccaaaaccctccctcctcccccgcaggccgcaagcgatcaggtcctgaccccgtggcatggtgcgtacgcgtgagttagttcatgtattccctgcttaaggctaacctgtacgtatccataccctatgtcaggccccggacgacgacatagctgccgatggagctcgcgatgtgaatccagaagctcctctcgagatggtcactgtgaatgcaacacccagccaagcaagctcagcccaagctcctcccaccaccgatccacccccactcacgccactagaagaagcagaagcagagcggatacggcttcgggcgaagaagcgacagcagcaagaaaacacagtgccgaagtctagacgctcccccacgctgccaaactgacgaggatcggccccgaaacgctgaagcggacccggcagacagtcaatcccgtgccgaccaagctgagcgttgggagtcccgcctggcccgtcatctggcagctgacaacgaggacgaaagtgaaggtgaagcagcgctagcggaagtattggcgcagcttgaggaagaggatgaagatgagtctccggacaacagtggcgattcggactacaacgacgatcgacgaacacctgagggcgatgacgatggagactcctgtgacggtattggacgcgctactgacatcgattccgctgcgaatagtgtgccgacaccgcaccaaacaccgaagaagcaccaaaacccgaaggcgaaccaaaagtctgtccagtgcgaggacgaagaatcggaaagtcaaggtggtgtggaagatgtaccagtcgtcggtgactacttggaaggatttcctatgtactggtcgtcgtggaaagtttctacgaagctttcgacgagctccaagaggctacgtaccagcgcttctcatcccgcacaagtacctcaattaagtccaggaacaagcaaattgctgccgcgcagaaagaggtcaaaaagaaacaaagtaagccgaagacgagaaaggttcgcgcccaccgacagagcacaggtggcacactattgccagagtcatgggagaaatacggcagggacgttcgtgtgcactcatgctattccgtacgagagtcgtggagaaggcttgcggcagcatgacgccgtccgttttgtggcgtgtactgctcgtgtcaacgcacgggtttgtagtcgaccgagtggtgttggatttcatatcgttgtgaatgcaacgggaatgcacagccattctctcaccgaacatcagtggtataactacgctgagaacagacgcgtcttgggtccgtcctacgccgcgatgtggcagtcatgagcaaggcgggggccaagccacgagggatattagcgtatcttcgagccaaaacaggttggtggttttggtgtgtattctgtatattgcacgaaacactaataaaatttggtttggtgttctataaaggcaagcgaacgattctacgagacgtgcacaacatgatccaggacgctaagaagtgctttaatggaggtcgaccggatgcggagcgcgctgtctccgtgctggacgaattctgcgagatgaacactggaaatgtggcggagttcgtcattgacaaggagaccaacgtggtgcaagtgataacgttccagtcagcgcggcagaagcgtctctttgcagccttccccgaggttgttctggtcgactcgactcataacagcaacgcgaaccgttataagctgtttagcttcgcagtccacaacgtcttcggccgggtgggtaaatgctttcaggctctaacaaaaatgtactgaacatttgtataattttctgtgtggtttattttcttagggtcaattcgtgcaacacgcattggtgcggacggaagagaaaccgaacttggctcttgttgtcgcagcattcaaaaggcacaaccctgagtggtccaagatccgtgttgtgatgtcggataaggcactgcatgagaaggaggtgctgttggaaggatggccgaatgcgcgccagctactatgtcgttggcacgtcgaaacgtggttgaagaaacagtgctccagactgggagacgtcgggcctacagaaacgaaggaactcaagtcaattatgaaaggattggtgaatgcggcatctcaggagcactatgacgacctgaagaaggctctgctcgagacagtcgggaataacgacgaaaacctgctctacaaaagttttatgaagcactgggatacgactgctgacgagtgggtgatgttcaagcgtggtgacgtcccacacctgatgaacaacacgaacaaccgtctggaatcggaatgggccgcctcaaataggttattgacggtagtttcactgttgatgagctcctctccatgctgataacaatgcaagattacactgaagaacgctacctggctgatttccatcgtgtcagcagtcgccctcccattgctgaagatccagagttaactgcagtggccatgcatctcagcaactacgccttcgagatggtggcccatcagtacacattggctgtcggacctcaggcctgttacgacatggagacgacaccagatggcaaggcgagagtgacaaacctagcgacaggcaattcgcacgttgtagatgctcgggtgatattttggttcaattttggtggtttggtaaattttcgggtgctgtgactaacgctgggttttgttctaccaacagcttgctgcatgcgactgtatattcaggcagacctgtttgctcccgtgccgccatgtcatgtacgtccgtgccaagtctaactacgagacggtagttccgccaatggttcgtttcgctacccgttggatcgtccaaagtccagctaacaacatcgatgaggggcctgtactgacggggggattaaaccgcatcaactgcccaccccgccgtgccccacgagcactatccagcgacgcgaagtacagccaaggcaaacatattacagagaagatcatcgatgtcctctcgatccagccgtctaccacacacaaactggcaatgcagtggcttacgggtttctacgacgcgctacatactggcaaactggaggagttcactggccaagatctgtgtgcaacaagcggcttcaactcgctgtctctagtctcttcggttgctggtgtgacagcatcgcagctttcttttgctgagatgagcagcgcgcccgaagacgagtcgaagtgcgatgtgacggcagggacggaccttgaagaaaaagcgcccgtcccagtagccgcaccaccggaatcgactaatcaccagacgactatcacaccgtctcagcatgagaatactgtaggtcgaagtccagcggatcctatcaccttagcatcgccaccgaagcgtaagggattgacgcggcgtgcggagaagcacgaagcgtcgaccggagagctgcaagttgcaaacaagattcggttgcgcatctcagaagggagaaaggcgcgtgccgttaagctctcggacatggcgattcttaaaggcccgtacagcagacgcaccaccatgtcgttcatcgaaaggttgagcttgccatccgtggaagtggctgggaagctcgacgttcgtagcttcaacattgggcagcccgtcccagtgattaaggcgattcctcaactggaaaagatcgaggaggccatagaagcaatcgaaaacaagagcaacaaggcgctgcttgctcggtgggaggactatgggtttgccacgtacgggtaattgacgctcatggctcgagtgatcaaggcacgaaacaacttcaagttagtcgaagatacgatgaagtggattgactccttggcgtttcgagttgccagtattgtgtgccgttcaaagacatggaggacgtgactaaggtaagatttccttgcaccgaaagtataccaaaagtatactaaatcaccaaacttactgatgtgctttgtgtttaggtggaccataagcaagcagtagacgagctgaacctggggcggtggtacgttggccgacatgaacaaaatggctgtgaattcctggcttttcgagagaagctctggctgcactcggggtctatcatcggtggtcttttggcactccaatccgagtatttggatgttgccattgtcaaccctcgctttcacgactttgatgatgctgatcagaagatgtgcacagcaaaaggatatggcgctgcgaatgccagggccaagttcgtgtaatgggcctaccttagctcactactacggcttacacgtatgccacgtgtatgaggaagcgtaggtttcttttacttgagtaagtatactcgagatccacgagtatactttaaacaagataaagactccaagtagcgagttttggtaaaagatgagaactgctatttgtgttttatgtttctgacttcctctaaatgtaatattctaaactaggaatctgccaacggctggttggcaggattctgctaacatgcaagtcactcattggctaaaagatgctgctttcagccaataggaatcctaaatgtgtatggaccacccgtcgtggtggttgtaaatgtatgtagtcattggtgtaccttacaccaaggtcgaggaagtgttcaaacctctaacagacatcgcatctgttagagtaacaagtgactgtagccacttgtgcgtgtaaccccgttacagttcgtcatcagcgtgattaacttggggcaccacgggggtgcatttttcgtggagacggagacgaagatctgctacctgtttgaccccatgcagctgactagcaatttgtccgcgctgaaggaagcagttctcactgtggttgagaagatgctggacatgaccgaccaactggactaccacgtcattgcccactaccaacagagggatggtacgtcgtgtggcatttggtgcttggtggtgttggaactactactgtttggtgcaactcctgaaacctggtctgactactggaaggactctctgtacgaagtggtgggctacttgaggttgcgctacctacggaaggtgattagcttgcagcttcagcagccccagcaggtttagtaggcaccctaacttcaatacatatctttggtagatgatttttgtgccagatcaaaacaccaaagtcataccgaaactaagggactttgttagcgtttgtggtagttgaaagtagacgccactccaaatttttgaatattaatgtaccttgtattttccaatactataattaagtgctcctataggtactcatcctcatctgtcacagatgttgctgtgaaagagagcattggctaggatgaatgaccactataacctatgctgatacaacgcacaggaatacgtaaattactggctccccgtaatatattcttgtagacgacaagcctcgcacccattatttgaagctatcatttaataacactttctgtagcagcaacacgatcccacctaaaattgtcgatcaacaactgggtgcatcctgaaatcacattttagatttgtgacgcacatttgtccaggttatgatacatttactacgtgattatactcgacgttgctgcctctacggagaaaaatagtactgaaagtaccattattttgaggctacttgagggtatccaatgggtttttgtataggatggtcacccctcttggcaaccccttttgacaacctcattttattgtgccttttgtttaatttgccgacagcaaaatcggacttcaagtccgattttcatttactaaaacaagggagatagtaattcgttatagtatagcttccccgaatatcggagttcggttttccgtgctttgctccttcggttttgctctcgttttcattcgaggtcccgaatggcggtgatttgttcgccatctgggacttcggctcgaaaagcgctatcgctttccctcgctttcgattggaaagcggagtcggatcaccatccctccgatttttcaaatcgggggtaggtcccctttattttaactcgtaaccctacctcaatagtaaaagtgatagtttttgaggtccgtttagccaaaaagatgaaaggcacaatacgtcacaaatttactccactgcttgttttctttcacttttgatacgagaccaatttgtgatttctggattttttttagctgtaagtgggtgcatccttttaacattccttccaaaatcagttttcatccctgttttacatcctaatcactcattactttaatttaatttaagttacatgtagctgtgcggtatgagtgagagcaacgatggtagctgtaagaatagaaaagtgtggcatcccaacagacaacgcatacatcacccttctcatgttagacaagtatttgaatttgaatttgttgcggtttaatcggctacctactcccggagacgcatctccgcgtacggtgatcgtgtcgctagatctctaggatatgagcccgcggtaggcgcccaatatgttagacaagcaacaagaaacttcacgctgccaataattccaatactaaggttgggaggggtactgtactaaattttcagtggagagtggggtactttaagagggtggggtactattagagggtggagtattacttgtaagtccccacccaaagtaatcaaaaatgagaggtggggtactaattgagggtggggcacaattagaggttttacagtatttagtccaacataccaaaaatggtccaggatggacaaattttcctgtagccatctgttacttttgctcagaccattcgtccaacgccggtgatggaggtagggcgccgccgggattgaactcacaacatacctgtagaacatagctcgttagaccgttacaccatacaggcgccccggtcatcgtctcttcgggctgggacttgacactgtctgattgcatattccaacactccccctcaatcgagagtgtcaggacctcctgattgcgacctatcctgcagcttgttggtccgactccaacgccgttgctgcaatgacctccctgggtttaaggccacccgtgtctccccctggaaacacattccgttcacagacacctcgtgttgtgacacgaaccacacaaccatcactacgatccacattccagcaaccattgaccatctgcgttctacgcgcttgggaaacgtattccttctccatgttgtaggtcggctagccgtgcacgttttgcagagtgtggaagacactccgcttggtcgaaatgtgccgcaggaccatttttctggcatctactgcacccattcgcactcctcgtccagcacaacgttcgttttgcgtacgctgcggttcattaccgtcctcgcgaacccgatttacgccgagtcctctacgatgcgcttagtcaacatttgccacacggccttcttcgttacgaggatcgacgatagcgatctccgctaggatgacgatgacgcacaagtggcgccaagtttgaaagtgcaacttgaagttgcgcctcgtcacagggtcttgatttgtgagtgaccatcactctgtggatcttcgatgtttggtgttatagcgaaacggcgcagtgcaaaatggcgccaagtttgaaagtgcaacttgaagttacgtctcgtcacagggtattgattggtttgagtcgcgggagaccatcactcagaacacgcattagccccggtgctccatgttgcacttcacttaaagcgacaggggaatgggcgataccgcgtttggaggcgtttggtaccgaagccgcctagcacaggtgggtctcattccgcaatttgcaagataccgggtaagcgcaagaagcccccccccccccgccgactcaacccccgtctacacgtatcaaagcgtcaagatgaagttcaatcagctctgcgacctcgacttcctgaccgccgagatccgcacgatggcatcggagctcaagctggtcggcttgctgggatggaagattgctggcaagcacgtcctgcggtgtctacaagagggcgcttccctgccggccctcgactccaacttcttctaccaggatgaaacggagaagaggacgaggaacagcccagagtatccggacctccacccgaccttcgtgagatactgggagctgtgcgaacgacttcccgaatacctccccccaagcagcgtcaattcgggtcccatgaggcgcgcgatggccgatacgatggagacgaacaccatcaacatgctgggtcttcactttcgaaggaggcttcaccagtacatccggttccgctacgcgacgacgggcaagctccaactcggctataaggcgacgcggaagctcgttgctggctgatatcgtgtcaaggaagtcccccacctcgatgtcgacggcgtggacaccggcaacgtggtctatgtatgggacgaaccaagatccactgcggagcgtgagctccacgactggcttggcttcgtgccctgggagtggcgcattcgccaaaacccgacccactttttcgtgaagctatacgacatgctccagtggatggaggcatttgtcgagaagcacccaaagacaaagggcgcgcgtctctactccctgcctccttactccagctcattcatccccgcacacgtgacgctaaacattacgtcgctgcatcaagtgttctgccgacttttcacggaccctgagcgtcaggcagaagtcaagacgtatgtgaaggacgagcttggcgtggaatgcggatctacagagcaagttcgccgccagtttagcgaaaacaaggatgctgtttttcggaagatgtttcggctaaatggacttgagaccagcacacgagagttcgcgtaccaaatcacaacggatggctatgcagcttccgttttgctgcgccgccagacgctttgccgcgaggatgacgacaacgcggaccagcctcgcaagcgccaaaagaataataaaggtgaagtagtcaaggctccggaagcggtcgaggaagacgccctcgaagcggcgatgaagaagttgccgcccggatatgctcctgacgtcatgatcggcatcgaccccggcgtgaggactgtgtgcaccgcggcatgtgaaggtagccttccaactcggcagtcgcgacgccgacggaatcgacaagggaagcgaaagcacaagatccgacgggcgaagcacaagcgcaagaaccgacacaggcagcggaccgtcgccatcaacacccgcgagtactaccacatgtccaaggctggcaagcatcgcttctggaacaacggtctgcgggagaaggaggcttcctacgccaagatccttgacggtatgccgacgttcaagacagcaagatatcaagtctacttggatgaactgcggtattttgtgaagcacgcaaagtacctggtgctgttctcggcacggcacttcttccggaagtggcgctttttactgtactgcatgaaaatgaaggcaatcgacactctggccaagcggcttgtgccgacaccaagtccacaggtgtgcgtcgcattcgggggctggagctgccaagacggactccggggcaaccctcgcgatccggtgaaggcgttcaggaaggcgctggagcggcgcgctactgtgctgccgatggacgagtttcggaacagtaagctgtgctcctgctgccaccagagtcttcgcagagcccgactgctgaccaaggtcaaggacaaagacaccaaggaggacaagatcgttttgaagggcaacagaaacgtcctgcactgtaagaacagtcgctgcagggcccacttctggaaccgagacgtcaacgctgccatcaacattttggagctgctcaagtgcaggctgcttgacctggcgaggctggcagcattccagcggtaatgacgaccaaggtttttgaaatatgtgaggataggctgttgtgtgggcatgcgctctgcgcattgtcagcgcaatggggttccgtacccgagcagacggtgtggaggagggaaactccgatgacacagaagccggtacatttttttagtttaaagaagggatttttttttccttttttggataaataaaaaggaggtggagacatagaaaaaaagcaagcaatggtgtacgacgtaaccgtagacgagtccagcgcgcagcagaacatggctggaatgaagtttagaaaaaggaacttgataaaccggtttatcaacttcgtcggcgcggggtttcaaagtttgaaggcggtatatcggtatttgctgttcaaaccaatactcttgcaaaaccaggaagtgtaacggatcgcaaacggctcagcttcgcttcctggagctcctatttgctcctcgcgcagatataattggcttcggataaagccgcaccctttcagtaaggtcgtggagaaaaggcaaaggcacgtacatgtagtttcctcactcttggcaccttttcccggcagcgtatccaagccgcactatcgttccaacgcaagaaaggcaaatggcgacagctgcgtacgccacctgcagcttctaggacgccgtggcgcgtagcaacctcaccatctttgctggagacgtcacatttcaattgtccctgtttcgagcacccctatcgtctaccacttctcgtcttcaacacttctcccggcccccaagctccacaacttcgttgtccctgaatcacatcaactctttgagagttcgccttcgctcctcgtgcttttatcggtaagtgctaaatgaatgccggaatcagcttttcgctatctagattgctctctctctctactaatatatgtagcgggccgcgccacaacgcgtgactacggcaaacgggcggtcaaataacccacttcactgtcgtcgccagaagcggtcgggttgcaagtgacgatggaccaactctcttccagtcgtgatttcaatgctgaaggaccagcctccactcgaggtgctcgaggtgttgatacagcaccatcgtctcctgtcgagtatgattctgaagattactgtgatgacactactgaagtgacggctacacgaggctacgcaaatggccagcagtcccaagtggaatctgctgttgctggagcaagaggagggcctgcccaaaacgtcactcacaactcagcatttgcgcgacttccgttatcagaacaagcaaggacgtcagcatcccaacagatacccttcacgcaatcagcacccccaataacttcgagtctaccctgcggtgatttccgtcggacgacttcgaactccgtaggacccggtgctggagctacgacaccaacgccgcaccagccacccgacgttactggccgtgacttttgtgagtggcctcccgagccgacggcgctgtatgatgcagacgatattgctcggatcccagcatgaatccgtgaggcggtactccagtttaggccaaattaaacgtgtacgccgatgcctctgccccgaagccatcggtctattacgttcaaatatggagtccgcgtgaagtgctggttccgcgaatcccttgttgtcgggtggttgtgcatggcaagcgatgcgtgccgtcgggatatcacgttcctgcccttccatggagaaaaaccactaatgctacaaagcacttgtgggagacgcaccaaatccagtctgaaaagacgaccctacagaatacgcgtaagcgggaccgcgctgaaggggtcaaccgcattctagcgtccgcgttatgccgtgacgatgcgaagcgtttgtgtttgttgctggagacgattcgaattgtctacaacaacttgccattccggtttggtgagtacgaagagtcagtcattctgaaggaagtcgtcacaaaagatgagttcaagacaacagtgaactcaagaacggtgacaaattcacttgtcgagttgtacgcatccggtcgccaagagctgatagggttcatcagagacaatcgtttgggacttatcaagtgtttgacgatggttgttgacttctggaccccaaagcatggtggcgaaaagtatctcggtttgcgcatctacttcgtcgactcccacttccgactgcgtactgtactcgtcatttcttgcccatgtatggagaacgcgaccaagggattcgcggcccttttgagcggtggatttgcggtattctgtttgactttggcctgtccccgagcgacttcttcggctccaccactgacagcggccccgacgttaaatggacgatgaacgaagggcttcgattgaagtgggaatggtgcatccctcacaaggtgaacgctgccaccaagatggcctgcggcttgacgcgaaaatcgcacaatcccgagatgtcggcgttgctaaacaagctatctcaaacggtgtacgacacctccaccaactcgacgcttggcgatctgcttcccatgctgatgataatgttgggggaaggcaatggtacccaactagtaggctacaagccgcatcgcttcatggggatggcagccacgatggagcgggttctggagaagtggccagctctggaggcatggtacgaggcgcgttcagctcagcatgcacggaaaaagaagcgagcgccaccagggtttcaccttgccggttgtcaacagcatttggtgcagctattatcaatccttacaccgattcttctcgtgacgaagcgatcacaggcgcaggatacgaatcaagtgcaagtcctgctgtccttgtatacgatgtgcatgacttctctcgcacttgacagccccatcaggcgctacgacacggctccgtcgaacgccgtcaatattcacccttttcaactaacatcgctggtggcgaggacaaggatgctgctacagaaggcgttttaccacaacttcttccgccgatatgtagacattgtatccggttcctacatttttgagatgcaactggtgatgtatccttcggttaagcacgtggggagtccgatggacgaagtgattgccgccgttgcacgtactgaagggagaatgcgggatgatcttgttgctggtcatgttgtcgccgtttgagctgcaattatgaagcgcttgaagtcgctaatgcgcttagtagccaacagtcaagacccagcacccgttgatccgattgctgctccagctgtgcaggccaatgttttcgatgacgacattttggcaacctttgcagttcaacccttccgaagcaccgaacgacctgctcaacaacgtaacaagcacgatactctcatcgccggtgagctgaaaaggtggctagaagattcggatgggctgcagatgataacagttcctgatccagccaagacgagcgtccgcagaccggagagtatcctggaattttggcatcggcagcagcagtccaagcgctatgtcttgctacccatggttgctcgcatcctgtttgcagtcccatcttcgtctgctcagattgaaagggacttcggcaacagtgggcaaatggtgactgccctgcgagcttctacaagcacggctaatatcgacatggcttgcttccttcatcaaaaccggtcatttgtcgatgtgtgccagtgcccaaagctgaaagcatccgaagtcgacgaacacattccaagcaatgtcaagattaacctggaacccgaggtagtggagcgaatggaatggaatcagctggcacaagcgtgcttttcgacatcaagcgcaagcgcatttgcttcttacaacgaggaggagacgaaagactcaagctgttagtttaaacgagtaggaggcgaaagactccagctggtagtttaactgcttcatatattcaaatatattcacctagcatattcgaagtggctttagtagtcaattccatgagtttgtcaagtccagcatgggataaacattacgaatactgcagcgcttttaccttcgcttggtgtgatttctccagcgcacttgcacgttcggcagcgcgtaatgctgtttcgagtgtcagttccgcgcggatttggtccagtctcgatagattggccacggcttgcggcttcgaggtttgagctgcggttggtttacgcctcactttacctgctccagctctaagaacgcctttggggtgcaatgctggctgatcgttgctgtaggaagtcttgcgaccttgtcgaccttgtcgacctggggaactagctgcttcatgatccgactttgcctcgtgcagcgatttcattgttgcttcgatcgagttcctgaatgaagtcatcgcttgattcacctctgcctttattcgggaatccataatattctccttgtcttgaagaatactctggttcgagacaacatcttgctgattgtggccctgtgtagccatctccgcacgaagtttcacaaatttacgctcctgcttgcgctgcagcttgtttagttttgcgtcaaaacgcagctccactatcagcaacaagtttttgagatccgctgtctagattctgtctttcagcgcgcaactgggcagaaatcaaatcagccacgctggagtcacgctgttgaagacgttcatcgacataggctttcattaccgctgtcgctttattattcaccgctgtactgcacgactccatcgctatctgaaagaagtgctgcgtccacgacttcgtgtcctccactttgcagtccaggtcactcatatgcgcctgcatctcggttcgtatcctctcttctgaagccccttactacactgtctcgcctgcacagctaattggcgctcgacttctgcaacgtgatgttctcgctctgcacgaaggtgagcttgaatatcgttctgcaggctgcgtgtctgaacttgaagctcttcattaagtcggtgtgatgcttgaataccttctaccatctgctcgttcattcggcgctcactttcttggcgggtctggcgcaccagagtttgttcttccgtcctgcgtctggcctcctgcagctgaagctccatggcttgacgctcgatgcttccgtccaccagcaccagatcttcttgtacggataggtgtttctgctgatccttgatggaaatgcttcggttgcgcctcgcgtgtggcgggtttccgctttgcagagcttgatcatcgtcgtggagctcacttgtgtacgatacaagaggcgcgtatgagtgctgcatactgcctcgactggtgagcaagatgcaatggcgttcacggtgcagggaaagataccgtatttcgcatgtagaaagctgcaccggcatatgagatgcactttgataactaccattcttttttttacttgctcaaaaggatttatctcattttctttttattattattgtttttctttttaggctggtggaacagtgatctttcgctaaggttcctacattttcactttggtcaccgcacgtcgcatgcagagcccgggatgacttcagcggccactggaccgctgaagtgctggtctacgctgcatctattagggtggtgctgctgaaggtgcctccccatgctacgtctatttgccagcctgcagacgtagcatggaatcatccgttcaagacttggctgcgcaggttttggctcgaggacatccagcggcaactgatgcagccgcgcgacgcggaagccaagtttaagctgactccaccaggccgcgccgggatgtgccattggattcgcgctagttgggagagcctgagctccgacaccatcgcgaatggatacaagaaatgcgacttacacctcaacgaggagtgcctcgccgccgcgtcgctggtggcagagctgcagaacctatcgctagtagggccagtggccaaggcggtcgaccaaactcaagacttcgaccgcaatgtcattcttgacgaagctgtggtgtagctttcttctacaatacatattttgatgcacatcgttttttaaaggtatgttttctgttgtgaacatcatgtgcagctttctacatgcgaaatacggtatgtgctctggtaaggccgcgcacttaaccgagaagtgcccgacgtctcacatcaaggctatccagccaatgggagaagctaggcatgaactcgtcgtttcgttctctcgaataagttaaaccttcgttcgcttcctcccgcttaagttttcatgcgtttgaaccttaaaacctcaggaactgcggttcctgaggttaatggattcgtcagttccgtggccagccatgcagcagaagctgctgcgcgacgcgcagtcgacggacgagatggcgcgcctgctcagccaggagatctctctgtttcagcgcaacatgtacaaaaaccacagccagcaccggcgcgccttcttcttccagaacctgcagcaggtcaagcgccgtctgcgcgatttcaaggtggagaccctcaccggctgctttgcggaggctgcgggcgtcttgaagcaactggagctcgacgcaggagcgcaccacatttcctggaagctgctggcctccgacctcaaggtcggcacggacgccgtgctgcgcaagctcgtgacgctcacaagggcggccgccgaggtgatccgagcagctcagaaggcctacaaaggtgcggaactgtagcgtttatactggtgtgctgtgtgtactgagctgatttggtggtggtgtgcttctgtgtgcagctttaatggtgcagttcgccatgacgtacttcatgccgttcgcgctcatgatgaacagcgtcctggcgcggttgacggtgctgttcaagacagtgatcgtgcgggcgatcgagctgcacggaggcatcacgctgctgtatctgaacgaggtgaccaagtcgaacccgctgcgagccaaggtcactgccgtgcagctccgcgggtaccagattcccagtgacattctccagctcgccaatgcgtagattggacaataagcattaggtacaggcagaagcgaggagtaacacacgtcgtaaaatacatgatatagacagcaagccagcatgaatccaacatactacaggtatgcggtcgcctcgtgaggtatcgggaacggggactgcagacaaaatggagcagctttgttgcgcggaagacactggcgactactgcgcagtctctaatcacgagctgttcgggggagtggtgtagccaacgatcgtcttgtggaactccacgacaccctgtgagagcagtcaactcctccaagtcaatagccgattccgtcgagactattttcaataaaaccacgcacctgcacgctgaggtccagtactcgtgtcgtcatgtcctcatccatttccacctgcacaccaatagtacgcatcgtgggcgctgcgcaacacaactccagtcagcagcatacgcacccccaaatcccagtacgctccaattcaaagctcctcaccgctacaggtacacgacttcttggagagaccacagcgattacacttgtagttggatggcacgagtggacacacgtggcccttcttgggctctccacactgcagccagccagccatacgcacagcaaattagctcccagctccaccctaccagcacccgatatcttcctccttcgcaccttgctgcagcggtagtttcctcggttccggttctgctgcgtcttggtgctcaggtccaggtcgaagctggcggcgtccagccccgccatggccttgttgccgtcctgcagctggtccatgaagccgcccgtcgggtccgccatcatgggcatggcccctatgccgtagtccatcatccccactacatgggaccgagcccaaaccgtcagttctgcacccaaatcttacatcaagccacggtcattatagtacgcactgccattcacgtccatgggcatgttcccgttcatcttgcacgcgctcggctgaccgaagcaaatgtgcgtcttgcgtgcgggataaggttgacgagctgagaaaaatttcggccgcgtcacaccacgtttacaccatctacctattcagccacatactacacgccgcatgccgtagcatgggaattgagccatccgccccaagtcagcgactccatccaaagactcgagccatgtccttcagcttcggccagaccagcggcggcggcagctccggcggcttctcgttcggcgccagcagcgccgcggcgccggcctcgacgtccactgcggctccgagtggcggcttcagcttcggctccacggcgtccacgacggcgtccactgccgcagccccgagcggcggcggcttttccttcggcgccgcccccgcgacgtccacggcgccgtcctcgggcttcagcttcggcgccggcgccaaggccacgagcgcggcgcccagcaccagcagcagcggaggattcagcttcggagcgacgtcggcagcccccgcggaggccaagagcagcgcagcgccggctcc

SEQ ID NO: 215 - DNA, 20897 bp, Phytophthora sp.
  source 1..20897: mol_type = other DNA
agtaatcgccacgcggtgcccacgaaagatccgtgacctcagcgcaatggccgttaatcgaaattgctggcaggaaaagtttcgatggcactggctgctgctcccagcgctccaactgtccgccaaagctcagcgacaggagattcagacggccaccacgtgcaggtaacacacctgccgacagcaacccgttgccgcccatttcaccaacacgaagggacggggtccacgagctgcgagtgtctgcagactttgtccacacaatgagcgtattgtccatggacgaggaaagcagcgctgtctcgcaaggatcttcactctcatcatctcgcggtaactgcgtccactgcaccgacgtgacccagtcttcatgaccgactagtagcgcatcaaagctcacggtatacgtcgtgcgggcaccacgcgcaaggaatccgtctttaacttcaccagaggaagctccttcaccttgacctctcgatcgagcagtaactttccatacacgaattcgctgatcctgcgacgctgacgcgagcattgccactacattccctacgtcttccttctcctgttgcttaaacgcgacactgcggatccacccctgatgtccttccagcgccagcaactccgtcaactgatcactcccgtccgctacttcaaacaaatgaaccttggaatccaccccacccgtcgccagcagcacactctcctccacttctccttctcctcccttcaccacaagagcatccattgtctccatgatactcttgacgccaagctccagtcgactcagcagcttcacctcctcctcctcctcgctccctttaccccgaccgaaaaccgccaacgtcccgtccgagaacgcagcaaagtagagtcgacgtctatgcgtctcggcaggcgtcacggcagccaccgtcaccgccggcagcttctgactctcgtgcgtgaccttctggagctgccaaccgctcgttgacaccttggaccagaggaacacgcgcccgtccgagtcccccgcgagcacctgcacgctctccgattgtgcatcgtattgcatcatgacgctcgtgagtctcgaggcgtcggaggtcgcgtcccgatgcttcaacgtctccgcaatggccattggggcggagtttgtgtcatcgtcgacgctgctgcgcagcagacacacgacgttcctggctgcaaacgcgccgcagtagttgcaagacctagatgaagttgaggagctactgggacgcacggacagggcgttcgtggcggcgttgcagcccacggcgacatgagccaacgtcgcctgcaccatcgccatccgatgaattagagctgttcactttagtgtctgaatggactcgaattagtgacaaaaaggctacttaacaacttcaatgttgctcaatttacaaaatcagacgacatggcgctaaatatagtccgatatacacaaatcagaatacgcgacataatgcacgatccgaattctcgcagaagactcgtgggctgcgcaacggaaagcagcaccgtcactggcgtggattgctgtgctgcgccacaagctgccacagacctcgtacaagaaggtgctggtgcagctgccggacggaatcatgccgcacctgaccaaaacccgctgctgctcgccgacttccttataccaggtaagcatcggtgcagtcacgagtctgctggcgctgaacagtctgttcatcctcacaacttcgactcgcccgacttctacaacaagctgtatgcgctgctggacgaccacgttgtactctgccaagcagcgcggccgcttcttcggcctgttgaacctcttcctctcgccgacccacttgccggcgtacacggtggcggctttcgccaagcggctgtcgcgcagtgccctcatggtggagccgggcgctatcctgtttattatcccgatggtgtacaagttgaatctgcgtcacatggagtgcttgtagcttatcgagtttggactcatcaacaccttccgcacgcacaacgtgctggtcgacacgctgctctgcatgctcgtgccgctgctcatccagaagggcgtggcctacgtgcagcagtcgcccaagtccctcttcgccgtgttcaggcacttcctcttcccggagaaggaggagcgccgcgtctcgcgagtcatcgaggtcaagcagcgcttcaaccgctggggcaaggtctgggactacgacccgaagaaccacctggctgcagaaggtcatctcgctctacctggccgacgtgctggacctcaagagcagaaacgcccagtacgagctgctcgaaaagaccaagcggaggagatcaaagaccaccaaggccaccatggtgaaatgaagaatgaaagcaacaaaagaacgagagtgcagaattagagaaatccgagaaagggaggagaacgtatttatcgtttttggccactcatatattccagacttcaactgcggcgccccacccggcttcggctgtggcgacatctcctgcctggctttggctgtggcgacccacaagctggtgcctatggactataaagatgggggtcaggcgcatcgtgggcgatcacgacgacacaatggatcaaggcaccaaagactacgtgcggtcgactcgagcgtctccaacttgtccgctgacgatgtacgcggactccgagacagcaatggggagctggtgcggtgcgctggatgttcggaagctcgtgggcaccaacatgaatggagacgccttgcgttgctctacaatagtccgcgtggccacgatcagatccaccacgggctatttcgcgtcaattcctggcgcagagattcggtcgacgatagcgatctccgccaggatgacgatgacgcacaagtggcgccaagtttgaaagtgcaacttgaagttgcgcctcgtcacagggtcttgatttgtgagtgaccatcactgtaacggggttatatggaatagtgaccctgtcactattccgggatggctacatcggtcactcccctggatagtgacccaagtggcctcagagccaacagatacattttgtatgacacaaactatagggaacttaggatttgtatgcaggccaaatctataccaacctataaatacattcagtcttagatctaccgcttttcaagtcaagtcgtccccttcagaccagggacacgtgaacggctgttcacttggagtttgtatactcctgcttcctctgttaagaagtgctgtgtgccccgtcacacttggtagcacttgtagtcaatcctacgcctacgcgggtagattggactacctgaatcctctgtggtctcatcgagtgagccaagatggatcgtacggagtttccccatctgaacaactcgcagtacgagtccgttcgtaagatggcaggcatctttgggacagatgccctgcgtagcttagcggcggcgacgccggctgagcaggttgagcgtatcaacgcgttcgacacctacgagcgagggctcatcggccacgttcaagggcttcaggccactgcggccgcgccgaagccggtgcaaccgaagcccctgcggctgaaggttcaccccttcgaagggaaggaaggagaaaaccttcacttctgggttcgagaggttgagctcgcgatggacgcggctctcgtctcggacgagcgactccgtgtcgcctttgcgctctccaaccttagtggtcgcgctaagagttgggcgtatacccgcgaagcgacgacgcctggatgcttcgcatcatggtctcagctgtgcgagcagctgcgggccgcgtttcttccggcgaactacgagtaccgccagcgttcgcgcttcctcgcctgcaaacaaggaaggcgcgagctgcatgagtacatccaggagatgcgagtgctcactgcctctttggtggggaaccccctgcctgaacacatcaaggtgaccgtgttcatggacggtctgcgtgtcggtcctgcccgcacgcaactgttccgtgtgcaagcaaacactatggaggaggcgattcagatcgccctccaggaggagtacagccacaagcaggctcgtacccccgccacggtatggcagagcaaccctgcctctggcggtgcgcctaatggtaactccggcaatggagcgatcaacgggccggttcccatggatctgggcatggccgagcagagcgacattcgctgctacggctgtggtaagcttgggcacatgaaacgtgcttgtcccgcgggaggactgaagaacaagttctcttcgaagccctatggctctaggggtcgctggcagaagccgcgccccaggaaccaggggaacgccggacaccagtaggggcggggcgccctactggggaaacactaagtcttcgtgaggggcgtgcgggtggcgcacgccatggggacttagcccctgagagtctctgtactctcgaagcggagaagggcagcggtgggctgcttgtggtgcacgcgagtgtaccgggatacgatcatcccttgagaatcttgatcgactctggggcgtccaagaactttgcgcgccgccagactgtcgcacgcaatcccgacaagtacgccgatgcgctacgaggcagcaaaggcaacgggctggtctcggtaagactggccgacggtacggtggtagaagtacctcgggtccacatggacctcactgtcaagttcgaggacttcgacagcacggagccgttcttggtcctagacatggacaagtacgacttgatccttggcatgccgtggctggagaaacacgagccttggatcgactggcgcggcaaggccatcggggccagccgtcccccacgctctgacagagctttcgtgagtcatgttcccacctctggcagcagctggagcgcccgcgagggccgccagggcgcagcagcgtctaatgagttcttggggtccgtcgagactgacgacgactccgaccgggccggacaaggcctgagagtggaggtgccggacagcacctaccaggtgggtaacgtaggtccacacgcgggtaacgaagtaccgcaggcagcaagggctgctggagaaggtgccgctggcgttggcgtgggtaaccaagttccacgcgaggtcactcagaccgtaactgatgaggaaggcactgcaggcacttctgatgtgggtaacatagttccacaggaggtcgctcagaccatcactgatgcggaagtcgctggaagcgctcctggtgtcggtaaccaagttccacacggcgaggtgggtaacatagttccacccagcaaggcgggtaaccaagttccgctcaagaacaaggcgggtaaccaagttccgctcaaggacaaggcgggtaacgtagttccgcacaagatcgagaagaccggtggtgccgtcaaggcggcgccacgagacgaagacacccgagagtcacgtcgtaagccgggcctagtcgtgtgatcgacgacgccagtcgccagcgactccgagcctccagccaaggctccagccgccgaagagtgttatcacatcttcgacggcgtgaccggtcgtcgggtcaagacaggagctgtcgagcttacagctctgcccgaggtttcagagttgctgaaccttgaggagctctcaatggaggacttcttggccgagctaaaggccggggagatcgcagagttggttctcctccgaccggagtccacgtcggccgtgttgaactcgtcctcggtcatggaccaggcagtcctggaggagttccagagacagcgcgcgtcgcgcatggactctgagattcttaagaacccccgggacccggtgtaccccttggtgaaggagttcgaggacgtggtgtccaaggatccaccgtccaatcgccctccggacaggggaatcaggcacgagatcgatctcgtgccggggacgaagtactgtgtcacgaggcaatggccttttccccgggagcagtgttaagtcattgatgccttctttgccgccaaggcgaaggcgggcatggtgcgggagtcgaagtccccgcactcgacgcctaccttctgtgttcgcaaaccgaatggaaagtggcgtctggttcatgcttataacaagctgaacagcgcgacagtgcctgcgcagacaccgatcccgcgcaaggacgtgttgctcaacaacatggctggctgcacgctgtatagcgcgctggacctggtggacgggtactaccagatcctgatgcgcgagagcgacatcccactcacggctgtgagcacgccgagcggtaagctctgggagtggctggtcatgcctcaggggctttctaacgccccggcaacgttcaatcgcttggccacacaactgttccgacctttgcgtgcgttcacacagacgtactttggcgacatcttcgtccacagccgcgccgtggcaggccagacggccatggaggtgcatctccagcaccttcgacgtgtgttcgaagtcatgcgggcgaacaagctgtacgccaagtgtgtgttcgcagctgaggagatcaaggtcctgggctgcttcgtcagcagcgccggggtctgggcggacccggagaaggtgaaaaccatcgcggcttggccgccacctcggtcgcagaaggacctacgacagtggttgggcctcgccaactacctgcacaagtatagtgcaggctacgccgagctggcacggcccttgtcggatctcctgaagaagaatgtcgactggcgctgggagcgtcgccatcaagatgcttttaacgacatcaaagcgagcttacagcgcgcgccagtcctcgcattgccggacgagacgaagcctttcagcgtagtctgtgatgcgtctgactacgcaattggctgtgcgctattgcaggccgacgatgaaggccgcgaacgggtcatctcgttccagtccaggcagctcaaggcagccgaacggaactatccagtccacgacaaggactacttgccatgaagtacgctcttgtcaagttccgagtgcacctcctgggctcgacgccctttgtcgtttatacagaccacgcgtccttgcggactgccgtcaacacgccgcatctctcacagcggatggcgcgttggctgtcattcttcgcggaatacaacttccgtgtcgagtacaagacgggcaagttgaacgtgcttgtcgacgcgctgtcgcgccgacccgactacgagcttcctcatattagtcgggtcacgacggatctgtatgatcgtatcaggctggggtaccgagacgatgccagtctcgaacctcttgtgcggttcttggccgctggctcggaagccaaggccgagtggctcacgccccgacaacgtgcaaggctgcaccgctatgagtgggctgacggtttgctccactatagggtcgagcccgaggatcctccccgtattgtcgtgcccaacgacgaggatctcaagtacgacatcctgatggaggcgcacgacgctccatccagtggccatctcggccgtgagaagacgtacgcgtctgtctcgctgatgttttggtggcgtcacatgtacaagtgggtcgccacctacgtccgtacgtgcgagacgtgccagcgcgtgaagcctgccggtcacgcctcggcaccattgcagagcctgccggtcccagcggactgctggaagtcgatgagtctcgactttgccttcggacttccggccgatgaccgtggcaacactggtgttgttgccttcgtgtgccgtctgagcaagatggtccactttgctccagttcgtgacaccggcactggcgacgaggtcgctcgcctgttcatggactgtgtcttccgacaccacggtctgcccgagaccattgtctctgatcgagacacgcggttcaccgctacgttctggcagacgctgtttcgccttctcggcacacgactgtcgatgtcgacggcggaccacccgcagacggatggccagacggagcgcgtcaatcgcgtgctcgaagacacgctccgcagtatctgcgcggagatgccccgcttttgggctgatcgcttgcccatggttgagttcgcactcaacaatgcggtacatgcatcgacgggctttacgcccttttacctgaacgggttgcgccaccctcaggtgccgctcacattacgaggcagtaccggggcttcggtcctaagtgggggagaggctcggaaaaccttttcctcccaagtctcggacgtgagtccagccaccttgcggaagcaactgtcctcgtttgccgaagacaggctggacataatcagcagggtgcgagacaccatggcgcaagcccaagataaacagaaggagtactctgaccgaaatggaagaggaaacatgaacgtgtttaaggttggggatttagttctcctagatactagaaacctaccgctgaggccaccgccggccctccttgatcgtaatgggcagatccgctaccacgtggaccgagtcgtccgggagcggcagctccatgacaagcgccagctgctcgtgaagtggagcggttaccctgagtcggataactcgtgggagcccgttgagcagctccaggcagactgcccgaaggctgttgcgatatgggacgagaagcagcggcagcttcgtaagtagtccttggcttcttggccggtacccggggcacggttgcagacgtagtcgcaccacgcccacgctcttcacgagcttcggctctcgcctcttgcttcagctcgtccatcttcgaggcgacctggaagctgaacgcttcttcgccttggcctcggcggccttcgcagcggcagccgctttcgacgcttgggcacgctcacgaccttgtgccagcatcagatgcttggatgccagcacctccttgggcttggagcccgcgtcgctcggcgacttctcggccacgaccccagcgtcggtcacagcgacttcgtcgtgcgactgcttgctgtcgcctgagccggactcggcgtcctccgcctccttctctgacaaggcctttgcgtcggccgaggcgttggtcatgtcgcctgccgccagctccgtgccttcggcagcgtgcgtgctgccctccgagacgttctcgtcgtcgggtgaactctcaccggagtactggaccatcgtgcagtcaaagacggcggcttcccagtcgcgagtcgggcttttatggccccgaggactctcctccttgctttgcgcggcgtcaggagacttgctccgagccccggcctcacggccactctcctgcgtgctgctacgagagcgcaccacattctcggccgccttcgtggcctccatcagcgcggacgactcgtccttggccttggccgccctggttatcggccctacggcccgcggtttcggaggtgctttcgcactgcgctttggaggcatgcttccggtcgacgtggagaccctgcggcttgctcggcgatgcgccagttgctctgtgaggcccgggagccaaggcaccagagctcgcgccgttgtcgatggatttcgactttgcgagtcaaatgtgagtcgccggcgtaacctcgctctgattggtcgataagatcgaatctaagtgggggaggatgtaacggggttacatggaatagtgaccctgtcactattccgggatggctacatcggtcactcccctggatagtgactcaagtggcctcagagccaacagatacattttgtatgacacaaactatagggaacttaggatttgtatgcaggccaaatctataccaacctataaatacattcagtcttagatctaccgcttttcaagtcaagtcgtccccttcagaccagggacacgtgaacggctgttcacttggagtttgtatactcctgcttcctctgttaagaagtgctgtgtgccccgtcacaatcactctgtggatcttcgatgtttggtgtaaaagcgaaacagcgcagtgcaaaatgggtccaagtttgaaagtgcaacttgaagttacgtctcgtcacagggtattgattggcttgagtcgcgggagatcatcactccgaacacgcattagccccggtgctccaggttgcgcttcacttaaagcgacaggggaatgggcgataccgcgtttggatgcgtctggtaccgaagccgcctagcacaggtgggtctcattccgcaatttgcaacatgccgggtaagcgcaagaagccccccgccggctcgaccgactcaacccccgtctacacgtatcaaagcgtcaagatgaagctcaatcagctctgcgacctcgacttcctgaccgacgagatccgcacgatggcatcggagctcaagctggtctgtttgctgcgatggaagattgctggcatgcacgtcctgcggtatctacaagagggcgctgccctgccggccctcgactctaacttcttctaccggtgctgcagcgcctcgctggatgaaacggagaagagaacgaggaacagcccagagtatccggacctccacccgaccttcatgagatactgggagctgtgcgaacgacttcccgaatacctccccccaagcagcgtcaattcgggtcccatgaggcgcgcgatggccgatacgatggagacgaacaccatcaacatgctggctcttcactttcgaaggagacttcaccagtacatccggttccgctacgcgacgacgggcaagctccaactcggctataaggcgacgcggacgctcgttgctggctgctatcgtgtcaaggaagtcccccacctcgacgtcgacggcgtggacaccggcaacgtggcctatgtatgggacgaaccaagatccactgcggagcgtgagctccgcgactggcttggcttcgtgccctgggagtggcgcattcgccaaaacccgacgcactttatcgtgaagctatacgacatgctccagtagatggaggcatttgtcgagaagcacccaaagacaaagggcgcgcgtctctactccctgctcccttactccagctcattgatccccgcaaacgtgacgctaaacattacgtcgctgcatcaagtgttctaccgacttttcacggaccctgagcgtcaggcagaagtcaagacgtacgtgaaggacgagcttggtgtggaatgcggatctacagagcaagttcgccgccagtttagcaaaaacaaggatgctgtttttcggaagatgtttcggctaaatggacttgagaccagcacacgggagttcgcgtaccaaatcacaacggatggctatgcagcttccgttctgctgcgccaccagacgcctcgccgcgaggatgacgacaacccggaccagcctcgcaagcgccaaaagaataataaaggtgaggtagtcatgctccggaagcggtcgaggaagatgccctcgaagcggcgatgaagaagttgccgcccggatatgctcctgacgtcatgatcggcatcgaccccggcgtgaggactctgtgcaccgcggcatgtgaaggtagccttccaactcggcagtcgcgacgccgacgtaatcgacaagggaagcgaaagcacaagaaccgacgggcgaaacacaagcgcatgaaccgacacgggcagcggatcgtcgccatcaacacccgcgagtactaccacatgtccaagattggcaaacatcgcttctggaacaacggtctgcgggagaaggaggcttcgtacgccaagatccttgacggtatgccgacgttcaagacagcaagatatcaagtctacttggatcgactgcggtattttctgaagcacgcagagtacctggtgctgttctcggcacagcactccttccggaagtggcgctttttactgtaccgcatgaaaatgaaggcaatcgacactctggccaagcggcttgtgccgaccccaagtccacatgtgtgcgtcgcattcggggactggagctgccaagatggactccggggcaaccctcgcgctccggtgaaggcgttcaggaaggcgctggagcggcgcgctactgtgctgccgatggacgagtttcggacgagcaagctgtgctcttgctgccaccagagccttcgcagagcccgactgcagaccaaggtcaaggataaggagaacaagatcgttttgaagggcaacagaaacgtcctgtactgtaagaacagtcgctgcagggcccacttctggaaccgagacgtcaacgctgccatcaacatttttttcagagataatgcagcgatgggggcgcagtcaaatcattttcggatacgtgttagctagtcgagctccgtgttgtagctggacgaagccccaaccagtgtaactgggctgacacgtgaccaggcccctcttccatctgttccgcgagtgatcttgttgttgcctcgttcatcctggtgtatcgctcgaacgcgtcggaggaccatcttccgaataatttgattgtgagcctgtcgaccccagccgcgaagagtgccgtgagttccgaaagttgaagggtctgcccccgcggcggcagcggcacacttgattgcttcagccagacgatttgcggcgaggaccttgccggtaccggtagcacagagagcttcattgctgccgaaaatgcgagcattctgtgctagctcccatgttgctagcactgggcacagccatgcagagcccgatctgtgtagtgttctcgtagccccggccccgacttggtctgacttgctgccgcggaacttgatcgagactgcagccaccttgtcgattgagcgagccggggcctcttgcgtggagaggaattgcacgtcgttgactcgaataatgtatgccttcacctttgtaccatccgcgaggtactccgaccgcttcagtagaaagaagaagcccatgaccgcagccccccagagcacgcggtcgtgggctgactggaagttgcatcttctccgtatttcgcgtaggctggccattgtgactggttactttggcgtggaggtggtgacaaccgctgcatcccccgcacggccatgttgtgtcccgcgtgcagcccgaccgagtatcaggggttacggatatgataccaagacacatggctgatcgcggccaacacggtattcgctgagaggggttttcctgaatttgcccagtagtggacggcaaacaacgcaagctggtaggagtgctcctgcatgtcggcgggaagccacttgcagtatccgttcgctgagcaccacgctgaccatcgtttccacgtggcggcgtactttggtcgggactgcgcggccaatgagtagtattgtaattgagcgagaagtccgtgtagatcttgcgtagcgctggtggtactggaatctaagaccacgcagacgataagttagaccaggtgtcactaaatggtgatgtccacgctcgagatccggcatccgccattgtgtttatcgccccaggaagatgcccacacgaaatacgaaagccaaatatcgcctccgccagtccgatcgctcggttaagcacttgcgccagtggattggagctcgatagccggtttgtccatgccacagccgaagtgttatcagaccatgctctgacaaagatcatgggtttagctggggttgacgcccactcaggtccaaatatccacgccgctaaggccacacatagatgctcccggacatttatgttaaatccatccgagcctgatgctgcgtgaatgcgtgcttgttcttcttcatcaaatcgcacttggatgtattgctgcgtggcgggattgaagacggccaggccactgttgctggcgtccatgtaaagatgaacatcgatgggttgttgatccgtaaaccttgctaggggtagctgttgaagccggccatgagttaggatcatggtaaaccactgcagatcacagaccatcgaattctcgacagctattcttccatagcgtggcgctcgaatactcgcggcatgtagtcgttggtagaatggttttgcggcgcggagacacgaacaaacatggcgtagacttcctaggagttgctgcagctgggttcgagtgatgtgttgctgaattgctaatgattgaacccgaacaagggctttagcgattttttcgcgaggcattgacaccgtccgtgcagcgatgtcaaacaccagtcccaacacttgaaggcttgattcccacgagctaaagttgtcttcgttgattgctccgggaccgagaatcgctagcatcgccagtcgtagcgtttcaattgcgagaaatagccggtttccggtgtcaggttcgacgaggacatgatcatcgacccattcgtaggcaaaaatgggtcgtggtcgcgagaggttttgtccatggaggcggggctttcgcgactaactaaccacgtgatggcaccaccaaatgcgccataaaaggcgggagaacttgtccacccgactggagcggacatatccacgatcagtacaccaagttcagggattgtggccgccatccagcgaacatggccgctagccagcattaggtggcggaacgctcctttcacgtcgcccttcatgatcattatagcggctcccttgtatcgagcgtggcatgcttcaattcgtttcgcgatcgcagccacgtgtttatactcgacgtcaggacaatcttctgttcttgatgcatcgtttgtcgagtgaccgcgggggaatgagaggtcatgaattagccttacttcgtcttcaggagaacaatcctttttcggtactgcgccgagggggctgatctgaatattttcccgatgccgaagcactttagcatcgagaacgaggtactgccccgcatcttggcccttgcgaatggccctgatgacagcgttgaaatgtcgagatgccgatcggtggctttttaatcggtttcgtttgagaggggtcgtgctacttccaagttggttgaataccagtgcgggctatctgcaccaagaggtccttgtgtcggtagccatccgagtgaaacgagacggatacattgtcttgttcgggcgaaaatcacctcgctcctggtctcgtaccagttcaacaatgtcttggaggcgcatcttgtgttcacatgccatcgccgtagtaacacgctgcagttccgtgttaagttggcagtgaccgttgctctggcggagagggacgtctcgtgggggatctaccccgagccgcgtgcagaatgcgttgaacgcttgcacttggctagctacacgtgctgtcgcccgctcactcagtatccgttggacgtgacttgccatcgacttcggctcttgtaaggggaccgtgacggagttcagcgtttgtcgcggtagcttcgttgcgtatagacatagttccgggcgcccttcacgttgtagctggggtgctggcgtagcggtgggactagcacgcgcgcgagctactggtacctggcgcattgttccgacgcgcagctgagccgttttgttgctggatgtgattttgcgcgggtcgagcttgctaagtatgggcaactccgcaccgctgttctggtaaccaccatttattctcggggttttgccggcaccactggtacgaacaagatgccgagttggtgactcctgctgagccgtggcaggtaaaccaggctgtgttgcctgacgggggccgtgaaattgagacttcagtggctcgagctgagccgtgccgagcaaactgctacgacctgaagcacgagaccggtgatgtcgggtgcacggaaactcaaactgagtcaagccacgcgagctgcgtggattgcactcctgagaccgggggagtacgcgccgcggggattcgagctggaatatccgggccagcgtggcgttgtaggcgggttgtgagctgatgtgagctagttccgcgtcgtgttcgttggagagggtagcgggatgctctgctcccgacaaggtaactgggggtacgtactgagaagccgagtctattgaggcgtctaatacgtgatggtccacactactctgtccaaggtcgcaaggaccatcgcttcctggacgtcttcatgtggaggtatacttgctattgatgccgccgaatctgtggcggatgtagcctatgagcttctccgtcagcgctgccgggaagaagtgcactctgctggcgtagtcgcacacattcgggtcgcttgatggacagccgcgctttgacaggaacttcaagcagacttccttcccatcctgacgtggaattgggatgtcctcaggtactttcctccctttgttgctaccgtgccgctggggacgtggtggccgtggttgctcatcggagcgagtggtgttgcagggagccgaccgcgtcattgcctccatcttttctcgctgagcggttagtataagcccgtgtagctcgaggttgtctggaataaatcgtgacgaaatcaggtttcttgttgctgtcccatttacaccgtcgaccgccaccgcgttcctgtattgctcgagttgtgagtcgatccacagtactagcgtgagaagcatgtcctggggccacctgtttcgactcttgagagcaccgatgaagttgtagagtgtcgtggcgagttgttgggtcaccacatcacacatcaccgcacagtattgctgaaaaccgatcgcaccggccaggatgtcgtcccacgacgaggggtccgaggctggtagaaacttggcagagacggagaaatcactcatgttcacgaagctttcccgctgacgcttgagccgaaccaaatgatccacaggcgtaaagtgtagaaacgaaagtccacgacttccaaactggaggtcatacgcgcgcattgcgacaccggggtaggcccacaacaggagctcggcgttggacaccattgaatccatacaagaggcgggagacttacctttgtaagcatctgaggtgacgatgtcatgaacttggcgttgctcgggcgttggtgcaaagctgattttactccgtttggctgtccctctgtcttccgctttttccgctgggcgtttagctccagtggcgggcactcggcgagactccatgaggtggggtaggaggtgcggtttgtgcatccgcattagatccagaatttcaacttcggctgaagtctcggtaatcattcgctctgctaccaccggtacagccgagcacggtacgtgcccgctttggccctgttgctccggggcaggccccgcgggtcttggctgagtatgttgcgagcgattgatgggcaccaggcgcccttcatttgcagcaccgttggtgccgttcgatattaaagcttgcgcgagcacggcttcgtctgccgcggtttctgcatcgtcgtccacggcagtcatgtcgaagaatgcggtggtgtcgggagctgcagtagccgttccttcatcgttccgacttcgtgtagacgaacccacgctcgttccaacgggttgggttgggttcaggtcgcagaaagaggaaccaaaggaggattccatgtccaccggagcatttttcccaccgtcgatgtaatatacgtagttgattacatgctgaagcgagactcgggcgcgctttcctgtgcaagggacgatccaggtgtacattcggtcgtatgcgggtgacgcttcgggtagcagcagtccatgcatgagttgggctactggccgtcgtacaagctggatttaacaggcgatccatgatggcaccatgcatttcgtctagttggtcgtaactccagctgtcaagcgggaactcgtgacaccccatgaccattgctaccacgggatacaccgagtcgcagatatcggccttgttggtctccaccggacctgacttcgtgctgatgatgagttccgactcggagggtcccgtgacttgaccgtagcagaagtggccgtcgatcttggcacacacatcttgtcggacccaggcacatagtttctcgccttcggcatccctgctgtcgacttttcttgccagagcagtagctcttggcagcttcaccgtaggtccccactcgtcgccatccgcgtcgagcagcgccgtcaccgccgtgcctctggcgttcgagatcttcgcgtagaccggggaggcgatggacccgttcaggtcttccgggaagacgaggaggtaggaaccgcgagagagcaaggatgcagccatcttcgacgtagattatctgcggacggtttgtgcactgcgaattcgcgttaacggttgctttccttggaagcttgtcagcttctagcgcgttgaaagttggaaaatgactgcatctacactacgccgacgtgccggccttgaacatggagggtgagatggtctattctgcgcgtactcgccttcttatctccgaaaatagccttccctcgaattaactcaggaaaccatccaggagcttctcaagtgcaggctgcttgacctgggggggctggcagtattccagcggtaatgacgaccaaggtttttgaacttgtgagggtaggttgttgtgtgggcatgcgctctgcgcattgtcagcgcaatggggttccgtacccgagcagacggtgtggaggagggaaactccgatgacacacattttttttagtttcaagtttcaagaagggatttttttctcttttggaaaactaaaaagctaatgcacgatcctaagcatagcgtggctctagcggccgtggagaccgccgtttccgctgcgttagccgcggtggtgcacgccaccaatccgcccatcaacgagacctctcctcgctcccccaaacgccgtcggttgtcgctctcaccgctgcaaattgacgacgttctgttccgatcaactttcggcatgaagcgctcgtccttcgactggatctgcgcgttcatcaaccgtcagtggacgcaaatccatcgccccattagcagcagctccagattccagctgcaggaacgcgtggccgtcgcgctttactatttgacgcactgtatcgagctggagcaggcagcggagaagttcgacgtgactccgagcgctgctgagcgctacgtgtggcaggtggtggacgtcctgctgtcggacggcgtgaaggctcagtgcttcacttccccatcgagtgacgagggctggagcagactcagcgacgggttcgaggccatttgtgggtatccgaactgctgcctggccgtggggggaatgctcgtggagattgagcgcccgagacggtgggaaggttggtactgccgcaagcgctttccggcggagaacgtgcagctagtggtggatgctcagtgtcgagtgagagccatggatgtgcgacctggaggggttacggacaaggagacgttgaggtactcgcggtttggccggagcttggcggagattcttcccgagggaaagcatgtcgtcggtcatgcaggatacgcactctcgaagcatgtcgtggtgccttatccggtcgacagcagcatgactgaggctgaagagctgtttaatactctgcagtcgacgactcaacgtgtggtgaagagaacggaggagatgatcaagaaacgattccagattcttcagaagccgctgcgacagaagacgggggagggagatgctgccacgacacaaatggcccaggttatatcgactgcgattgtgttgcataacattttggtggagttgggggatctagtcgaggtagactcatcactggaagacgatacggacgaggaagacttggaagaggactcggactcggaggactccgatcaggacgaatgcatggatgatagcgccgccgatcagcgtgatcgcatcaaagagtatctgtatgtaaaccgacacatcatcagcaaacgtttcggctgacacaaagtggtgttatgtgttggttgttgcgttatgttggagatccatgctgagttcccagcatgtaattctaaaaagagtcggcatcttgggcattacagggtctatatcgagattcccatgtcactaactgtgttcgcttgtctgtcagcaaaatacttggagcttctagttatctcactcgacctaagccgtatgaagcatgtcacaccaacaagtatcgcacctgatgagatttcttcccgtcgcgcagtttcgcggttatggcgggcatttctcggctgggaacttattccgcaaggcgtgtggttgctctggatcagtattgcgagaagacttcgctccttcgggtggttctagttgccgtgttcatgccacttcctgcgctgctcctggaaattgcatcggaacttatcccactgcgtgatccagcagaggggtggaaagccaacactggagcttggattcggctttgtgtactcatcacatcgaccgcggctgggtccctgtttcaagttcgagcaacaacaccagagctttcctactgcagcatattcaacatttccgttgcaactggatgtagctctacactgacgttggtactgctagggtttatcctcttccgttcacgcttttgctaatgtgtatcccagcagcgattttcttcgtgacattctttttgctcgcaatcaaacataggggggcggagtcatcagctcgattggaaagccacttcaacggaaaatctttctcattctcgtccaagctcagctatccttcgtgtacgtatcatttggcgtcatatttgacaaatgcactcatgcgcagcggttcgtgctacttctgctactccccttgatgaagctggctctgaagaattttctggcgaaactcgcgtctgacaacgtggaatccatccctgctgtggtagtcttcactgttgacatctttaatgggttgtgcacttcgatctgaatgcaatcgtctggatcgtggtggacgtcactcgtcatgattgtcctgaatgctgcgcacacaatgctgtcaatgtcggagataagtaatgccaccatgccgctcatgacggcaacccggaaaagaactaccaggcagctcaaggcaaagagagcaagggtagctccgagta

SEQ ID NO: 216 - DNA, 20621 bp, Phytophthora sp.
  source 1..20621: mol_type = other DNA
aaacggatgcgcccgttgtcgtggtcgacccgcccatcgatactattacggagggtaccaagcaaacgactccgtacaccgaggctccgactactgagctgccggaagggaccccggcagcgaaggtggactctcctgatgtagaccttctccggcgcaggcgttacgatctcgctgctgccaacgacaaagacgactgcacgccaggctggtaggcatcgaaacgaggggaggttgcaaccccacatgcatatttctctttatactttagccgtccacgtaaaatgaatgtccagccttctcgatttcatatctaaattgcctcgttagctgtcattgagcagaagcagtagccgtgtggtagtctcctcgcaccattggtctcggttgtgccagcttggtggggcttccagcaccgcacgattgtgttggtcgagtgggcacttgttctctcaattccgggcgataagaaatgccaactggccgaagctgcatatgaccagcgttaactcatgataactctcgtagcagacccccaagttgtttcgactggtaggggtgctctagcatgtgaacgtgggggggggggggcacgaaaggatccgtgggagatactcgcgttatgaggcgctagtcgccacatctggaagcggcttttgtgggcttgctctcgttggggcaccccacgctcccgaaaaccagacaaacgaatgcgaacgacgatccccatgtggtcgacgcctgtgtccataccaagccgccgctatacgcacttgcactacgcagactgacggccccaccgtcaaagtcactcttcaattgtcctcctcccacaacaacctccgcctccataatgacaatcacacaaacttcgctcgctctcctggtcattgccgctgccgcttccaatggcctctccgacgccgcaaacctgcgccaggcgcagcgcaacctcgccgccacctacagacagccaagcgactacctccccgccatggtggcccgagtcaacaaggagcgagctgctgtcggtcttcctccggtctgcgcgaacctgaagctgcagtcttcctcccagcgtcactcggacgacatggccgaccacgactacatggcccacggcggaacggacggctccacgatggagaagcgcgtgacggacactggttatgcttgggacagggtcggagagaacgttgctgctggccaggaagacgtcgatgcggtcatggacgcctggatgaggtcgccggagcaccgtgccaacatcttgggcgactacaacatgctcggcgcctcgtacgctttcaacgaacgcggcacgtaccagcactattggacgcaggacttcggcaagagcaaccgcgagtcgtgcagcaatccaggcagcatggccccgaactcgagtcctaacactcctggccgtgtccctccaagcaacagcgtacctcaaaacaacggcgtacctcaaaacaacggtggcgcccccaacaaccagacccccaagcagcaggaccaagagcagggcgaagctgaccccgcagtgcaggagaacattatgcattatcctgaagcccggagcgctctgagtgcgaaggagctggaggccgacctgggcgttgccgtctcgccggtgccaaagactgacgtgcacgttgtgaacgcgaagactccgtgccccgcgggtgagcggtcaatcgaggagccggtcgtccaatccgacgcggagaaggactgcgatcccaagttctaagacgataggaaagaagtgctctgtgttcctcaacgtataatatagctgttgttcaacatactctaccttggcaatagtacttgcacctctaatcactaccatgatggctgtcgtagcctacgaatctaccggtagttcgactcgcaggcaacgcaagtcaaactgcttgccggacgatcgcaatttggctgcaactcaaaaagttatctgacgcacttattaatataataatacatactgtaaaacctctaattgtgcccctggggtactaagttagtaccccacccacgcaaggggggtggggcactatttgagggtagtgcccagctaaatgcccccacaaagaccgaacacgctgctactacataaactacacagtaggcaaatactactttctgtgctatttggtgcagttttggggatagtcaatatatccagagtaaacaaatcagcggctgctatcgcgcagctgcgtaagataaacttaccttcggactggctggtaagataaattcgtttttagaaaaaaaatcagtggcctcctgtcgccagtccaaaaccctccctcctcccccgcaggccgcaagcgatcaggtcctgaccccgtggcatggtgcgtacgcgtgagttagttcatgtattccctgcttaaggctaacctgtacgtatccataccctatgtcaggccccggacgacgacatagctgccgatggagctcgcgatgtgaatccagaagctcctctcgagatggtcactgtgaatgcaacacccagccaagcaagctcagcccaagctcctcccaccaccgatccacccccactcacgccactagaagaagcagaagcagagcggatacggcttcgggcgaagaagcgacagcagcaagaaaacacagtgccgaagtctagacgctcccccacgctgccaaactgacgaggatcggccccgaaacgctgaagcggacccggcagacagtcaatcccgtgccgaccaagctgagcgttgggagtcccgcctggcccgtcatctggcagctgacaacgaggacgaaagtgaaggtgaagcagcgctagcggaagtattggcgcagcttgaggaagaggatgaagatgagtctccggacaacagtggcgattcggactacaacgacgatcgacgaacacctgagggcgatgacgatggagactcctgtgacggtattggacgcgctactgacatcgattccgctgcgaatagtgtgccgacaccgcaccaaacaccgaagaagcaccaaaacccgaaggcgaaccaaaagtctgtccagtgcgaggacgaagaatcggaaagtcaaggtggtgtggaagatgtaccagtcgtcggtgactacttggaaggatttcctatgtactggtcgtcgtggaaagtttctacgaagctttcgacgagctccaagaggctacgtaccagcgcttctcatcccgcacaagtacctcaattaagtccaggaacaagcaaattgctgccgcgcagaaagaggtcaaaaagaaacaaagtaagccgaagacgagaaaggttcgcgcccaccgacagagcacaggtggcacactattgccagagtcatgggagaaatacggcagggacgttcgtgtgcactcatgctattccgtacgagagtcgtggagaaggcttgcggcagcatgacgccgtccgttttgtggcgtgtactgctcgtgtcaacgcacgggtttgtagtcgaccgagtggtgttggatttcatatcgttgtgaatgcaacgggaatgcacagccattctctcaccgaacatcagtggtataactacgctgagaacagacgcgtcttgggtccgtcctacgccgcgatgtggcagtcatgagcaaggcgggggccaagccacgagggatattagcgtatcttcgagccaaaacaggttggtggttttggtgtgtattctgtatattgcacgaaacactaataaaatttggtttggtgttctataaaggcaagcgaacgattctacgagacgtgcacaacatgatccaggacgctaagaagtgctttaatggaggtcgaccggatgcggagcgcgctgtctccgtgctggacgaattctgcgagatgaacactggaaatgtggcggagttcgtcattgacaaggagaccaacgtggtgcaagtgataacgttccagtcagcgcggcagaagcgtctctttgcagccttccccgaggttgttctggtcgactcgactcataacagcaacgcgaaccgttataagctgtttagcttcgcagtccacaacgtcttcggccgggtgggtaaatgctttcaggctctaacaaaaatgtactgaacatttgtataattttctgtgtggtttattttcttagggtcaattcgtgcaacacgcattggtgcggacggaagagaaaccgaacttggctcttgttgtcgcagcattcaaaaggcacaaccctgagtggtccaagatccgtgttgtgatgtcggataaggcactgcatgagaaggaggtgctgttggaaggatggccgaatgcgcgccagctactatgtcgttggcacgtcgaaacgtggttgaagaaacagtgctccagactgggagacgtcgggcctacagaaacgaaggaactcaagtcaattatgaaaggattggtgaatgcggcatctcaggagcactatgacgacctgaagaaggctctgctcgagacagtcgggaataacgacgaaaacctgctctacaaaagttttatgaagcactgggatacgactgctgacgagtgggtgatgttcaagcgtggtgacgtcccacacctgatgaacaacacgaacaaccgtctggaatcggaatgggccgcctcaaataggttattgacggtagtttcactgttgatgagctcctctccatgctgataacaatgcaagattacactgaagaacgctacctggctgatttccatcgtgtcagcagtcgccctcccattgctgaagatccagagttaactgcagtggccatgcatctcagcaactacgccttcgagatggtggcccatcagtacacattggctgtcggacctcaggcctgttacgacatggagacgacaccagatggcaaggcgagagtgacaaacctagcgacaggcaattcgcacgttgtagatgctcgggtgatattttggttcaattttggtggtttggtaaattttcgggtgctgtgactaacgctgggttttgttctaccaacagcttgctgcatgcgactgtatattcaggcagacctgtttgctcccgtgccgccatgtcatgtacgtccgtgccaagtctaactacgagacggtagttccgccaatggttcgtttcgctacccgttggatcgtccaaagtccagctaacaacatcgatgaggggcctgtactgacggggggattaaaccgcatcaactgcccaccccgccgtgccccacgagcactatccagcgacgcgaagtacagccaaggcaaacatattacagagaagatcatcgatgtcctctcgatccagccgtctaccacacacaaactggcaatgcagtggcttacgggtttctacgacgcgctacatactggcaaactggaggagttcactggccaagatctgtgtgcaacaagcggcttcaactcgctgtctctagtctcttcggttgctggtgtgacagcatcgcagctttcttttgctgagatgagcagcgcgcccgaagacgagtcgaagtgcgatgtgacggcagggacggaccttgaagaaaaagcgcccgtcccagtagccgcaccaccggaatcgactaatcaccagacgactatcacaccgtctcagcatgagaatactgtaggtcgaagtccagcggatcctatcaccttagcatcgccaccgaagcgtaagggattgacgcggcgtgcggagaagcacgaagcgtcgaccggagagctgcaagttgcaaacaagattcggttgcgcatctcagaagggagaaaggcgcgtgccgttaagctctcggacatggcgattcttaaaggcccgtacagcagacgcaccaccatgtcgttcatcgaaaggttgagcttgccatccgtggaagtggctgggaagctcgacgttcgtagcttcaacattgggcagcccgtcccagtgattaaggcgattcctcaactggaaaagatcgaggaggccatagaagcaatcgaaaacaagagcaacaaggcgctgcttgctcggtgggaggactatgggtttgccacgtacgggtaattgacgctcatggctcgagtgatcaaggcacgaaacaacttcaagttagtcgaagatacgatgaagtggattgactccttggcgtttcgagttgccagtattgtgtgccgttcaaagacatggaggacgtgactaaggtaagatttccttgcaccgaaagtataccaaaagtatactaaatcaccaaacttactgatgtgctttgtgtttaggtggaccataagcaagcagtagacgagctgaacctggggcggtggtacgttggccgacatgaacaaaatggctgtgaattcctggcttttcgagagaagctctggctgcactcggggtctatcatcggtggtcttttggcactccaatccgagtatttggatgttgccattgtcaaccctcgctttcacgactttgatgatgctgatcagaagatgtgcacagcaaaaggatatggcgctgcgaatgccagggccaagttcgtgtaatgggcctaccttagctcactactacggcttacacgtatgccacgtgtatgaggaagcgtaggtttcttttacttgagtaagtatactcgagatccacgagtatactttaaacaagataaagactccaagtagcgagttttggtaaaagatgagaactgctatttgtgttttatgtttctgacttcctctaaatgtaatattctaaactaggaatctgccaacggctggttggcaggattctgctaacatgcaagtcactcattggctaaaagatgctgctttcagccaataggaatcctaaatgtgtatggaccacccgtcgtggtggttgtaaatgtatgtagtcattggtgtaccttacaccaaggtcgaggaagtgttcaaacctctaacagacatcgcatctgttagagtaacaagtgactgtagccacttgtgcgtgtaaccccgttacagttcgtcatcagcgtgattaacttggggcaccacgggggtgcatttttcgtggagacggagacgaagatctgctacctgtttgaccccatgcagctgactagcaatttgtccgcgctgaaggaagcagttctcactgtggttgagaagatgctggacatgaccgaccaactggactaccacgtcattgcccactaccaacagagggatggtacgtcgtgtggcatttggtgcttggtggtgttggaactactactgtttggtgcaactcctgaaacctggtctgactactggaaggactctctgtacgaagtggtgggctacttgaggttgcgctacctacggaaggtgattagcttgcagcttcagcagccccagcaggtttagtaggcaccctaacttcaatacatatctttggtagatgatttttgtgccagatcaaaacaccaaagtcataccgaaactaagggactttgttagcgtttgtggtagttgaaagtagacgccactccaaatttttgaatattaatgtaccttgtattttccaatactataattaagtgctcctataggtactcatcctcatctgtcacagatgttgctgtgaaagagagcattggctaggatgaatgaccactataacctatgctgatacaacgcacaggaatacgtaaattactggctccccgtaatatattcttgtagacgacaagcctcgcacccattatttgaagctatcatttaataacactttctgtagcagcaacacgatcccacctaaaattgtcgatcaacaactgggtgcatcctgaaatcacattttagatttgtgacgcacatttgtccaggttatgatacatttactacgtgattatactcgacgttgctgcctctacggagaaaaatagtactgaaagtaccattattttgaggctacttgagggtatccaatgggtttttgtataggatggtcacccctcttggcaaccccttttgacaacctcattttattgtgccttttgtttaatttgccgacagcaaaatcggacttcaagtccgattttcatttactaaaacaagggagatagtaattcgttatagtatagcttccccgaatatcggagttcggttttccgtgctttgctccttcggttttgctctcgttttcattcgaggtcccgaatggcggtgatttgttcgccatctgggacttcggctcgaaaagcgctatcgctttccctcgctttcgattggaaagcggagtcggatcaccatccctccgatttttcaaatcgggggtaggtcccctttattttaactcgtaaccctacctcaatagtaaaagtgatagtttttgaggtccgtttagccaaaaagatgaaaggcacaatacgtcacaaatttactccactgcttgttttctttcacttttgatacgagaccaatttgtgatttctggattttttttagctgtaagtgggtgcatccttttaacattccttccaaaatcagttttcatccctgttttacatcctaatcactcattactttaatttaatttaagttacatgtagctgtgcggtatgagtgagagcaacgatggtagctgtaagaatagaaaagtgtggcatcccaacagacaacgcatacatcacccttctcatgttagacaagtatttgaatttgaatttgttgcggtttaatcggctacctactcccggagacgcatctccgcgtacggtgatcgtgtcgctagatctctaggatatgagcccgcggtaggcgcccaatatgttagacaagcaacaagaaacttcacgctgccaataattccaatactaaggttgggaggggtactgtactaaattttcagtggagagtggggtactttaagagggtggggtactattagagggtggagtattacttgtaagtccccacccaaagtaatcaaaaatgagaggtggggtactaattgagggtggggcacaattagaggttttacagtatttagtccaacataccaaaaatggtccaggatggacaaattttcctgtagccatctgttacttttgctcagaccattcgtccaacgccggtgatggaggtagggcgccgccgggattgaactcacaacatacctgtagaacatagctcgttagaccgttacaccatacaggcgccccggtcatcgtctcttcgggctgggacttgacactgtctgattgcatattccaacactccccctcaatcgagagtgtcaggacctcctgattgcgacctatcctgcagcttgttggtccgactccaacgccgttgctgcaatgacctccctgggtttaaggccacccgtgtctccccctggaaacacattccgttcacagacacctcgtgttgtgacacgaaccacacaaccatcactacgatccacattccagcaaccattgaccatctgcgttctacgcgcttgggaaacgtattccttctccatgttgtaggtcggctagccgtgcacgttttgcagagtgtggaagacactccgcttggtcgaaatgtgccgcaggaccatttttctggcatctactgcacccattcgcactcctcgtccagcacaacgttcgttttgcgtacgctgcggttcattaccgtcctcgcgaacccgatttacgccgagtcctctacgatgcgcttagtcaacatttgccacacggccttcttcgttacgaggatcgacgatagcgatctccgctaggatgacgatgacgcacaagtggcgccaagtttgaaagtgcaacttgaagttgcgcctcgtcacagggtcttgatttgtgagtgaccatcactctgtggatcttcgatgtttggtgttatagcgaaacggcgcagtgcaaaatggcgccaagtttgaaagtgcaacttgaagttacgtctcgtcacagggtattgattggtttgagtcgcgggagaccatcactcagaacacgcattagccccggtgctccatgttgcacttcacttaaagcgacaggggaatgggcgataccgcgtttggaggcgtttggtaccgaagccgcctagcacaggtgggtctcattccgcaatttgcaagataccgggtaagcgcaagaagcccccccccccccgccgactcaacccccgtctacacgtatcaaagcgtcaagatgaagttcaatcagctctgcgacctcgacttcctgaccgccgagatccgcacgatggcatcggagctcaagctggtcggcttgctgggatggaagattgctggcaagcacgtcctgcggtgtctacaagagggcgcttccctgccggccctcgactccaacttcttctaccaggatgaaacggagaagaggacgaggaacagcccagagtatccggacctccacccgaccttcgtgagatactgggagctgtgcgaacgacttcccgaatacctccccccaagcagcgtcaattcgggtcccatgaggcgcgcgatggccgatacgatggagacgaacaccatcaacatgctgggtcttcactttcgaaggaggcttcaccagtacatccggttccgctacgcgacgacgggcaagctccaactcggctataaggcgacgcggaagctcgttgctggctgatatcgtgtcaaggaagtcccccacctcgatgtcgacggcgtggacaccggcaacgtggtctatgtatgggacgaaccaagatccactgcggagcgtgagctccacgactggcttggcttcgtgccctgggagtggcgcattcgccaaaacccgacccactttttcgtgaagctatacgacatgctccagtggatggaggcatttgtcgagaagcacccaaagacaaagggcgcgcgtctctactccctgcctccttactccagctcattcatccccgcacacgtgacgctaaacattacgtcgctgcatcaagtgttctgccgacttttcacggaccctgagcgtcaggcagaagtcaagacgtatgtgaaggacgagcttggcgtggaatgcggatctacagagcaagttcgccgccagtttagcgaaaacaaggatgctgtttttcggaagatgtttcggctaaatggacttgagaccagcacacgagagttcgcgtaccaaatcacaacggatggctatgcagcttccgttttgctgcgccgccagacgctttgccgcgaggatgacgacaacgcggaccagcctcgcaagcgccaaaagaataataaaggtgaagtagtcaaggctccggaagcggtcgaggaagacgccctcgaagcggcgatgaagaagttgccgcccggatatgctcctgacgtcatgatcggcatcgaccccggcgtgaggactgtgtgcaccgcggcatgtgaaggtagccttccaactcggcagtcgcgacgccgacggaatcgacaagggaagcgaaagcacaagatccgacgggcgaagcacaagcgcaagaaccgacacaggcagcggaccgtcgccatcaacacccgcgagtactaccacatgtccaaggctggcaagcatcgcttctggaacaacggtctgcgggagaaggaggcttcctacgccaagatccttgacggtatgccgacgttcaagacagcaagatatcaagtctacttggatgaactgcggtattttgtgaagcacgcaaagtacctggtgctgttctcggcacggcacttcttccggaagtggcgctttttactgtactgcatgaaaatgaaggcaatcgacactctggccaagcggcttgtgccgacaccaagtccacaggtgtgcgtcgcattcgggggctggagctgccaagacggactccggggcaaccctcgcgatccggtgaaggcgttcaggaaggcgctggagcggcgcgctactgtgctgccgatggacgagtttcggaacagtaagctgtgctcctgctgccaccagagtcttcgcagagcccgactgctgaccaaggtcaaggacaaagacaccaaggaggacaagatcgttttgaagggcaacagaaacgtcctgcactgtaagaacagtcgctgcagggcccacttctggaaccgagacgtcaacgctgccatcaacattttggagctgctcaagtgcaggctgcttgacctggcgaggctggcagcattccagcggtaatgacgaccaaggtttttgaaatatgtgaggataggctgttgtgtgggcatgcgctctgcgcattgtcagcgcaatggggttccgtacccgagcagacggtgtggaggagggaaactccgatgacacagaagccggtacatttttttagtttaaagaagggatttttttttccttttttggataaataaaaaggaggtggagacatagaaaaaaagcaagcaatggtgtacgacgtaaccgtagacgagtccagcgcgcagcagaacatggctggaatgaagtttagaaaaaggaacttgataaaccggtttatcaacttcgtcggcgcggggtttcaaagtttgaaggcggtatatcggtatttgctgttcaaaccaatactcttgcaaaaccaggaagtgtaacggatcgcaaacggctcagcttcgcttcctggagctcctatttgctcctcgcgcagatataattggcttcggataaagccgcaccctttcagtaaggtcgtggagaaaaggcaaaggcacgtacatgtagtttcctcactcttggcaccttttcccggcagcgtatccaagccgcactatcgttccaacgcaagaaaggcaaatggcgacagctgcgtacgccacctgcagcttctaggacgccgtggcgcgtagcaacctcaccatctttgctggagacgtcacatttcaattgtccctgtttcgagcacccctatcgtctaccacttctcgtcttcaacacttctcccggcccccaagctccacaacttcgttgtccctgaatcacatcaactctttgagagttcgccttcgctcctcgtgcttttatcggtaagtgctaaatgaatgccggaatcagcttttcgctatctagattgctctctctctctactaatatatgtagcgggccgcgccacaacgcgtgactacggcaaacgggcggtcaaataacccacttcactgtcgtcgccagaagcggtcgggttgcaagtgacgatggaccaactctcttccagtcgtgatttcaatgctgaaggaccagcctccactcgaggtgctcgaggtgttgatacagcaccatcgtctcctgtcgagtatgattctgaagattactgtgatgacactactgaagtgacggctacacgaggctacgcaaatggccagcagtcccaagtggaatctgctgttgctggagcaagaggagggcctgcccaaaacgtcactcacaactcagcatttgcgcgacttccgttatcagaacaagcaaggacgtcagcatcccaacagatacccttcacgcaatcagcacccccaataacttcgagtctaccctgcggtgatttccgtcggacgacttcgaactccgtaggacccggtgctggagctacgacaccaacgccgcaccagccacccgacgttactggccgtgacttttgtgagtggcctcccgagccgacggcgctgtatgatgcagacgatattgctcggatcccagcatgaatccgtgaggcggtactccagtttaggccaaattaaacgtgtacgccgatgcctctgccccgaagccatcggtctattacgttcaaatatggagtccgcgtgaagtgctggttccgcgaatcccttgttgtcgggtggttgtgcatggcaagcgatgcgtgccgtcgggatatcacgttcctgcccttccatggagaaaaaccactaatgctacaaagcacttgtgggagacgcaccaaatccagtctgaaaagacgaccctacagaatacgcgtaagcgggaccgcgctgaaggggtcaaccgcattctagcgtccgcgttatgccgtgacgatgcgaagcgtttgtgtttgttgctggagacgattcgaattgtctacaacaacttgccattccggtttggtgagtacgaagagtcagtcattctgaaggaagtcgtcacaaaagatgagttcaagacaacagtgaactcaagaacggtgacaaattcacttgtcgagttgtacgcatccggtcgccaagagctgatagggttcatcagagacaatcgtttgggacttatcaagtgtttgacgatggttgttgacttctggaccccaaagcatggtggcgaaaagtatctcggtttgcgcatctacttcgtcgactcccacttccgactgcgtactgtactcgtcatttcttgcccatgtatggagaacgcgaccaagggattcgcggcccttttgagcggtggatttgcggtattctgtttgactttggcctgtccccgagcgacttcttcggctccaccactgacagcggccccgacgttaaatggacgatgaacgaagggcttcgattgaagtgggaatggtgcatccctcacaaggtgaacgctgccaccaagatggcctgcggcttgacgcgaaaatcgcacaatcccgagatgtcggcgttgctaaacaagctatctcaaacggtgtacgacacctccaccaactcgacgcttggcgatctgcttcccatgctgatgataatgttgggggaaggcaatggtacccaactagtaggctacaagccgcatcgcttcatggggatggcagccacgatggagcgggttctggagaagtggccagctctggaggcatggtacgaggcgcgttcagctcagcatgcacggaaaaagaagcgagcgccaccagggtttcaccttgccggttgtcaacagcatttggtgcagctattatcaatccttacaccgattcttctcgtgacgaagcgatcacaggcgcaggatacgaatcaagtgcaagtcctgctgtccttgtatacgatgtgcatgacttctctcgcacttgacagccccatcaggcgctacgacacggctccgtcgaacgccgtcaatattcacccttttcaactaacatcgctggtggcgaggacaaggatgctgctacagaaggcgttttaccacaacttcttccgccgatatgtagacattgtatccggttcctacatttttgagatgcaactggtgatgtatccttcggttaagcacgtggggagtccgatggacgaagtgattgccgccgttgcacgtactgaagggagaatgcgggatgatcttgttgctggtcatgttgtcgccgtttgagctgcaattatgaagcgcttgaagtcgctaatgcgcttagtagccaacagtcaagacccagcacccgttgatccgattgctgctccagctgtgcaggccaatgttttcgatgacgacattttggcaacctttgcagttcaacccttccgaagcaccgaacgacctgctcaacaacgtaacaagcacgatactctcatcgccggtgagctgaaaaggtggctagaagattcggatgggctgcagatgataacagttcctgatccagccaagacgagcgtccgcagaccggagagtatcctggaattttggcatcggcagcagcagtccaagcgctatgtcttgctacccatggttgctcgcatcctgtttgcagtcccatcttcgtctgctcagattgaaagggacttcggcaacagtgggcaaatggtgactgccctgcgagcttctacaagcacggctaatatcgacatggcttgcttccttcatcaaaaccggtcatttgtcgatgtgtgccagtgcccaaagctgaaagcatccgaagtcgacgaacacattccaagcaatgtcaagattaacctggaacccgaggtagtggagcgaatggaatggaatcagctggcacaagcgtgcttttcgacatcaagcgcaagcgcatttgcttcttacaacgaggaggagacgaaagactcaagctgttagtttaaacgagtaggaggcgaaagactccagctggtagtttaactgcttcatatattcaaatatattcacctagcatattcgaagtggctttagtagtcaattccatgagtttgtcaagtccagcatgggataaacattacgaatactgcagcgcttttaccttcgcttggtgtgatttctccagcgcacttgcacgttcggcagcgcgtaatgctgtttcgagtgtcagttccgcgcggatttggtccagtctcgatagattggccacggcttgcggcttcgaggtttgagctgcggttggtttacgcctcactttacctgctccagctctaagaacgcctttggggtgcaatgctggctgatcgttgctgtaggaagtcttgcgaccttgtcgaccttgtcgacctggggaactagctgcttcatgatccgactttgcctcgtgcagcgatttcattgttgcttcgatcgagttcctgaatgaagtcatcgcttgattcacctctgcctttattcgggaatccataatattctccttgtcttgaagaatactctggttcgagacaacatcttgctgattgtggccctgtgtagccatctccgcacgaagtttcacaaatttacgctcctgcttgcgctgcagcttgtttagttttgcgtcaaaacgcagctccactatcagcaacaagtttttgagatccgctgtctagattctgtctttcagcgcgcaactgggcagaaatcaaatcagccacgctggagtcacgctgttgaagacgttcatcgacataggctttcattaccgctgtcgctttattattcaccgctgtactgcacgactccatcgctatctgaaagaagtgctgcgtccacgacttcgtgtcctccactttgcagtccaggtcactcatatgcgcctgcatctcggttcgtatcctctcttctgaagccccttactacactgtctcgcctgcacagctaattggcgctcgacttctgcaacgtgatgttctcgctctgcacgaaggtgagcttgaatatcgttctgcaggctgcgtgtctgaacttgaagctcttcattaagtcggtgtgatgcttgaataccttctaccatctgctcgttcattcggcgctcactttcttggcgggtctggcgcaccagagtttgttcttccgtcctgcgtctggcctcctgcagctgaagctccatggcttgacgctcgatgcttccgtccaccagcaccagatcttcttgtacggataggtgtttctgctgatccttgatggaaatgcttcggttgcgcctcgcgtgtggcgggtttccgctttgcagagcttgatcatcgtcgtggagctcacttgtgtacgatacaagaggcgcgtatgagtgctgcatactgcctcgactggtgagcaagatgcaatggcgttcacggtgcagggaaagataccgtatttcgcatgtagaaagctgcaccggcatatgagatgcactttgataactaccattcttttttttacttgctcaaaaggatttatctcattttctttttattattattgtttttctttttaggctggtggaacagtgatctttcgctaaggttcctacattttcactttggtcaccgcacgtcgcatgcagagcccgggatgacttcagcggccactggaccgctgaagtgctggtctacgctgcatctattagggtggtgctgctgaaggtgcctccccatgctacgtctatttgccagcctgcagacgtagcatggaatcatccgttcaagacttggctgcgcaggttttggctcgaggacatccagcggcaactgatgcagccgcgcgacgcggaagccaagtttaagctgactccaccaggccgcgccgggatgtgccattggattcgcgctagttgggagagcctgagctccgacaccatcgcgaatggatacaagaaatgcgacttacacctcaacgaggagtgcctcgccgccgcgtcgctggtggcagagctgcagaacctatcgctagtagggccagtggccaaggcggtcgaccaaactcaagacttcgaccgcaatgtcattcttgacgaagctgtggtgtagctttcttctacaatacatattttgatgcacatcgttttttaaaggtatgttttctgttgtgaacatcatgtgcagctttctacatgcgaaatacggtatgtgctctggtaaggccgcgcacttaaccgagaagtgcccgacgtctcacatcaaggctatccagccaatgggagaagctaggcatgaactcgtcgtttcgttctctcgaataagttaaaccttcgttcgcttcctcccgcttaagttttcatgcgtttgaaccttaaaacctcaggaactgcggttcctgaggttaatggattcgtcagttccgtggccagccatgcagcagaagctgctgcgcgacgcgcagtcgacggacgagatggcgcgcctgctcagccaggagatctctctgtttcagcgcaacatgtacaaaaaccacagccagcaccggcgcgccttcttcttccagaacctgcagcaggtcaagcgccgtctgcgcgatttcaaggtggagaccctcaccggctgctttgcggaggctgcgggcgtcttgaagcaactggagctcgacgcaggagcgcaccacatttcctggaagctgctggcctccgacctcaaggtcggcacggacgccgtgctgcgcaagctcgtgacgctcacaagggcggccgccgaggtgatccgagcagctcagaaggcctacaaaggtgcggaactgtagcgtttatactggtgtgctgtgtgtactgagctgatttggtggtggtgtgcttctgtgtgcagctttaatggtgcagttcgccatgacgtacttcatgccgttcgcgctcatgatgaacagcgtcctggcgcggttgacggtgctgttcaagacagtgatcgtgcgggcgatcgagctgcacggaggcatcacgctgctgtatctgaacgaggtgaccaagtcgaacccgctgcgagccaaggtcactgccgtgcagctccgcgggtaccagattcccagtgacattctccagctcgccaatgcgtagattggacaataagcattaggtacaggcagaagcgaggagtaacacacgtcgtaaaatacatgatatagacagcaagccagcatgaatccaacatactacaggtatgcggtcgcctcgtgaggtatcgggaacggggactgcagacaaaatggagcagctttgttgcgcggaagacactggcgactactgcgcagtctctaatcacgagctgttcgggggagtggtgtagccaacgatcgtcttgtggaactccacgacaccctgtgagagcagtcaactcctccaagtcaatagccgattccgtcgagactattttcaataaaaccacgcacctgcacgctgaggtccagtactcgtgtcgtcatgtcctcatccatttccacctgcacaccaatagtacgcatcgtgggcgctgcgcaacacaactccagtcagcagcatacgcacccccaaatcccagtacgctccaattcaaagctcctcaccgctacaggtacacgacttcttggagagaccacagcgattacacttgtagttggatggcacgagtggacacacgtggcccttcttgggctctccacactgcagccagccagccatacgcacagcaaattagctcccagctccaccctaccagcacccgatatcttcctccttcgcaccttgctgcagcggtagtttcctcggttccggttctgctgcgtcttggtgctcaggtccaggtcgaagctggcggcgtccagccccgccatggccttgttgccgtcctgcagctggtccatgaagccgcccgtcgggtccgccatcatgggcatggcccctatgccgtagtccatcatccccactacatgggaccgagcccaaaccgtcagttctgcacccaaatcttacatcaagccacggtcattatagtacgcactgccattcacgtccatgggcatgttcccgttcatcttgcacgcgctcggctgaccgaagcaaatgtgcgtcttgcgtgcgggataaggttgacgagctgagaaaaatttcggccgcgtcacaccacgtttacaccatctacctattcagccacatactacacgccgcatgccgtagcatgggaattgagccatccgccccaagtcagcgactccatccaaagactcgagccatgtccttcagcttcggccagaccagcggcggcggcagctccggcggcttctcgttcggcgccagcagcgccgcggcgccggcctcgacgtccactgcggctccgagtggcggcttcagcttcggctccacggcgtccacgacggcgtccactgccgcagccccgagcggcggcggcttttccttcggcgccgcccccgcgacgtccacggcgccgtcctcgggcttcagcttcggcgccggcgccaaggccacgagcgcggcgcccagcaccagcagcagcggaggattcagcttcggagcgacgtcggcagcccccgcggaggccaagagcagcgcagcgccggc

SEQ ID NO: 217 - DNA, 21011 bp, Rhizopus sp.
  source 1..21011: mol_type = other DNA
gttttccatttttcatctactgaatccattacaataatgggtaattcagttactttgatatccataatatttaaatccattttaaaaaaaaagttttttttttctctctgttgaaggataaagaacatgagccttcatttttttttttttttttttttttttaaaaaaataatacctttacaagtcaaagagaagggggaaaaaaaagagacacgtttgaatttttttatataaaaaaaataataaaaaaaaaaaaacggttgataacttattttctttaggtctgtctcttgctttttttttttatatatttttttgttttttgtttttgttttgtgtgaagaaaaagaaagtgaaaaatgagaggagaaatttagaaataaagggtttttttattgcatcacatgtatttatacccgaatttgacatcaaagtggaaggaatgacaagtgtaacatgttaataaaagagtgaaattcattcagatgacggatgtcctatcctttgagagaatacaagacttggccatgttcggttacactcttttgcgtcatgattatcaaaaggaataggtttaggagcaatttaaaatgatcaagtagttgggtatttcagacaaagacctcttttccccttacagaaaaatattgtattttgaacatcagtccatgaacctcttctttatttttgggataaagactctccccttaaagcttatgaccaacacattgagtaatcggacgagcgagtgttttattattattttttttaatgaccgagcttcatgtccttttcatcatagggtaacatagatacctgtaccttgccatcatttcgtgtacacattcactttctcctacttgtcccttgttttctaattgttcacaccacttgtttatttctcaacaagtcaattttttttttttttataaaaccattttgttttcacgcggcgatgtgttgacaaaaaagaaaaagttgcttttctttttttttttttcaaacagaatggataaccctgtgctgcaagtggatcatctttcttcaaggggagccattctttttttctaattatcctaaattgacattggtttaaacgcgagaattttgactcaatgatagcattgtcacaagatagtgccacttgatgctgcttatttgctcagcatcatcaaatcattgtcttgctttggcttcactcctacttttaatgatagatagcatctttcatcgcttttttttttctttcccgaaattctaccccagtggccactgaatatgatttaaaaaaaatttaaaggttttatgacaagtatgctttgatagcaagtgaagtttctaattcaactttatattttaaagcctgtgaaaaaaagatattttctcttaaaatatgaatttagacaacttgacacaggctactgctccttgctaacaagcattttttttaaggggaaggagagatgaagatgcccgcgttttccttatttactgctttcttccctcgtttgtatgcaaaaagcacgatgacctatagattttatattgaacaattgactgttgccaagctatgcaaattctcaaagacatgccactgtgaaaactagaacgaatttatacgcacgtatgcatttctcaaaacatcattcaacctcttttttttttttcaaaaacctagtcgtcttctttaacctttatctctcttgatgtgtaggattcctttctttttattaaacgtgcaagtcatccgtgagtcattgttcattacctcggagtgacgcacagcagtgtgtaatcgtgtacaggacaaaagcaatcctattctttttttatttgtttatttgttacttggctttatacatttattaaatacctgtgataaaagcatacacatttatttatatccatcacatgaaacaaacctaattgaacaagttggtattcaatttgaaaacctttcacttgttcatgtacaggctttgtatgacccacagtttcttacatcaaacaacccggttttttccatctttacatctttactgaattcttacctgcgtcaccctacctgtctttctcacaaagggcaattcaaatacacgtaggatgacagtgacagtgtcggagtattctaatcatagatttacttaaaatggtaatcttcgtcagcattaaaaaatagaattcaatttatctttattattgggcaaaaatatacaatttagttcttgaggaggttatagaccgtaagagaagaagtaccgatgagagtaaggaagccaagataaccgaccacgccgcgtctacgcttgtcaggactgccggtagagtaaccgctggcataaagagcacgtcccaaaaggtaaacaatacctgcaccagccgagatctctgggtacttgaggccaccgatcaataaaaaggtggtatagacaggaaacatctcgagtgtgttttgatgagcacgttgaacacagttgaagacgtgcttgagagggtccttttcggcttcagccttttcagcgtaaactaaagttcatcttaacatcctcctctctgtgtcaacccacttaccataaggataaggaacctcagcagccttacgggccttaccgaccttcatacccaagctgaccaggtggaaagcaccaagaccagcaacaccgagaacctttttgttatgaataggttattcgccagaagaaatgaattgaataaaaaacttacgtaaccatattcagaagggacaatgagagcaaccatcagatatttcttaattttaataaagattttttttttaaaaaagaaaaaaagaaagaaagaaacagattgttatttaaatccttttctttcaaccaacacagtcccacaaggttaatttacagcgtttccgaatgaatcaaaatttcgagaaaataggagacagtatttttacgtggttttcggaccttttcaataaaatttcagacattttttttcgaatgatttccattttacggcggagaagcatcggtaaatcaaaacttgcatgctgatgaaaataaaaatgaacacgtagcccaaagtcaagatgctgacagttgctaatatgtttgttatgtctagtttcgctatacggtgaagtgataacagaaaccaattaataaaagactgtaagagactatgaatgtacaataacaacaagattaataataacactcgttcttgacttcaattgcttgaacgtgcaaaaagaatttactcggcacccaaaattaattttagcgggaagaaaagcctatgtttattacttgacaacaatagatactttggaataacatattaatataaaggtaattggggaaaatatacaattgtaaagaggatgatggtgattttgataaataaagtaaatgatgtatcaattgagtattcgtcttcatgttgatttttatggtgttcttttctgtttaatatgctggcacattgggtatcctgtgagggtagaaaataacaggaaagaaaaataatgttgccaattatgacatgtgttcattcaattctcgatgcggtgaagctgattattttcctttccctttattttcctttacattttcttcaataacgtctgttagagttatccaaccacaccgaaaatcataccattcgaatcgccatgaaaaggagcatcttttaaatacaaaataagctttaaaaatcaaaaaggaatcaaaggcgactatcgaccaaaatccgactttgtcagtgcccaaatgaatttttgtgatccttctagccccaaaactccaattactatgaatacattcgaaatcaatacgttttctggaaactttatgaatggaggtggatcaacaagcataacatacaacaaaaacgtaacgagcctcaacttgtatttcttgcctgttgtttatttttaatttatttgttttaaacaagcgtctgaatgaaaccacaaactctgtgcacctaccttgtcaaacggtttgtggttcccttatcttattgcattcatagtgctcatactctcttacatatgatgtgattgtgaccgaaggtcaaaagaagtatcacataatgacattcaattataaatcagatgaactacaccggccaaaactttgaaaaagtcaactaaatgtgtttgaggatttagtatactttggaacgtcctctgcgtcaagcaataccgtcgcatcggacaagtataaagcttacgaacaggaccaattaaaaaacaaatcgctttgccaacataatttactagaacccatctgcagccttttaaaaaataataatacagaattttttgttcaacaagtatggacttctggacgggctggcagataaagctgttgctttaatggaagttctacgatataccttgacctcgttccacctcgcattcaaaaatagttctctctttgtacaaaatcatgagagaacacccttcatagaaaatagtgtaccatctctccttgccttatcaaagatcgcaggctttgtcgagttcaagtggtaaaacaaaaaagaaaaaaaaaatttactaaaaaatattctaggtgtgaaacacagtttacttcatgtacttggatttaaataaatctgactacagcaacagtacgatgaagtacaatgacactcttggttacttcaaaatgtttaacaacatggaaatcataatggttgaagcttcgaggtaataatcacagagacaactttcaaaatcctaattccttttttgaatagtgggaaactccgagagaacacagtacatacgatcaaagattgtctccagttgctggcgtgtggcatttcctctctgaggaaagaggcaatcttgaataaaaattcttcaatagctacgtttaaaaagcttaaggtttttggcgtgcaaaccattaaaaatcaagtaacgttgtccgagctatctatgaatacaagctggaactttatagaaaaacaaacagcaacactgccatcttcctgggatgaccgcatcttacttattcaataccttgaactgatagccactatcttcgtacgtttagatcccaccctactctaaaccatttcattctctgattttgatttttttttttacatgtaggatgatatttgcgatacccatcacttgttgaagctactgatggaagaaaacttggggctagcttcgaatgaggatcccacattaagaactatatttgagaagtaaacatatgttaaaggaaattgcaggatatgtagtttatgatgtaagatcatgttcaataaaaaagctgttttaccgctattcaacctgactgtacaggttagaatgtaatctttagtagctgtctgaatccaagtgaatgtatgagctcaatacttataaagaagtctggaatcttgtcatcagtttcactgattcgaagctgcatactgtctgtggttaagagtaaggtacaaagagaaaaactgttgaaggagggagattgatgagaatagttgatacttataccagcgcctatcttggaggaggatctttgaggattttacagttattctaacgcaaaatgacaagtagggttgaataaagaacctctccaagatgacacagttattcaatctttattttttacttgtgcagtttgggatattttctttgtgcaatctttttcgcccagtgcgcaatctacttccaggaatggtgtaaatctgaatacagtcaacgcaacgccaaagggcgggtaataaattttttcagaggacggatttttaaatcccaaggggtgggagtttttttttctcaaagcgcggttttcattttttcaaaagtcgtttttttttttttttttttttttaaagctcgttttttttttataaaagatgactactcgtttttattatgaagacggtcgatggaatggttgatgagcaaggagatgatgctatggactgacttgagaaagccatcccctttccatttaaaaactttaactcgtataagagagtactgtgaaaagcaagaagatgaatagttatcgtctcaagagggcctaataaatcttgatatggaggatgttataaccacagttaaaaagcagacaaagagttatcatagatactctaatgaacaaaagcttctatttgtgtattataacaaaatcaagctattcaaagcagctaaatccgagcgcttagcaggcggtataagcgaacgaacagcacaaacatgggccaaacaactcaaggaggataaagattgggatattttcgagaagcagaccaatttggttaatagaccaagaccatcattagatgataggcacaagcttcaccttctcgacttctgcgaccactgaccacaagcacgcataattgatgcagtggacttcctcacacaaaacttctctgatcctggtgtgaaaaaaagtgttgtccataacatttttgaaaactgagtgcaatctttccttcaaaaagctgacaactcaaccagctgctagaaatagtccaaccaaaattcaagattgtaaggattgggttattaagtggaatgcaacggactatttgaaaaattgtgtttttattgatgagtccgggtttaatatcaacatgaggccacctagtgaatgggcattgaaaggaaagccagctgttgcagagactcctaccggcagagctgtttctcacactgtattaggtgctatcacggcaaagtttgttgtttctaaaaagaatgacggagattgtgttccctgccatatatgaacgtacaaaaataataacaaacaatcagaaggaaaagtttgatgcgtcacataaactaattacgatccctgaaaatagctatgtaatggtaaaagtaaatattaaaaccaacacgttagatcctaactatgaaggaccttataaagtaaaaagaatgactcaagatggatcgtatgtactatagaggtgactggtcacaagcactgcacagctgcaagtaaattctcttgacaactttatctgaacctttttcgacggaaccaacatccttagggaaataagaaaatctaatacccgatagcagcgaaatgtttaatagtggttactaagactttctctacatgtcagatttaacttataaagcgactttcaaaacaacaagtacttgactacttttgtgataatcctgcttcagactggacatttaaaagatataaaaaaatattttagtgacaaagatcctgaaaaaatcaagaaagtttttgcggaaagcttacaaacggttaaagatgactcgaaaaacatttcgtccatcagcacatcaataaactgatggtgtcttttaatcctgcttcaagcaaatctactttggctaccaactctgcttcgagcatacctagctcttcggctgttaacaatatcacagtatgtagatccttgtttatagtatcatgtttactgatttgtatattctatctttaggtgaagggaaattattacaacgtaaggacttgaattttaattatttgaactattcactcacataagttataggctggtagagatataacgataaacgagacggccaagagagatagcaagaaacaaaaggtaaactaatactaaacgacattctttgcccgttacaaacttattactttttattagaccaaccataacgacaagaaagagattgaagaggttgatttcaagcaaaaatggattgagtttttggctgatgccgaacaaaacaaaaacttccatcggtataggtaaaatgaaacaatgatttgcttgaaagactgttattgatcttgattatagtccagagaagaatggtgagacgcgtttgggtgcgaaactatcgccacaccctcatgctaacaaagacacttacagaaaaatgaagatgcagttaaaacaacatgaagcaagtggtacttggatagatgtaaaaagttacattcgtagtctggttgctgcagtaagtatttttgatattcaaatttttgagttgaacttcaatcagctaatatgttgttatttattattcttagtctgacattgatgagttcgaacagaatattgagaacaaagaacttgtagaaggccaagaaaagacacgcagatgcatcaaggatatctgtaaagtcatgtatgtacaatatcatcagagtcatttcaatgatgaactaattttttgttggatttagggccaaggttttttttgaaaagaccatcaataacacgatcagaggctatatacaacaccaatatgatatttccttgtttcgaagctgtccttgctatgatgaagaagaatgggcatgctccttattttattcctggagaagatgagcttgaagcaatgactgcccagctgaaaaaaatgggacaaaagacagacaagcgaaagatatataaggctgatggcatcattcgtttggaaagatatatgaatttagaagttcttattttggaaacagcaggcgcttttggtcatgaagactatacaaagacagcttttgacaactcaaaaggcatgtttgctttgctttcgatgctaaagacaatagctgatcgatataaacatgcatcagttgaggagtttagcaagctcaagctgtattttgttcagccaagcggtaagtggtattaaaagcaacatttttttgtttgtgctaatgatattgtttgcctccaactaggctaccatatccgactgtggtcgatgcaatatgccaaaaatgggctctatgattttgttcgggaggaaaaaatcttgcgaagtgaagactttagtaccagagaagagcagctggtatctctggtcaattttttcttgagcctgaaggtatagttctaatcctaaacaatcgagaagaggagcaataataacaagcttaatttaattgtttagagccgtcttgaagagatagtaaatacaattacagctttgaaaggccaacacgaagagaacgagaagtactacgacagcgggaattatagccagataatctctctttctgacataatatgtccctggatttttaaattgagtttcaacactcatggacaacatttttcaaaggagcacctaatgagttcacctgaaagtgatttttaaattttctttttggttttttcttttaactacggctattcttaaaaaaacttttgataacccctaaatatataaaaaatttgcccccccccttatggaccatgttatgacactatttttctaactggcagcaaatgaaaattttgcgttgaacaactttgtgacaaaagagttctttgttgaagtttttctgagtcttgttctctcaaagggtggaaatagcacaagactgaaggatacgaccaaaaactataggcgattgctatcgaaatataaaaaagcttactttgaagacgctggttaaactccccaaagcttaccataagctcagcaaatagccttgtacgagtgtacgaagatccaaacggcctactataatagcatcaaagctcattttggaaacaggctgcgtggtttgataaacaagttatttaaaaagaaggaaaaggcagagagtctcagaggagaaatgcaagcaaacaagtctagtagtaaagcgataaaagaagctacccgaaagaagatttatggaccttgcaatcaggtgaagcttgccatcgcaaaaaaagagatgcctgaagttggtcttttagatgaccaatcaagaacgcaattaaatgattttctctcaagctactcagaggactacacctttcaaaagaactcaatttactatgacgttatggctagtccaaaaaaccatttcaaagccttcttcagacttgctgaactgtctgaagctgaacagacgaaacagtttgcttgtttcccgctacgtaccacctttatttcttgccacatgacgttggatagcaaaataatccattaccatgttctcaagagcaaaaagaatccaaaaacaggaagcaagtttgagacatagggtgctatcatagacctaaataaaagatgtccgcgcaccaaggatttcaaaagcctttgaggttccaaggaattctcgaaacagatggagtcggtgtctccataataaagcaaaacactgatacaagcagaaagtcgcctaagcccaacgctgaaaagaaagtggacggtaatcaaacagagcatattgaaggactagatcaagccgacttaaagagcgctgaaggcaagtgcgtcttgatagacactggaagacgggacttgatgtactgcatgaaagaaaccagcactgttgaagaaaaacaaacacttatatttaccaagaacaaccgctcaaaatgctcaaggcacttcagatatttaagaaggcgtgctcaaccttttgtggtccagaaagccgaagcaatcttttctagatctaaatccaactctgtagacttgaaaaagtttgtacagtacattaaaacaagagcatcagtaaaaaccattttgtacgaatacagtgctcacggcttcaaattgcgtccaaaaaaaaattcattgcgcatctttaattttcaaacagcgcatctttatttggtcaaattgcgcacttgtgatttctcaaactgcgctaataaaaaagtcaaactgcatattttacaactcaaattgcattatttttattcgtacctaagctattatctctttaaaagcaaatatcagatcgataacatgtactcaataaaaggaaaaattatttttgaagatggtcaaggaaatgtttttgatgagagcgggaatgaagcaatggactgggatgaggaagttgatactcataatttggagaacctaaccaacctaacacgctatttgaataagcaagtacagccggaaatggacttagacagtctggattttgttgaaaaaatgaaaacaatagagaagaaccttgaagagaaaaaaacgaaaagcaataataaaaaaaatctatattctgatgaccaaaaaaacgttatttatatatcttcacaagataaaattgttaaacgcagctgaatcggctcggagagcgggagtgaaagtacgtacagggcaagcgtggtctgcaagaatgaaggaagatcctaactggaatatatacgaaaagcaaacgaatcagaacaaaattggtacaggtcagctacaggagaagcataaagcttttcttcttgattattttgatgagtatccttcagctcgagttaaagatgcaattgatggccttacggaaaacttcgaaaacttctccttgaaagaaactgttgtgggaaagtacattagagaggattgtaatttaacaataaaaaaaagttacccgccatccacatgcaagaaacactgacaatactcgtaaagaaagacacgactgggtgaaaacttggtcgaaaacagatatggatttcaatagtaattgtgtctttattgacgaaagcgctttcgacattaatatgaggccaccaacagctagatctgctcgaggtacaccagtcataattactacgccaacaacaagggctataagccatacgattcttggtgcaatatgtcctatgggagtcgtcaacatggagatcagagttcctttaaaatcaaaaagaataaaagttgcaggaagccgcaaaagaaaaagtccagcagcgaaaaaaccagcaacaggtggcaccaattcaggtcattacgatagatttatgaacttaacgttggatgagatggacaagtatccggaaatgaaaggattttatttggttatggacaactcgcctattcatgacaaaaagagtggagagattgacaagatgattgaagattgaggctataagtgtgtttatctcccgaagtactcaccagaacttaaccctattgaacagttttgggcaagcgtcaaacacaaagtaagaagaagccaatttggtaatacagaggacctcaagacaagaataagcgaggcttgcgatgctgttcctgcacagcatatgaaaaactttattcaacactctgttaacgtgtttgagaaatgcttaaatgatataccgatttaaaagataaatcttttatataattcataatatgtagtatatgaaataaactgatgcatttttcttcctgacaacccactaacaatatgatgtaaaattaataaacctttttcaatttctctatatgggcctagatattcaattgatccgtatataacatttaaaaaataaaatactggtatataacctaattgttccaacaatacatctttaataaatcttataaattttacatcttttaattctgatctatgatccagttcgtatttagaaataggcattcatttgctatcagtttatttacttctttatttaaaatatctttgtataaactttcctcttcactttctgtcattatatattgatattcaattttttaaaaaacatcagcttttttatgacaatatatgattcgctacgctacgctacgatacgatacgctacgatacgcgaataaataaaagagttttattggtcaatttaagtataaatcgggatttttttcaacaaagggtatttatggatactgcaaccttttttaacgcttgtatgaatgtttctgttagaaatgagcggtaagttagatttacattgaaattgtgaatattttctctataacatgcaagaagaaattttagacgaaaatgacaaagagttttataattttgttgtcccaactgaatatcatcctggaattgatttgatcagcaaggtcattttaactgatgtacgagtccttaacgtcataactacagctattgctaaagcatcaaaacgttcatatgttattgaacctctagagatcccacataaacagtttggtgctgtcctatacattccccatggtcttcaaaatagtttacctttgatagtcatcaatactattacgacctttgaagaaacgaagtttaatcaaattatttaacaaagcaccaatatttttgaacggtataacacccttcctatttgtgtgatcatcgttgctcagcaacttgatgaaaaaattattgaacaaagctcccagcaccaagagctcccattccttcgagaaataccatgtgcattttgggcaaagcagtgtatattagtgtcatcaaaggatagtaggctcaacaagggtaaattaaaacaccatccattattggatattataattgctatcacaagcaatgaaaaagtcatgttatgtaatgatgaactataataaaattgtttatttaaattttctattatagacttcgtagactctcactagtattgaattgcttaattgactcaatattttcaagatgtcctgttttgaagcattctttccaattgattctcgttgtttttttgaaacgttggacgaaatcatataattctgcattatccacttcattctcaagttctacagtgcttagttgtcttcttttgttgagataaaccaaaggaggagtctcttcaattggcgttgtttcgattgcttcacagtattttcttttctgtcgtttcaagaattccaaagtagcttccacatagcttaatgactttttttttgacgcttcatctcctttttctaggcattttttttatctcgcgcagttggatttcactaatactacaaattttgtttatagcctccaatctttcagcttcttctccaactaactggtcaagattatcatgcgcaattgagtatagtaattttactaaagaatcattccttccatagtctaaagtactaatcaacaaagactgagagcaaaggaaatagccaaccgcttgcaaaggatgtaatattttttcttgttgtttcatctgtaaagtcgaagatgtcagtagcaaacaatgtttagcccatccagtgcttagtatctgtctcgcaaaggggaggtcactatctataggcttgctcagaaaaggtgctgtactacttccaattccaaatatcacaatgataggaagcctgttgtagcgttcgtatgtgagtgtgcagtattgaatggcacgtgccaagaatttgtcgtcggcttgattttgtacttcaactagtacagatggaaatgaactcaagggatcgcggggagcatagagaacatcactttttttttgttataaattctgtaggcgccgaaacatagttatcttctgccgcttctggcacgagagcttttaatagcatgtttatcacttgtttgtcggttaataccagtttgctgatcaaatcagttcctggcctgtgattataagggaggatgcgatcagtgtcatctaaacgattttatgtaagaaattatttgtatttttatagcatgtttacttacctttgtcaatactgaaatagtcagatgttatttttgaaaagtaaaagtgaagaaagaaaaagcgtaacgtatccgtattgtatccataataaaaaaaatctacccctcgtctggtttccaagttaagccgagatattcataatcgtatcatcaagctaaatcagcttatctggcctcatatattgaatcaaaataaaccattgggtgaagtagatgattcagcattcatcgatgccttctgttcgcagccccagtggattaattacaaacctaaaccatttcggttgtctctcatacagcgatctctaccatcatcggcaatgtcaccaacaccaacttccaaatggtcacttttttggaaactgcctatttcgcctgaaagccgatctttatggtatcgtctattccaccgtaaactctatagtcaatcacttctttcaagatttgataatggtttgacctcttcacactgtaaattttgctctgctaatactgaagacttacaacacctcttcgtgcgctgtcctacgaaatggagagtatggatagatgctttcaatttctttagtccacatctcactttcactcaagacaatgtatgctcaatcctttggtcttttcagcagtttacttttgttgacaacagtgatatctagactctcagctgctgtgtgctttccgttatccggcgtgcccattgaagatttactattgacgactttccttttattgataaacagctggtcactcatgctttgtcgcaatttgccaccctcaaaaggggcagactcgatcttgactagcatgttcaatcgcctacactctgttccgtttggttcataccgctctcagacgtgtggctcctattataatttataaaaataaactatttatttacaaaaaaaaaaaaaaaaatatctctccatttgcttacttttgctcgctttttaaattagccaatcataaatttttattcctttcccctcacttgtctatcgggctgaattggttgtaattttgacaacatacctgtcgtattactgttttctgaatagatgtacatacaggaactagcgtcacttgacagctgtccttagatgtaaagtcaaaaataaaatgcagcattttataagtattgattttttatgtcaatagaacctgcttttcatcatcaagtattgttttcttttattagagcaattccatgtttccaatcgcgtcttttgtgtttactttagggtgaaagagtaactgcaatgggatcctatattattatgaaacttatatttcaaaccaacagttaaaaagcgttttcctgggaagaaatctttttaaagcctatatatatagtttataaggaaaacatacaaagaatttttatctgcattatactaaatgtttgattgacacacacttattgaaacctgggtacaccggcagcaccagcctggtcaataaaacatgtgctcaacaacctaaaaattcacaaagtatataatgaatccaactctaaccaattattttcatgagatgtgtaatgtactgcttattttactacagttttttccttatctacaagaaatcatattttattacatgctatatgggttcaaggtttgaaaggacctctgctttttcgatacgcgctaatgtttattctgttcatttgtacaaaaagtacaacattttcaatcaatataaatatcatttgggataaatcccatattcacacagacacgttgattttaaaacgcacggtgcttttatcacagtataagaatgagaaatgaaaacatgaataaatgcatggtttatggattcaaattaaatttaattttattaaaattcaattactagtttgccaaattgattaccacgactacataaaaataaaatgttagtattttttttgttttccacgaaataaagtacgaacctcatagttaggatggcttgttcaaatgtgtttttatttaaacctttccaaacatgtgaaacaataggcctaatcttgtgtttttcgacaaattcaaccatctttctaaattctactcttgatcccatggtaactcctctgtaatcgatatttttgatgaagtaagatatcgggatattcagtccggtcgttacagtagctgtttgaccataacctacaacgatgccacctggtcgcatcagtttaggatattcagcataaagaggaccaccggcaccatcgatgactgcagacagcacgttattgcccaagagttcctttagttcctccatgcagttttctaatcatataatgtcaatattgaactacaagaatcctgaatttctaccatctttataattcactccgcctatagcacccagctcaatactcttttgaatcttttctggagaagaagatgtgacgtaaacatgggcacctgcagctacagcaaactgaagagcaaaaagtgcaacccctcctccaataccagtgattaggatatgttggcctttttgaactaagccctttgtaaacaaggatctataaagcacgttacgatcaaaattaagcttttttttacaaaagactttttggtacctgtaggcagtcaatccagccaatggcaaagcagcggcttctgtcattgaaagaaattcaggacaaggcacaatgtcctccttttcgacaatgacttcttcttttgtaaatgtgccaatcactggcaagagacccaatatgtgaaagtcacgttcaggacctctttcatccgaatcccatccatatccgggattaatcaagacacgttgtcctctttggccattcttcgtaatgtaaccaacgccatcagagcccaacacagaatctaatacagtaccatcatattgatccataaggatccaaacatccctttttaaaaaaaattaaaaaaagtcaagaaggagcctggttttgtttttaccgatggttgaaagcagcagcttgtatttggacagctacttgatgatccgcaaggttctcggaggatttgtgttccttgaattcaacgccgtacttgaattttgaatcaaaaggttgagtttcagtgagaatagcagagaccattttgtttcaaaaggcagtaatgatgtggtaaaggtagtgaaatggttgtatttatagtcattaaaaaaagcggaggggttagattaataagcagtaaacagctgctgtcacaaataccatttttcaaatgaattaataagcgcgctgaactctattagttttaaagcatcgttgatgaatcatatattcagatataatttattagcatcgtttattcaatcaacacgcaagattaaatgaatttgttcgtatccaaaaccaacttgctaatcttttaggacgtattttttattataaatttttcattttgttaactgtagtacaaaagctgagaattgtaaacgttctgatagattttattaataagccttctattatctgcaaaaccaaccaagatttgatgaaaaaaagaaaagaaaagcatattattcgttttcataaagaaaaattgtgtagtctttaattatagtttattgagatcaagctatacagtagcagaactaaggacacgcttaacaaaagctgtcatcgatatccactttttttttaaacctcaacttgttacttgaatatcatgtacttgcgtgaaataaaagggtatttttcataaacatttgaatgtatttatattgctttgtgctttgaaataacagcttgctgttgtaacatttagttattttatgctttttttatatagaaagttctttgataagtagcatgttttagataatgttatattagtttattacaatttgcattaagtaaagtaattgaaatttatagatgaatttaggaaaagagaggaaaaagaagaatgaaggttgaatgaaatataaacattttcgtctaatcctctaagcatccgagtagtctcgcatgtttttggtggaggcctttttggcaattcgtccacctaaactctttagtcctaaactgtgtcctgggttaccgacttgaaggtttttgagaccatcctcaaatggaaggccagtgacagtggcatcctcggttcctgcctttttagcatatcgcttaatgttggtttttgataaattaatacggaatgcagtgtctagtaaattgttgggttcaaggtattcatgtggaatatgtaaaaggaaggcaagaagttctgaattggttggacatgagtgtaagagatgatctaaatattatttaaaagaaatgtacattggtaaatattccatatccttttctcacctttgcataaatctagaatggctaggcttactcgataaaacactttaatgcctaagaagaaggaatgtatgtaagctgaggatctgaatatgtgtccttttcgtgttttttttagtttaccctcaaaataaaacgcgtcccaaacacgtagcactgattcccaaggaagtgtcatggtaaatgcagttaggaaccattgggctatatacatgattggaagtacatcattgttttctaaatgctgagccaactttgggttatgatcctttaataattgcccaatgatgtatgcatcaattcttaactgggaaagtgtaggtgtgaagtatccattcatataccgatcaatagtagccaccaataaccaaaacgagtcctttttttaatacaaaaatagttaatccatcaactctagatttctatttcttttcttttttttctattacttcgacagtcatctgcataagcattagtcctgctaaacggcccatgccttggcaatattctaaatcagaattgtattgggcatatgcttttaatatatttcgcaaattctgttgtcccaagccatccttttccataaattgtgtgtgatcaggataacatcgttcaatatctctttcaatcacgtcgtaaatagggatcctaggcttggacaacaggttttgaaattgatttgatctcttgtagtcatcactaccagccaagaattgccacactttggctctcacagatgctggtattcctccacgaaccaattttttcatctttacatcctttttaaccgttccagcatcgagtttgttgattatatttaaccattttaattcattttctctgtattctttcatagctttggtagacatatttgctctgcatgtaaataaactattagcttcctgggaagataaaatggggtttcagggggtgaggaacaatgaagaagacatgtacctgaatgaaggacgaccgcgtttgataatgaatccatattcatcaacattttcattttgaataaaagttgaattgttattattctttgttggtgtagtctggcttttcctttgtacaccggtgttttgtatattagtagctactgggcgtgcaggagatcttggtggtggtatagggccgtacagttctgtgttctcttcatccgagtaatcaatgttgagtgcagatgtatcaaatggatcatgattattgttgttattatctaatcatatattacacgtataagattaattttatgattattgataagctgcttttttttttctgtacctagattttctccagaataattgtaggaatcgtatgatattcgagactcttttatattatgacttgaagaagtcgaaactgagcctatactttcaaaactcggcttactgacccagtgtctcgatgagggtacgggtgaagcatatcgatcagaattggaagaaaatgaatgaatagagcctcttaattggttgaattgttcttgtctatttttcatcatttctatatcaaattctgttccatggctacttgtagagtttctatattgcgaatggtcggtaaaatcaagatcagcatcaagcgattctaatacacgaggatctaattctacaaaatgcacggtttctgcattaaaatttccaataacgccttcacagtatccctaaaagatctcttatattggtaaatctttatataaaatacagcattgtgctgtgtttatttaccatgtaaatatcattctctatatgttttaatatagtaatcctttctcctgtaaacaaatttagccttattttatatctaaaatgcctgtgtacacaaaccttgcaaatacatcagttcttcaggagtgttggccaaaatatccacttttgatacacaagcgcctaaaccacctatatattttttaacttggtcgatgtcacaatcctgtattgttgtaggaaacatacctttctcagcaaaggctttcaactcggctaaactcatcgaatcgacatctattgaagcattatccaaagcttctgctggatctttcaatagtcgtgcaatcttttcattaagctcttcgagattagcagaggtatgtcgtgtaatttttggttccatatatcaagtcaaaaaagagaaaaataaaataaggaagttccctccttttatatgaaagaaggaagaaaaaaaaaggtgaagaggatggtttactcccaaataaggaagacatgtgcgattaaacaccgctatgagttacgtggagaagaacctttttttattgtttatttaaaaagtaacaaaatggcccccattttaaatgtctaaatcatcatctggatcttcgtcatcaaagtcatcagcagcgtcaggatcgt

SEQ ID NO: 218 - DNA, 21011 bp, unidentified
  source 1..21011: mol_type = other DNA
  misc_feature 1..21011: note = Fanzor polypeptide
aatagccacagtaataacaggcattagaacaacagcagaactttaatttatataagctttttttttgtaaggaagacatggctcaagtttattaaagtgacaattaatcaagtcataatattgtgacactaatcaattgatcaggcttaaaaacattttatatcgtgttaaatgagaaatcaatctcagcctaaatgtaactactcaaattcaatggtagaacggaggaattgcaccgaaataaagtgctgtttataagaaaactctattggccttattttttagctacaatacagactctaagtatatgaacatttataaaaggcacactttttttgttttatatcttcatcttttcaaaagaaaaatgttatttttgaaatacatattagcaacatgtaatatttcaagtcaatttatgatttaacacactctaatcgatttctattaatcattctagggttgctgcttgcgactgttactaatgcacaatcagatcaaagttctatgataagctacaatgtcattgctcttttaaaccaaactaccttcaagtcaatggctgtcatagtagatagtattagctatcctttagaggccaacaagacattccctgtccttttctctggaaaggctccttctgctaaatcaggctatcattatgcaaaggtgtatatcagtgataacagtacacttgcagaaccatttgaacgtcagtctgtcaaccaaagcacacctcacgaattcttcaaccgtacctggaacacacatgataatgcccaattaccacaggtctattctcctttgagttctattcatcgcatcaaatctaatttgcacagagataacgagatccccactattcacatcatcggaaatcagacagaattagaccagatgaagggcaacaccactgcggatgtatctgttaagactactgtttcctacctctcacttcatgatgctttccagtttgaaaaagcagaaatctctttatccggtaacagtgctaaaatgatggccaagttatcgtataacctcaagctacacaagaaggatgaattgtatggctatagaaaacttaaacttcgctctttaggttttgatccttcctatattcgtgaacaattgggttacgatatccttaaatcagccggcttaatctcatccgagttttcctttgttcgtgttttcatgaacgatcaagaacttggtttattcggtatcgttgaagccttcaacgatccttggctttctaatgtgtttgcagatggagactcatcctataaacatggatatctttatcaagccaagttatctggtgctaataaccacagttctgatctttcttactatgaaaatattacggcatatgctgatggacaatacaagatcaaggaagaagcaactggtggcgaaaaagacaattataagcctttgatggacttgaccaaattcattgctgaagcacctactaatagttcagatgctgtcaacgaatggaacaaaaagttcaatatggattctgttgttcgatcgtaagtgacagtagttgttttatagccaaatgtgcttataaacgtttctttagaatggcaattgaaatcttgggaggctatgctgatggctatatagcagcctcaaacaacttttatctttatcaaaaccttagcagtgatcaatatacatatatcgccgctgatctcgatctctgtcttggtaatactgttaagaatatttcaaatatgttgagtggtgactacagcaaatttcctggatggggtactaagccattggttaatcaaatgatgcgcgtgcctgaattcaatcaaaagtttaagcaaacacttcaagaccttaacaccaaattgtttaatagcaatgcaacaaatcctcgtatcgatgatcttgttatcatgctcaaagaggacgtcgaatgggaccaaaaattaaccagagatctttacaaaaagtttttggaaagcatgggaataagtcagccatcagacatctttacattacctcaagttgcacctcttttgaaagatcctgaacaatttgatatggctaaacgattgattgaaggtgttccatttgatactacaataaatggtccaacaggacatataaccttatctggcattaaggaatggtttagggtcattcatcaaaatacagcaaatttttttcttcaaaagtaagaaaagagttataaataaattttaataaacatgcatttttaaagtttaagtaaaaggaagataacgtaatatgatcaggtgactgactactgtataaaaatatctagagtattaaaaaaaactttatgaactagcacacacacctagattgagtgagcgtgaaaagcttaagccggagaaaagatcatcttcccactttgaagagaacacaacagattagatgatgtgtaagaagttatacatgtccatgttttgtcgctaaaccccatgcttgtcccagtctaaaaatgaatatgagctgttagtttgaaaaatgaagcggataatttatatcaatggcgttgctcttttttttttattctcagaaacgcgtagttttgtacctttttttaattttttgaagtacgcgttgttcttttttatattcaatggatgaactgattgagaatgataaatttttagaaggagcaaaggaatttattgatcgacctattgtgagtataattttatatggtgtttctaagcttaaattgacgtttataacagaatccttttgcaaacgattccaagtatatttcgccacttgtattgaaacaaaacgttaaagattggaaagcaaaagctatatatatagataaacttcatttacaagagcaattatgcatttaagaaaatgcatttaagaaaagccatatatgcttttattttaacattatacctatctagtcttttgcattattatataattgatctaaccagtgtcaagaaaaatgatggaactcatgctgtctttggtttaaaatttgaagctgaaaaagaaaaatacaaaacaaattataaccccaaaaaaaatattgcgaagttgacaaggtgacagttgctaatatgtatgttatgtctagtttcgctatacggtgaagtgataacagaaactaattaatagaagactgtaagagactattaatgtacaataacaacaagattaacaataaaactagtccttgacttcaattgcttgaacgtgcaaaaagaatttactcagcacccaaaattaattttagcgggaagaaaagcctatgtttattacttgacaacaatagatactttggaataacatattaatataaggtaattggggaaaatatacaattgtaaagaggatgatggtaattttgataaataaagtaaatgatgtatcaattgagtattcgtcttcatgttgatttttatggtgttcttttctgtttaatatgctgacacattgggtatcctgtgagggtagaaaataataggtaaaaaaaataatgttgccaattatgacgtgtgttcattcaattcttgatgcggtgaagctgattattttcctttcctgttattttcttttacattttcttcaataacgtctgttagagttatccaaccacaccgaaaatcataccattcgaatcgccatgaaaaggagcatcttttgaatacaaaataagctttaaaaatcaaaaaggaatcaaaggcgactatcgaccaaaatccgactttgtcagtgcccaaatgaatttttgtgatccttctagccccaaaactccaattactatgaatacattcgaaatcaatacgttttctggaaactttatgaatggaggtggatcaacaagcataacatacaacaaaaacgtaacgagcctcaacttgtatttcttgcctgttgtttatttttaatttatttgttttaaacaagcgtctgaatgaaaccacaaactctgtgcacctaccttgtcaaacggtttgtggttcccttatcttattgcattcatagtgctcatactctcttacatatgatgtgattgtgaccgaaggtcaaaagaagtatcacataatgacattcaattataaatcagatgaactacaccggccaaaactttgaaaaagtcaactaaatgtgtttgaggatttagtatactttggaacgtcctctgcgtcaagcaataccgtcgcatcggacaagtataaagcttacgaacaggaccaattaaaaaacaaatcgctttgccaacataatttactagaacccatctgcagccttttaaaaaataataatacagaattttttgttcaacaagtatggacttctggacgggctggcagataaagctgttgctttaatggaagttctacgatataccttgacctcgttccacctcgcattcaaaaatagttctctctttgtacaaaatcatgagagaacacccttcatagaaaatagtgtaccatctctccttgccttatcaaagatcgcaggctttgtcgagttcaagtggtaaaacaaaaaagaaaaaaaaaatttactaaaaaatattctaggtgtgaaacacagtttacttcatgtacttggatttaaataaatctgactacagcaacagtacgatgaagtacaatgacactcttggttacttcaaaatgtttaacaacatggaaatcataatggttgaagcttcgaggtaataatcacagagacaactttcaaaatcctaattccttttttgaatagtgggaaactccgagagaacacagtacatacgatcaaagattgtctccagttgctggcgtgtggcatttcctctctgaggaaagaggcaatcttgaataaaaattcttcaatagctacgtttaaaaagcttaaggtttttggcgtgcaaaccattaaaaatcaagtaacgttgtccgagctatctatgaatacaagctggaactttatagaaaaacaaacagcaacactgccatcttcctgggatgaccgcatcttacttattcaataccttgaactgatagccactatcttcgtacgtttagatcccaccctactctaaaccatttcattctctgattttgatttttttttttacatgtaggatgatatttgcgatacccatcacttgttgaagctactgatggaagaaaacttggggctagcttcgaatgaggatcccacattaagaactatatttgagaagtaaacatatgttaaaggaaattgcaggatatgtagtttatgatgtaagatcatgttcaataaaaaagctgttttaccgctattcaacctgactgtacaggttagaatgtaatctttagtagctgtctgaatccaagtgaatgtatgagctcaatacttataaagaagtctggaatcttgtcatcagtttcactgattcgaagctgcatactgtctgtggttaagagtaaggtacaaagagaaaaactgttgaaggagggagattgatgagaatagttgatacttataccagcgcctatcttggaggaggatctttgaggattttacagttattctaacgcaaaatgacaagtagggttgaataaagaacctctccaagatgacacagttattcaatctttattttttacttgtgcagtttgggatattttctttgtgcaatctttttcgcccagtgcgcaatctacttccaggaatggtgtaaatctgaatacagtcaacgcaacgccaaagggcgggtaataaattttttcagaggacggatttttaaatcccaaggggtgggagtttttttttctcaaagcgcggttttcattttttcaaaagtcgttttttttttttttttctttcttaaagctcgttttttttttataaaagatgactactcgtttttattatgaagacggtcgatggaatggttgatgagcaaggagatgatgctatggactgacttgagaaagccatcccctttccatttaaaaactttaactcgtataagagagtactgtgaaaagcaagaagatgaatagttatcgtctcaagagggcctaataaatcttgatatggaggatgttataaccacagttaaaaagcagacaaagagttatcatagatactctaatgaacaaaagcttctatttgtgtattataacaaaatcaagctattcaaagcagctaaatccgagcgcttagcaggcggtataagcgaacgaacagcacaaacatgggccaaacaactcaaggaggataaagattgggatattttcgagaagcagaccaatttggttaatagaccaagaccatcattagatgataggcacaagcttcaccttctcgacttctgcgaccactgaccacaagcacgcataattgatgcagtggacttcctcacacaaaacttctctgatcctggtgtgaaaaaaagtgttgtccataacatttttgaaaactgagtgcaatctttccttcaaaaagctgacaactcaaccagctgctagaaatagtccaaccaaaattcaagattgtaaggattgggttattaagtggaatgcaacggactatttgaaaaattgtgtttttattgatgagtccgggtttaatatcaacatgaggccacctagtgaatgggcattgaaaggaaagccagctgttgcagagactcctaccggcagagctgtttctcacactgtattaggtgctatcacggcaaagtttgttgtttctaaaaagaatgacggagattgtgttccctgccatatatgaacgtacaaaaataataacaaacaatcagaaggaaaagtttgatgcgtcacataaactaattacgatccctgaaaatagctatgtaatggtaaaagtaaatattaaaaccaacacgttagatcctaactatgaaggaccttataaagtaaaaagaatgactcaagatggatcgtatgtactatagaggtgactggtcacaagcactgcacagctgcaagtaaattctcttgacaactttatctgaacctttttcgacggaaccaacatccttagggaaataagaaaatctaatacccgatagcagcgaaatgtttaatagtggttactaagactttctctacatgtcagatttaacttataaagcgactttcaaaacaacaagtacttgactacttttgtgataatcctgcttcagactggacatttaaaagatataaaaaaatattttagtgacaaagatcctgaaaaaatcaagaaagtttttgcggaaagcttacaaacggttaaagatgactcgaaaaacatttcgtccatcagcacatcaataaactgatggtgtcttttaatcctgcttcaagcaaatctactttggctaccaactctgcttcgagcatacctagctcttcggctgttaacaatatcacagtatgtagatccttgtttatagtatcatgtttactgatttgtatattctatctttaggtgaagggaaattattacaacgtaaggacttgaattttaattatttgaactattcactcacataagttataggctggtagagatataacgataaacgagacggccaagagagatagcaagaaacaaaaggtaaactaatactaaacgacattctttgcccgttacaaacttattactttttattagaccaaccataacgacaagaaagagattgaagaggttgatttcaagcaaaaatggattgagtttttggctgatgccgaacaaaacaaaaacttccatcggtataggtaaaatgaaacaatgatttgcttgaaagactgttattgatcttgattatagtccagagaagaatggtgagacgcgtttgggtgcgaaactatcgccacaccctcatgctaacaaagacacttacagaaaaatgaagatgcagttaaaacaacatgaagcaagtggtacttggatagatgtaaaaagttacattcgtagtctggttgctgcagtaagtatttttgatattcaaatttttgagttgaacttcaatcagctaatatgttgttatttattattcttagtctgacattgatgagttcgaacagaatattgagaacaaagaacttgtagaaggccaagaaaagacacgcagatgcatcaaggatatctgtaaagtcatgtatgtacaatatcatcagagtcatttcaatgatgaactaattttttgttggatttagggccaaggttttttttgaaaagaccatcaataacacgatcagaggctatatacaacaccaatatgatatttccttgtttcgaagctgtccttgctatgatgaagaagaatgggcatgctccttattttattcctggagaagatgagcttgaagcaatgactgcccagctgaaaaaaatgggacaaaagacagacaagcgaaagatatataaggctgatggcatcattcgtttggaaagatatatgaatttagaagttcttattttggaaacagcaggcgcttttggtcatgaagactatacaaagacagcttttgacaactcaaaaggcatgtttgctttgctttcgatgctaaagacaatagctgatcgatataaacatgcatcagttgaggagtttagcaagctcaagctgtattttgttcagccaagcggtaagtggtattaaaagcaacatttttttgtttgtgctaatgatattgtttgcctccaactaggctaccatatccgactgtggtcgatgcaatatgccaaaaatgggctctatgattttgttcgggaggaaaaaatcttgcgaagtgaagactttagtaccagagaagagcagctggtatctctggtcaattttttcttgagcctgaaggtatagttctaatcctaaacaatcgagaagaggagcaataataacaagcttaatttaattgtttagagccgtcttgaagagatagtaaatacaattacagctttgaaaggccaacacgaagagaacgagaagtactacgacagcgggaattatagccagataatctctctttctgacataatatgtccctggatttttaaattgagtttcaacactcatggacaacatttttcaaaggagcacctaatgagttcacctgaaagtgatttttaaattttctttttggttttttcttttaactacggctattcttaaaaaaacttttgataacccctaaatatataaaaaatttgcccccccccttatggaccatgttatgacactatttttctaactggcagcaaatgaaaattttgcgttgaacaactttgtgacaaaagagttctttgttgaagtttttctgagtcttgttctctcaaagggtggaaatagcacaagactgaaggatacgaccaaaaactataggcgattgctatcgaaatataaaaaagcttactttgaagacgctggttaaactccccaaagcttaccataagctcagcaaatagccttgtacgagtgtacgaagatccaaacggcctactataatagcatcaaagctcattttggaaacaggctgcgtggtttgataaacaagttatttaaaaagaaggaaaaggcagagagtctcagaggagaaatgcaagcaaacaagtctagtagtaaagcgataaaagaagctacccgaaagaagatttatggaccttgcaatcaggtgaagcttgccatcgcaaaaaaagagatgcctgaagttggtcttttagatgaccaatcaagaacgcaattaaatgattttctctcaagctactcagaggactacacctttcaaaagaactcaatttactatgacgttatggctagtccaaaaaaccatttcaaagccttcttcagacttgctgaactgtctgaagctgaacagacgaaacagtttgcttgtttcccgctacgtaccacctttatttcttgccacatgacgttggatagcaaaataatccattaccatgttctcaagagcaaaaagaatccaaaaacaggaagcaagtttgagacatagggtgctatcatagacctaaataaaagatgtccgcgcaccaaggatttcaaaagcctttgaggttccaaggaattctcgaaacagatggagtcggtgtctccataataaagcaaaacactgatacaagcagaaagtcgcctaagcccaacgctgaaaagaaagtggacggtaatcaaacagagcatattgaaggactagatcaagccgacttaaagagcgctgaaggcaagtgcgtcttgatagacactggaagacgggacttgatgtactgcatgaaagaaaccagcactgttgaagaaaaacaaacacttatatttaccaagaacaaccgctcaaaatgctcaaggcacttcagatatttaagaaggcgtgctcaaccttttgtggtccagaaagccgaagcaatcttttctagatctaaatccaactctgtagacttgaaaaagtttgtacagtacattaaaacaagagcatcagtaaaaaccattttgtacgaatacagtgctcacggcttcaaattgcgtccaaaaaaaaattcattgcgcatctttaattttcaaacagcgcatctttatttggtcaaattgcgcacttgtgatttctcaaactgcgctaataaaaaagtcaaactgcatattttacaactcaaattgcattatttttattcgtacctaagctattatctctttaaaagcaaatatcagatcgataacatgtactcaataaaaggaaaaattatttttgaagatggtcaaggaaatgtttttgatgagagcgggaatgaagcaatggactgggatgaggaagttgatactcataatttggagaacctaaccaacctaacacgctatttgaataagcaagtacagccggaaatggacttagacagtctggattttgttgaaaaaatgaaaacaatagagaagaaccttgaagagaaaaaaacgaaaagcaataataaaaaaaatctatattctgatgaccaaaaaaacgttatttatatatcttcacaagataaaattgttaaacgcagctgaatcggctcggagagcgggagtgaaagtacgtacagggcaagcgtggtctgcaagaatgaaggaagatcctaactggaatatatacgaaaagcaaacgaatcagaacaaaattggtacaggtcagctacaggagaagcataaagcttttcttcttgattattttgatgagtatccttcagctcgagttaaagatgcaattgatggccttacggaaaacttcgaaaacttctccttgaaagaaactgttgtgggaaagtacattagagaggattgtaatttaacaataaaaaaaagttacccgccatccacatgcaagaaacactgacaatactcgtaaagaaagacacgactgggtgaaaacttggtcgaaaacagatatggatttcaatagtaattgtgtctttattgacgaaagcgctttcgacattaatatgaggccaccaacagctagatctgctcgaggtacaccagtcataattactacgccaacaacaagggctataagccatacgattcttggtgcaatatgtcctatgggagtcgtcaacatggagatcagagttcctttaaaatcaaaaagaataaaagttgcaggaagccgcaaaagaaaaagtccagcagcgaaaaaaccagcaacaggtggcaccaattcaggtcattacgatagatttatgaacttaacgttggatgagatggacaagtatccggaaatgaaaggattttatttggttatggacaactcgcctattcatgacaaaaagagtggagagattgacaagatgattgaagattgaggctataagtgtgtttatctcccgaagtactcaccagaacttaaccctattgaacagttttgggcaagcgtcaaacacaaagtaagaagaagccaatttggtaatacagaggacctcaagacaagaataagcgaggcttgcgatgctgttcctgcacagcatatgaaaaactttattcaacactctgttaacgtgtttgagaaatgcttaaatgatataccgatttaaaagataaatcttttatataattcataatatgtagtatatgaaataaactgatgcatttttcttcctgacaacccactaacaatatgatgtaaaattaataaacctttttcaatttctctatatgggcctagatattcaattgatccgtatataacatttaaaaaataaaatactggtatataacctaattgttccaacaatacatctttaataaatcttataaattttacatcttttaattctgatctatgatccagttcgtatttagaaataggcattcatttgctatcagtttatttacttctttatttaaaatatctttgtataaactttcctcttcactttctgtcattatatattgatattcaattttttaaaaaacatcagcttttttatgacaatatatgattcgctacgctacgctacgatacgatacgctacgatacgcgaataaataaaagagttttattggtcaatttaagtataaatcgggatttttttcaacaaagggtatttatggatactgcaaccttttttaacgcttgtatgaatgtttctgttagaaatgagcggtaagttagatttacattgaaattgtgaatattttctctataacatgcaagaagaaattttagacgaaaatgacaaagagttttataattttgttgtcccaactgaatatcatcctggaattgatttgatcagcaaggtcattttaactgatgtacgagtccttaacgtcataactacagctattgctaaagcatcaaaacgttcatatgttattgaacctctagagatcccacataaacagtttggtgctgtcctatacattccccatggtcttcaaaatagtttacctttgatagtcatcaatactattacgacctttgaagaaacgaagtttaatcaaattatttaacaaagcaccaatatttttgaacggtataacacccttcctatttgtgtgatcatcgttgctcagcaacttgatgaaaaaattattgaacaaagctcccagcaccaagagctcccattccttcgagaaataccatgtgcattttgggcaaagcagtgtatattagtgtcatcaaaggatagtaggctcaacaagggtaaattaaaacaccatccattattggatattataattgctatcacaagcaatgaaaaagtcatgttatgtaatgatgaactataataaaattgtttatttaaattttctattatagacttcgtagactctcactagtattgaattgcttaattgactcaatattttcaagatgtcctgttttgaagcattctttccaattgattctcgttgtttttttgaaacgttggacgaaatcatataattctgcattatccacttcattctcaagttctacagtgcttagttgtcttcttttgttgagataaaccaaaggaggagtctcttcaattggcgttgtttcgattgcttcacagtattttcttttctgtcgtttcaagaattccaaagtagcttccacatagcttaatgactttttttttgacgcttcatctcctttttctaggcattttttttatctcgcgcagttggatttcactaatactacaaattttgtttatagcctccaatctttcagcttcttctccaactaactggtcaagattatcatgcgcaattgagtatagtaattttactaaagaatcattccttccatagtctaaagtactaatcaacaaagactgagagcaaaggaaatagccaaccgcttgcaaaggatgtaatattttttcttgttgtttcatctgtaaagtcgaagatgtcagtagcaaacaatgtttagcccatccagtgcttagtatctgtctcgcaaaggggaggtcactatctataggcttgctcagaaaaggtgctgtactacttccaattccaaatatcacaatgataggaagcctgttgtagcgttcgtatgtgagtgtgcagtattgaatggcacgtgccaagaatttgtcgtcggcttgattttgtacttcaactagtacagatggaaatgaactcaagggatcgcggggagcatagagaacatcactttttttttgttataaattctgtaggcgccgaaacatagttatcttctgccgcttctggcacgagagcttttaatagcatgtttatcacttgtttgtcggttaataccagtttgctgatcaaatcagttcctggcctgtgattataagggaggatgcgatcagtgtcatctaaacgattttatgtaagaaattatttgtatttttatagcatgtttacttacctttgtcaatactgaaatagtcagatgttatttttgaaaagtaaaagtgaagaaagaaaaagcgtaacgtatccgtattgtatccataataaaaaaaatctacccctcgtctggtttccaagttaagccgagatattcataatcgtatcatcaagctaaatcagcttatctggcctcatatattgaatcaaaataaaccattgggtgaagtagatgattcagcattcatcgatgccttctgttcgcagccccagtggattaattacaaacctaaaccatttcggttgtctctcatacagcgatctctaccatcatcggcaatgtcaccaacaccaacttccaaatggtcacttttttggaaactgcctatttcgcctgaaagccgatctttatggtatcgtctattccaccgtaaactctatagtcaatcacttctttcaagatttgataatggtttgacctcttcacactgtaaattttgctctgctaatactgaagacttacaacacctcttcgtgcgctgtcctacgaaatggagagtatggatagatgctttcaatttctttagtccacatctcactttcactcaagacaatgtatgctcaatcctttggtcttttcagcagtttacttttgttgacaacagtgatatctagactctcagctgctgtgtgctttccgttatccggcgtgcccattgaagatttactattgacgactttccttttattgataaacagctggtcactcatgctttgtcgcaatttgccaccctcaaaaggggcagactcgatcttgactagcatgttcaatcgcctacactctgttccgtttggttcataccgctctcagacgtgtggctcctattataatttataaaaataaactatttatttacaaaaaaaaaaaaaaaaatatctctccatttgcttacttttgctcgctttttaaattagccaatcataaatttttattcctttcccctcacttgtctatcgggctgaattggttgtaattttgacaacatacctgtcgtattactgttttctgaatagatgtacatacaggaactagcgtcacttgacagctgtccttagatgtaaagtcaaaaataaaatgcagcattttataagtattgattttttatgtcaatagaacctgcttttcatcatcaagtattgttttcttttattagagcaattccatgtttccaatcgcgtcttttgtgtttactttagggtgaaagagtaactgcaatgggatcctatattattatgaaacttatatttcaaaccaacagttaaaaagcgttttcctgggaagaaatctttttaaagcctatatatatagtttataaggaaaacatacaaagaatttttatctgcattatactaaatgtttgattgacacacacttattgaaacctgggtacaccggcagcaccagcctggtcaataaaacatgtgctcaacaacctaaaaattcacaaagtatataatgaatccaactctaaccaattattttcatgagatgtgtaatgtactgcttattttactacagttttttccttatctacaagaaatcatattttattacatgctatatgggttcaaggtttgaaaggacctctgctttttcgatacgcgctaatgtttattctgttcatttgtacaaaaagtacaacattttcaatcaatataaatatcatttgggataaatcccatattcacacagacacgttgattttaaaacgcacggtgcttttatcacagtataagaatgagaaatgaaaacatgaataaatgcatggtttatggattcaaattaaatttaattttattaaaattcaattactagtttgccaaattgattaccacgactacataaaaataaaatgttagtattttttttgttttccacgaaataaagtacgaacctcatagttaggatggcttgttcaaatgtgtttttatttaaacctttccaaacatgtgaaacaataggcctaatcttgtgtttttcgacaaattcaaccatctttctaaattctactcttgatcccatggtaactcctctgtaatcgatatttttgatgaagtaagatatcgggatattcagtccggtcgttacagtagctgtttgaccataacctacaacgatgccacctggtcgcatcagtttaggatattcagcataaagaggaccaccggcaccatcgatgactgcagacagcacgttattgcccaagagttcctttagttcctccatgcagttttctaatcatataatgtcaatattgaactacaagaatcctgaatttctaccatctttataattcactccgcctatagcacccagctcaatactcttttgaatcttttctggagaagaagatgtgacgtaaacatgggcacctgcagctacagcaaactgaagagcaaaaagtgcaacccctcctccaataccagtgattaggatatgttggcctttttgaactaagccctttgtaaacaaggatctataaagcacgttacgatcaaaattaagcttttttttacaaaagactttttggtacctgtaggcagtcaatccagccaatggcaaagcagcggcttctgtcattgaaagaaattcaggacaaggcacaatgtcctccttttcgacaatgacttcttcttttgtaaatgtgccaatcactggcaagagacccaatatgtgaaagtcacgttcaggacctctttcatccgaatcccatccatatccgggattaatcaagacacgttgtcctctttggccattcttcgtaatgtaaccaacgccatcagagcccaacacagaatctaatacagtaccatcatattgatccataaggatccaaacatccctttttaaaaaaaattaaaaaaagtcaagaaggagcctggttttgtttttaccgatggttgaaagcagcagcttgtatttggacagctacttgatgatccgcaaggttctcggaggatttgtgttccttgaattcaacgccgtacttgaattttgaatcaaaaggttgagtttcagtgagaatagcagagaccattttgtttcaaaaggcagtaatgatgtggtaaaggtagtgaaatggttgtatttatagtcattaaaaaaagcggaggggttagattaataagcagtaaacagctgctgtcacaaataccatttttcaaatgaattaataagcgcgctgaactctattagttttaaagcatcgttgatgaatcatatattcagatataatttattagcatcgtttattcaatcaacacgcaagattaaatgaatttgttcgtatccaaaaccaacttgctaatcttttaggacgtattttttattataaatttttcattttgttaactgtagtacaaaagctgagaattgtaaacgttctgatagattttattaataagccttctattatctgcaaaaccaaccaagatttgatgaaaaaaagaaaagaaaagcatattattcgttttcataaagaaaaattgtgtagtctttaattatagtttattgagatcaagctatacagtagcagaactaaggacacgcttaacaaaagctgtcatcgatatccactttttttttaaacctcaacttgttacttgaatatcatgtacttgcgtgaaataaaagggtatttttcataaacatttgaatgtatttatattgctttgtgctttgaaataacagcttgctgttgtaacatttagttattttatgctttttttatatagaaagttctttgataagtagcatgttttagataatgttatattagtttattacaatttgcattaagtaaagtaattgaaatttatagatgaatttaggaaaagagaggaaaaagaagaatgaaggttgaatgaaatataaacattttcgtctaatcctctaagcatccgagtagtctcgcatgtttttggtggaggcctttttggcaattcgtccacctaaactctttagtcctaaactgtgtcctgggttaccgacttgaaggtttttgagaccatcctcaaatggaaggccagtgacagtggcatcctcggttcctgcctttttagcatatcgcttaatgttggtttttgataaattaatacggaatgcagtgtctagtaaattgttgggttcaaggtattcatgtggaatatgtaaaaggaaggcaagaagttctgaattggttggacatgagtgtaagagatgatctaaatattatttaaaagaaatgtacattggtaaatattccatatccttttctcacctttgcataaatctagaatggctaggcttactcgataaaacactttaatgcctaagaagaaggaatgtatgtaagctgaggatctgaatatgtgtccttttcgtgttttttttagtttaccctcaaaataaaacgcgtcccaaacacgtagcactgattcccaaggaagtgtcatggtaaatgcagttaggaaccattgggctatatacatgattggaagtacatcattgttttctaaatgctgagccaactttgggttatgatcctttaataattgcccaatgatgtatgcatcaattcttaactgggaaagtgtaggtgtgaagtatccattcatataccgatcaatagtagccaccaataaccaaaacgagtcctttttttaatacaaaaatagttaatccatcaactctagatttctatttcttttcttttttttctattacttcgacagtcatctgcataagcattagtcctgctaaacggcccatgccttggcaatattctaaatcagaattgtattgggcatatgcttttaatatatttcgcaaattctgttgtcccaagccatccttttccataaattgtgtgtgatcaggataacatcgttcaatatctctttcaatcacgtcgtaaatagggatcctaggcttggacaacaggttttgaaattgatttgatctcttgtagtcatcactaccagccaagaattgccacactttggctctcacagatgctggtattcctccacgaaccaattttttcatctttacatcctttttaaccgttccagcatcgagtttgttgattatatttaaccattttaattcattttctctgtattctttcatagctttggtagacatatttgctctgcatgtaaataaactattagcttcctgggaagataaaatggggtttcagggggtgaggaacaatgaagaagacatgtacctgaatgaaggacgaccgcgtttgataatgaatccatattcatcaacattttcattttgaataaaagttgaattgttattattctttgttggtgtagtctggcttttcctttgtacaccggtgttttgtatattagtagctactgggcgtgcaggagatcttggtggtggtatagggccgtacagttctgtgttctcttcatccgagtaatcaatgttgagtgcagatgtatcaaatggatcatgattattgttgttattatctaatcatatattacacgtataagattaattttatgattattgataagctgcttttttttttctgtacctagattttctccagaataattgtaggaatcgtatgatattcgagactcttttatattatgacttgaagaagtcgaaactgagcctatactttcaaaactcggcttactgacccagtgtctcgatgagggtacgggtgaagcatatcgatcagaattggaagaaaatgaatgaatagagcctcttaattggttgaattgttcttgtctatttttcatcatttctatatcaaattctgttccatggctacttgtagagtttctatattgcgaatggtcggtaaaatcaagatcagcatcaagcgattctaatacacgaggatctaattctacaaaatgcacggtttctgcattaaaatttccaataacgccttcacagtatccctaaaagatctcttatattggtaaatctttatataaaatacagcattgtgctgtgtttatttaccatgtaaatatcattctctatatgttttaatatagtaatcctttctcctgtaaacaaatttagccttattttatatctaaaatgcctgtgtacacaaaccttgcaaatacatcagttcttcaggagtgttggccaaaatatccacttttgatacacaagcgcctaaaccacctatatattttttaacttggtcgatgtcacaatcctgtattgttgtaggaaacatacctttctcagcaaaggctttcaactcggctaaactcatcgaatcgacatctattgaagcattatccaaagcttctgctggatctttcaatagtcgtgcaatcttttcattaagctcttcgagattagcagaggtatgtcgtgtaatttttggttccatatatcaagtcaaaaaagagaaaaataaaataaggaagttccctccttttatatgaaagaaggaagaaaaaaaaaggtgaagaggatggtttactcccaaataaggaagacatgtgcgattaaacaccgctatgagttacgtggagaagaacctttttttattgtttatttaaaaagtaacaaaatggcccccattttaaatgtctaaatcatcatctggatcttcgtcatcaaagtcatcagcagcgtcaggatcgt

SEQ ID NO: 219 - DNA, 11463 bp, Rhizopus sp.
  source 1..11463: mol_type = other DNA
agtctcagaggagaaatgcaagcaaacaagtctagtagtaaagcgataaaagaagctacccgaaagaagatttatggaccttgcaatcaggtgaagcttgccatcgcaaaaaaagagatgcctgaagttggtcttttagatgaccaatcaagaacgcaattaaatgattttctctcaagctactcagaggactacacctttcaaaagaactcaatttactatgacgttatggctagtccaaaaaaccatttcaaagccttcttcagacttgctgaactgtctgaagctgaacagacgaaacagtttgcttgtttcccgctacgtaccacctttatttcttgccacatgacgttggatagcaaaataatccattaccatgttctcaagagcaaaaagaatccaaaaacaggaagcaagtttgagacatagggtgctatcatagacctaaataaaagatgttcgcgcaccaaggatttcaaaagcctttgaggttccaaggaattctcgaaacagatggagtcggtgtctccataataaagcaaaacactgatacaagcagaaagtcgcctaagcccaacgctgaaaagaaagtggacggtaatcaaacagagcatattgaaggactagatcaagccgacttaaagagcgctgaaggcaagtgcgtcttgatagacactggaagacgggacttgatgtactgcatgaaagaaaccagcactgttgaagaaaaacaaacacttatatttaccaagaacaaccgctcaaaatgctcaaggcacttcagatatttaagaaggcgtgctcaaccttttgtggtccagaaagccgaagcaatcttttctagatctaaatccaactctgtagacttgaaaaagtttgtacagtacattaaaacaagagcatcagtaaaaaccattttgtacgaatacagtgctcacggcttcaaattgcgtccaaaaaaaaattcattgcgcatctttaattttcaaacagcgcatctttatttggtcaaattgcgcacttgtgatttctcaaactgcgctaataaaaaagtcaaactgcatattttacaactcaaattgcattatttttattcgtacctaagctattatctctttaaaagcaaatatcagatcgataacatgtactcaataaaaggaaaaattatttttgaagatggtcaaggaaatgtttttgatgagagcgggaatgaagcaatggactgggatgaggaagttgatactcataatttggagaacctaaccaacctaacacgctatttgaataagcaagtacagccggaaatggacttagacagtctggattttgttgaaaaaatgaaaacaatagagaagaaccttgaagagaaaaaaacgaaaagcaataataaaaaaaatctatattctgatgaccaaaaaaacgttatttatatatcttcacaagataaaattgttaaacgcagctgaatcggctcggagagcgggagtgaaagtacgtacagggcaagcgtggtctgcaagaatgaaggaagatcctaactggaatatatacgaaaagcaaacgaatcagaacaaaattggtacaggtcagctacaggagaagcataaagcttttcttcttgattattttgatgagtatccttcagctcgagttaaagatgcaattgatggccttacggaaaacttcgaaaacttctccttgaaagaaactgttgtgggaaagtacattagagaggattgtaatttaacaataaaaaaaagttacccgccatccacatgcaagaaacactgacaatactcgtaaagaaagacacgactgggtgaaaacttggtcgaaaacagatatggatttcaatagtaattgtgtctttattgacgaaagcgctttcgacattaatatgaggccaccaacagctagatctgctcgaggtacaccagtcataattactacgccaacaacaagggctataagccatacgattcttggtgcaatatgtcctatgggagtcgtcaacatggagatcagagttcctttaaaatcaaaaagaataaaagttgcaggaagccgcaaaagaaaaagtccagcagcgaaaaaaccagcaacaggtggcaccaattcaggtcattacgatagatttatgaacttaacgttggatgagatggacaagtatccggaaatgaaaggattttatttggttatggacaactcgcctattcatgacaaaaagagtggagagattgacaagatgattgaagattgaggctataagtgtgtttatctcccgaagtactcaccagaacttaaccctattgaacagttttgggcaagcgtcaaacacaaagtaagaagaagccaatttggtaatacagaggacctcaagacaagaataagcgaggcttgcgatgctgttcctgcacagcatatgaaaaactttattcaacactctgttaacgtgtttgagaaatgcttaaatgatataccgatttaaaagataaatcttttatataattcataatatgtagtatatgaaataaactgatgcatttttcttcctgacaacccactaacaatatgatgtaaaattaataaacctttttcaatttctctatatgggcctagatattcaattgatccgtatataacatttaaaaaataaaatactggtatataacctaattgttccaacaatacatctttaataaatcttataaattttacatcttttaattctgatctatgatccagttcgtatttagaaataggcattcatttgctatcagtttatttacttctttatttaaaatatctttgtataaactttcctcttcactttctgtcattatatattgatattcaattttttaaaaaacatcagcttttttatgacaatatatgattcgctacgctacgctacgatacgatacgctacgatacgcgaataaataaaagagttttattggtcaatttaagtataaatcgggatttttttcaacaaagggtatttatggatactgcaaccttttttaacgcttgtatgaatgtttctgttagaaatgagcggtaagttagatttacattgaaattgtgaatattttctctataacatgcaagaagaaattttagacgaaaatgacaaagagttttataattttgttgtcccaactgaatatcatcctggaattgatttaatcagcaaggtcattttaactgatgtacgagtccttaacgtcataactacagctattgctaaagcatcaaaacgttcatatgttattgaacctctagagatcccacataaacagtttggtgctgtcctatacattccccatggtcttcaaaatagtttacctttgatagtcatcaatactattacgacctttgaagaaacgaagtttaatcaaattatttaacaaagcaccaatatttttgaacggtataacacccttcctatttgtgtgatcatcgttgctcagcaacttgatgaaaaaattattgaacaaagctcccagcaccaagagctcccattccttcgagaaataccatgtgcattttgggcaaagcagtgtatattagtgtcatcaaaggatagtaggctcaacaagggtaaattaaaacaccatccattattggatattataattgctatcacaagcaatgaaaaagtcatgttatgtaatgatgaactataataaaattgtttatttaaattttctattatagacttcgtagactctcactagtattgaattgcttaattgactcaatattttcaagatgtcctgttttgaagcattctttccaattgattctcgttgtttttttgaaacgttggacgaaatcatataattctgcattatccacttcattctcaagttctacagtgcttagttgtcttcttttgttgagataaaccaaaggaggagtctcttcaattggcgttgtttcgattgcttcacagtattttcttttctgtcgtttcaagaattccaaagtagcttccacatagcttaatgactttttttttgacgcttcatctcctttttctaggcattttttttatctcgcgcagttggatttcactaatactacaaattttgtttatagcctccaatctttcagcttcttctccaactaactggtcaagattatcatgcgcaattgagtatagtaattttactaaagaatcattccttccatagtctaaagtactaatcaacaaagactgagagcaaaggaaatagccaaccgcttgcaaaggatgtaatattttttcttgttgtttcatctgtaaagtcgaagatgtcagtagcaaacaatgtttagcccatccagtgcttagtatctgtctcgcaaaggggaggtcactatctataggcttgctcagaaaaggtgctgtactacttccaattccaaatatcacaatgataggaagcctgttgtagcgttcgtatgtgagtgtgcagtattgaatggcacgtgccaagaatttgtcgtcggcttgattttgtacttcaactagtacagatggaaatgaactcaagggatcgcggggagcatagagaacatcactttttttttgttataaattctgtaggcgccgaaacatagttatcttctgccgcttctggcacgagagcttttaatagcatgtttatcacttgtttgtcggttaataccagtttgctgatcaaatcagttcctggcctgtgattataagggaggatgcgatcagtgtcatctaaacgattttatgtaagaaattatttgtatttttatagcatgtttacttacctttgtcaatactgaaatagtcagatgttatttttgaaaagtaaaagtgaagaaagaaaaagcgtaacgtatccgtattgtatccataataaaaaaaatctacccctcgtctggtttccaagttaagccgagatattcataatcgtatcatcaagctaaatcagcttatctggcctcatatattgaatcaaaataaaccattgggtgaagtagatgattcagcattcatcgatgccttctgttcgcagccccagtggattaattacaaacctaaaccatttcggttgtctctcatacagcgatctctaccatcatcggcaatgtcaccaacaccaacttccaaatggtcacttttttggaaactgcctatttcgcctgaaagccgatctttatggtatcgtctattccaccgtaaactctatagtcaatcacttctttcaagatttgataatggtttgacctcttcacactgtaaattttgctctgctaatactgaagacttacaacacctcttcgtgcgctgtcctacgaaatggagagtatggatagatgctttcaatttctttagtccacatctcactttcactcaagacaatgtatgctcaatcctttggtcttttcagcagtttacttttgttgacaacagtgatatctagactctcagctgctgtgtgctttccgttatccggcgtgcccattgaagatttactattgacgactttccttttattgataaacagctggtcactcatgctttgtcgcaatttgccaccctcaaaaggggcagactcgatcttgactagcatgttcaatcgcctacactctgttccgtttggttcataccgctctcagacgtgtggctcctattataatttataaaaataaactatttatttacaaaaaaaaaaaaaaaatatctctccatttgcttacttttgctcgctttttaaattagccaatcataaatttttattcctttcccctcacttgtctatcgggctgaattggttgtaattttgacaacatacctgtcgtattactgttttctgaatagatgtacatacaggaactagcgtcacttgacagctgtccttagatgtaaagtcaaaaataaaatgcagcattttataagtattgattttttatgtcaatagaacctgcttttcatcatcaagtattgttttcttttattagagcaattccatgtttccaatcgcgtcttttgtgtttactttagggtgaaagagtaactgcaatgggatcctatattattatgaaacttatatttcaaaccaacagttaaaaagcgttttcctgggaagaaatctttttaaagcctatatatatagtttataaggaaaacatacaaagaatttttatctgcattatactaaatgtttgattgacacacacttattgaaacctgggtacaccggcagcaccagcctggtcaataaaacatgtgctcaacaacctaaaaattcacaaagtatataatgaatccaactctaaccaattattttcatgagatgtgtaatgtactgcttattttactacagttttttccttatctacaagaaatcatattttattacatgctatatgggttcaaggtttgaaaggacctctgctttttcgatacgcgctaatgtttattctgttcatttgtacaaaaagtacaacattttcaatcaatataaatatcatttgggataaatcccatattcacacagacacgttgattttaaaacgcacggtgcttttatcacagtataagaatgagaaatgaaaacatgaataaatgcatggtttatggattcaaattaaatttaattttattaaaattcaattactagtttgccaaattgattaccacgactacataaaaataaaatgttagtattttttttgttttccacgaaataaagtacgaacctcatagttaggatggcttgttcaaatgtgtttttatttaaacctttccaaacatgtgaaacaataggcctaatcttgtgtttttcgacaaattcaaccatctttctaaattctactcttgatcccatggtaactcctctgtaatcgatatttttgatgaagtaagatatcgggatattcagtccggtcgttacagtagctgtttgaccataacctacaacgatgccacctggtcgcatcagtttaggatattcagcataaagaggaccaccggcaccatcgatgactgcagacagcacgttattgcccaagagttcctttagttcctccatgcagttttctaatcatataatgtcaatattgaactacaagaatcctgaatttctaccatctttataattcactccgcctatagcacccagctcaatactcttttgaatcttttctggagaagaagatgtgacgtaaacatgggcacctgcagctacagcaaactgaagagcaaaaagtgcaacccctcctccaataccagtgattaggatatgttggcctttttgaactaagccctttgtaaacaaggatctataaagtacgttacgatcaaaattaagcttttttttacaaaagactttttggtacctgtaggcagtcaatccagccaatggcaaagcagcggcttctgtcattgaaagaaattcaggacaaggcacaatgtcctccttttcgacaatgacttcttcttttgtaaatgtgccaatcactggcaagagacccaatatgtgaaagtcacgttcaggacctctttcatccgaatcccatccatatccgggattaatcaagacacgttgtcctctttggccattcttcgtaatgtaaccaacgccatcagagcccaacacagaatctaatacagtaccatcatattgatccataaggatccaaacatccctttttaaaaaaaattaaaaaaagtcaagaaggagcctggttttgtttttaccgatggttgaaagcagcagcttgtatttggacagctacttgatgatccgcaaggttctcggaggatttgtgttccttgaattcaacgccgtacttgaattttgaatcaaaaggttgagtttcagtgagaatagcagagaccattttgtttcaaaaggcagtaatgatgtggtaaaggtagtgaaatggttgtatttatagtcattaaaaaaagcggaggggttagattaataagcagtaaacagctgctgtcacaaataccatttttcaaatgaattaataagcgcgctgaactctattagttttaaagcatcgttgatgaatcatatattcagatataatttattagcatcgtttattcaatcaacacgcaagattaaatgaatttgttcgtatccaaaaccaacttgctaatcttttaggacgtattttttattataaatttttcattttgttaactgtagtacaaaagctgagaattgtaaacgttctgatagattttattaataagccttctattatctgcaaaaccaaccaagatttgatgaaaaaaagaaaagaaaagcatattattcgttttcataaagaaaaattgtgtagtctttaattatagtttattgagatcaagctatacagtagcagaactaaggacacgcttaacaaaagctgtcatcgatatccactttttttttaaacctcaacttgttacttgaatatcatgtacttgcgtgaaataaaagggtatttttcataaacatttgaatgtatttatattgctttgtgctttgaaataacagcttgctgttgtaacatttagttattttatgctttttttatatagaaagttctttgataagtagcatgttttagataatgttatattagtttattacaatttgcattaagtaaagtaattgaaatttatagatgaatttaggaaaagagaggaaaaagaagaatgaaggttgaatgaaatataaacattttcgtctaatcctctaagcatccgagtagtctcgcatgtttttggtggaggcctttttggcaattcgtccacctaaactctttagtcctaaactgtgtcctgggttaccgacttgaaggtttttgagaccatcctcaaatggaaggccagtgacagtggcatcctcggttcctgcctttttagcatatcgcttaatgttggtttttgataaattaatacggaatgcagtgtctagtaaattgttgggttcaaggtattcatgtggaatatgtaaaaggaaggcaagaagttctgaattggttggacatgagtgtaagagatgatctaaatattatttaaaagaaatgtacattggtaaatattccatatccttttctcacctttgcataaatctagaatggctaggcttactcgataaaacactttaatgcctaagaagaaggaatgtatgtaagctgaggatctgaatatgtgtccttttcgtgttttttttagtttaccctcaaaataaaacgcgtcccaaacacgtagcactgattcccaaggaagtgtcatggtaaatgcagttaggaaccattgggctatatacatgattggaagtacatcattgttttctaaatgctgagccaactttgggttatgatcctttaataattgcccaatgatgtatgcatcaattcttaactgggaaagtgtaggtgtgaagtatccattcatataccgatcaatagtagccaccaataaccaaaacgagtcctttttttaatacaaaaatagttaatccatcaactctagatttctatttcttttcttttttttctattacttcgacagtcatctgcataagcattagtcctgctaaacggcccatgccttggcaatattctaaatcagaattgtattgggcatatgcttttaatatatttcgcaaattctgttgtcccaagccatccttttccataaattgtgtgtgatcaggataacatcgttcaatatctctttcaatcacgtcgtaaatagggatcctaggcttggacaacaggttttgaaattgatttgatctcttgtagtcatcactaccagccaagaattgccacactttggctctcacagatgctggtattcctccacgaaccaattttttcatctttacatcctttttaaccgttccagcatcgagtttgttgattatatttaaccattttaattcattttctctgtattctttcatagctttggtagacatatttgctctgcatgtaaataaactattagcttcctgggaagataaaatggggtttcagggggtgaggaacaatgaagaagacatgtacctgaatgaaggacgaccgcgtttgataatgaatccatattcatcaacattttcattttgaataaaagttgaattgttattattctttgttggtgtagtctggcttttcctttgtacaccggtgttttgtatattagtagctactgggcgtgcaggagatcttggtggtggtatagggccgtacagttctgtgttctcttcatccgagtaatcaatgttgagtgcagatgtatcaaatggatcatgattattgttgttattatctaatcatatattacacgtataagattaattttatgattattgataagctgcttttttttttctgtacctagattttctccagaataattgtaggaatcgtatgatattcgagactcttttatattatgacttgaagaagtcgaaactgagcctatactttcaaaactcggcttactgacccagtgtctcgatgagggtacgggtgaagcatatcgatcagaattggaagaaaatgaatgaatagagcctcttaattggttgaattgttcttgtctatttttcatcatttctatatcaaattctgttccatggctacttgtagagtttctatattgcgaatggtcggtaaaatcaagatcagcgtcaagcgattctaatacacgaggatctaattctacaaaatgcacggtttctgcattaaaatttccaataacgccttcacagtatccctaaaagatctcttatattggtaaatctttatataaaatacagcattgtgctgtgtttatttaccatgtaaatatcattctctatatgttttaatatagtaatcctttctcctgtaaacaaatttagccttattttatatctaaaatgcctgtgtacacaaaccttgcaaatacatcagttcttcaggagtgttggccaaaatatccacttttgatacacaagcgcctaaaccacctatatattttttaacttggtcgatgtcacaatcctgtattgttgtaggaaacatacctttctcagcaaaggctttcaactcggctaaactcatcgaatcgacatctattgaagcattatccaaagcttctgctggatctttcaatagtcgtgcaatcttttcattaagctcttcgagattagcagaggtatgtcgtgtaatttttggttccatatatcaagtcaaaaaagagaaaaataaaataaggaagttccctccttttatatgaaagaaggaagaaaaaaaaggtgaagaggatggtttactcccaaataaggaagacatgtgcgattaaacaccgctatgagttacgtggagaagaacctttttttattgtttatttaaaaagtaacaaaatggcccccattttaaatgtctaaatcatcatctggatcttcgtcatcaaagtcatcagcagcgtcaggatcgtaa

SEQ ID NO: 220 - DNA, 11463 bp, Rhizopus sp.; identical to SEQ ID NO: 219
  source 1..11463: mol_type = other DNA

SEQ ID NO: 221 - DNA, 11463 bp, Rhizopus sp.; identical to SEQ ID NO: 219
  source 1..11463: mol_type = other DNA

SEQ ID NO: 222 - DNA, 11480 bp, Rhizopus sp.
  source 1..11480: mol_type = other DNA
agaaggaaaaggcagagagtctcagaggagaaatgcaagcaaacaagtctagtagtaaagcgataaaagaagctacccgaaagaagatttatggaccttgcaatcaggtgaagcttgccatcgcaaaaaaagagatgcctgaagttggtcttttagatgaccaatcaagaacgcaattaaatgattttctctcaagctactcagaggactacacctttcaaaagaactcaatttactatgacgttatggctagtccaaaaaaccatttcaaagccttcttcagacttgctgaactgtctgaagctgaacagacgaaacagtttgcttgtttcccgctacgtaccacctttatttcttgccacatgacgttggatagcaaaataatccattaccatgttctcaagagcaaaaagaatccaaaaacaggaagcaagtttgagacatagggtgctatcatagacctaaataaaagatgttcgcgcaccaaggatttcaaaagcctttgaggttccaaggaattctcgaaacagatggagtcggtgtctccataataaagcaaaacactgatacaagcagaaagtcgcctaagcccaacgctgaaaagaaagtggacggtaatcaaacagagcatattgaaggactagatcaagccgacttaaagagcgctgaaggcaagtgcgtcttgatagacactggaagacgggacttgatgtactgcatgaaagaaaccagcactgttgaagaaaaacaaacacttatatttaccaagaacaaccgctcaaaatgctcaaggcacttcagatatttaagaaggcgtgctcaaccttttgtggtccagaaagccgaagcaatcttttctagatctaaatccaactctgtagacttgaaaaagtttgtacagtacattaaaacaagagcatcagtaaaaaccattttgtacgaatacagtgctcacggcttcaaattgcgtccaaaaaaaaattcattgcgcatctttaattttcaaacagcgcatctttatttggtcaaattgcgcacttgtgatttctcaaactgcgctaataaaaaagtcaaactgcatattttacaactcaaattgcattatttttattcgtacctaagctattatctctttaaaagcaaatatcagatcgataacatgtactcaataaaaggaaaaattatttttgaagatggtcaaggaaatgtttttgatgagagcgggaatgaagcaatggactgggatgaggaagttgatactcataatttggagaacctaaccaacctaacacgctatttgaataagcaagtacagccggaaatggacttagacagtctggattttgttgaaaaaatgaaaacaatagagaagaaccttgaagagaaaaaaacgaaaagcaataataaaaaaaatctatattctgatgaccaaaaaaacgttatttatatatcttcacaagataaaattgttaaacgcagctgaatcggctcggagagcgggagtgaaagtacgtacagggcaagcgtggtctgcaagaatgaaggaagatcctaactggaatatatacgaaaagcaaacgaatcagaacaaaattggtacaggtcagctacaggagaagcataaagcttttcttcttgattattttgatgagtatccttcagctcgagttaaagatgcaattgatggccttacggaaaacttcgaaaacttctccttgaaagaaactgttgtgggaaagtacattagagaggattgtaatttaacaataaaaaaaagttacccgccatccacatgcaagaaacactgacaatactcgtaaagaaagacacgactgggtgaaaacttggtcgaaaacagatatggatttcaatagtaattgtgtctttattgacgaaagcgctttcgacattaatatgaggccaccaacagctagatctgctcgaggtacaccagtcataattactacgccaacaacaagggctataagccatacgattcttggtgcaatatgtcctatgggagtcgtcaacatggagatcagagttcctttaaaatcaaaaagaataaaagttgcaggaagccgcaaaagaaaaagtccagcagcgaaaaaaccagcaacaggtggcaccaattcaggtcattacgatagatttatgaacttaacgttggatgagatggacaagtatccggaaatgaaaggattttatttggttatggacaactcgcctattcatgacaaaaagagtggagagattgacaagatgattgaagattgaggctataagtgtgtttatctcccgaagtactcaccagaacttaaccctattgaacagttttgggcaagcgtcaaacacaaagtaagaagaagccaatttggtaatacagaggacctcaagacaagaataagcgaggcttgcgatgctgttcctgcacagcatatgaaaaactttattcaacactctgttaacgtgtttgagaaatgcttaaatgatataccgatttaaaagataaatcttttatataattcataatatgtagtatatgaaataaactgatgcatttttcttcctgacaacccactaacaatatgatgtaaaattaataaacctttttcaatttctctatatgggcctagatattcaattgatccgtatataacatttaaaaaataaaatactggtatataacctaattgttccaacaatacatctttaataaatcttataaattttacatcttttaattctgatctatgatccagttcgtatttagaaataggcattcatttgctatcagtttatttacttctttatttaaaatatctttgtataaactttcctcttcactttctgtcattatatattgatattcaattttttaaaaaacatcagcttttttatgacaatatatgattcgctacgctacgctacgatacgatacgctacgatacgcgaataaataaaagagttttattggtcaatttaagtataaatcgggatttttttcaacaaagggtatttatggatactgcaaccttttttaacgcttgtatgaatgtttctgttagaaatgagcggtaagttagatttacattgaaattgtgaatattttctctataacatgcaagaagaaattttagacgaaaatgacaaagagttttataattttgttgtcccaactgaatatcatcctggaattgatttaatcagcaaggtcattttaactgatgtacgagtccttaacgtcataactacagctattgctaaagcatcaaaacgttcatatgttattgaacctctagagatcccacataaacagtttggtgctgtcctatacattccccatggtcttcaaaatagtttacctttgatagtcatcaatactattacgacctttgaagaaacgaagtttaatcaaattatttaacaaagcaccaatatttttgaacggtataacacccttcctatttgtgtgatcatcgttgctcagcaacttgatgaaaaaattattgaacaaagctcccagcaccaagagctcccattccttcgagaaataccatgtgcattttgggcaaagcagtgtatattagtgtcatcaaaggatagtaggctcaacaagggtaaattaaaacaccatccattattggatattataattgctatcacaagcaatgaaaaagtcatgttatgtaatgatgaactataataaaattgtttatttaaattttctattatagacttcgtagactctcactagtattgaattgcttaattgactcaatattttcaagatgtcctgttttgaagcattctttccaattgattctcgttgtttttttgaaacgttggacgaaatcatataattctgcattatccacttcattctcaagttctacagtgcttagttgtcttcttttgttgagataaaccaaaggaggagtctcttcaattggcgttgtttcgattgcttcacagtattttcttttctgtcgtttcaagaattccaaagtagcttccacatagcttaatgactttttttttgacgcttcatctcctttttctaggcattttttttatctcgcgcagttggatttcactaatactacaaattttgtttatagcctccaatctttcagcttcttctccaactaactggtcaagattatcatgcgcaattgagtatagtaattttactaaagaatcattccttccatagtctaaagtactaatcaacaaagactgagagcaaaggaaatagccaaccgcttgcaaaggatgtaatattttttcttgttgtttcatctgtaaagtcgaagatgtcagtagcaaacaatgtttagcccatccagtgcttagtatctgtctcgcaaaggggaggtcactatctataggcttgctcagaaaaggtgctgtactacttccaattccaaatatcacaatgataggaagcctgttgtagcgttcgtatgtgagtgtgcagtattgaatggcacgtgccaagaatttgtcgtcggcttgattttgtacttcaactagtacagatggaaatgaactcaagggatcgcggggagcatagagaacatcactttttttttgttataaattctgtaggcgccgaaacatagttatcttctgccgcttctggcacgagagcttttaatagcatgtttatcacttgtttgtcggttaataccagtttgctgatcaaatcagttcctggcctgtgattataagggaggatgcgatcagtgtcatctaaacgattttatgtaagaaattatttgtatttttatagcatgtttacttacctttgtcaatactgaaatagtcagatgttatttttgaaaagtaaaagtgaagaaagaaaaagcgtaacgtatccgtattgtatccataataaaaaaaatctacccctcgtctggtttccaagttaagccgagatattcataatcgtatcatcaagctaaatcagcttatctggcctcatatattgaatcaaaataaaccattgggtgaagtagatgattcagcattcatcgatgccttctgttcgcagccccagtggattaattacaaacctaaaccatttcggttgtctctcatacagcgatctctaccatcatcggcaatgtcaccaacaccaacttccaaatggtcacttttttggaaactgcctatttcgcctgaaagccgatctttatggtatcgtctattccaccgtaaactctatagtcaatcacttctttcaagatttgataatggtttgacctcttcacactgtaaattttgctctgctaatactgaagacttacaacacctcttcgtgcgctgtcctacgaaatggagagtatggatagatgctttcaatttctttagtccacatctcactttcactcaagacaatgtatgctcaatcctttggtcttttcagcagtttacttttgttgacaacagtgatatctagactctcagctgctgtgtgctttccgttatccggcgtgcccattgaagatttactattgacgactttccttttattgataaacagctggtcactcatgctttgtcgcaatttgccaccctcaaaaggggcagactcgatcttgactagcatgttcaatcgcctacactctgttccgtttggttcataccgctctcagacgtgtggctcctattataatttataaaaataaactatttatttacaaaaaaaaaaaaaaaatatctctccatttgcttacttttgctcgctttttaaattagccaatcataaatttttattcctttcccctcacttgtctatcgggctgaattggttgtaattttgacaacatacctgtcgtattactgttttctgaatagatgtacatacaggaactagcgtcacttgacagctgtccttagatgtaaagtcaaaaataaaatgcagcattttataagtattgattttttatgtcaatagaacctgcttttcatcatcaagtattgttttcttttattagagcaattccatgtttccaatcgcgtcttttgtgtttactttagggtgaaagagtaactgcaatgggatcctatattattatgaaacttatatttcaaaccaacagttaaaaagcgttttcctgggaagaaatctttttaaagcctatatatatagtttataaggaaaacatacaaagaatttttatctgcattatactaaatgtttgattgacacacacttattgaaacctgggtacaccggcagcaccagcctggtcaataaaacatgtgctcaacaacctaaaaattcacaaagtatataatgaatccaactctaaccaattattttcatgagatgtgtaatgtactgcttattttactacagttttttccttatctacaagaaatcatattttattacatgctatatgggttcaaggtttgaaaggacctctgctttttcgatacgcgctaatgtttattctgttcatttgtacaaaaagtacaacattttcaatcaatataaatatcatttgggataaatcccatattcacacagacacgttgattttaaaacgcacggtgcttttatcacagtataagaatgagaaatgaaaacatgaataaatgcatggtttatggattcaaattaaatttaattttattaaaattcaattactagtttgccaaattgattaccacgactacataaaaataaaatgttagtattttttttgttttccacgaaataaagtacgaacctcatagttaggatggcttgttcaaatgtgtttttatttaaacctttccaaacatgtgaaacaataggcctaatcttgtgtttttcgacaaattcaaccatctttctaaattctactcttgatcccatggtaactcctctgtaatcgatatttttgatgaagtaagatatcgggatattcagtccggtcgttacagtagctgtttgaccataacctacaacgatgccacctggtcgcatcagtttaggatattcagcataaagaggaccaccggcaccatcgatgactgcagacagcacgttattgcccaagagttcctttagttcctccatgcagttttctaatcatataatgtcaatattgaactacaagaatcctgaatttctaccatctttataattcactccgcctatagcacccagctcaatactcttttgaatcttttctggagaagaagatgtgacgtaaacatgggcacctgcagctacagcaaactgaagagcaaaaagtgcaacccctcctccaataccagtgattaggatatgttggcctttttgaactaagccctttgtaaacaaggatctataaagtacgttacgatcaaaattaagcttttttttacaaaagactttttggtacctgtaggcagtcaatccagccaatggcaaagcagcggcttctgtcattgaaagaaattcaggacaaggcacaatgtcctccttttcgacaatgacttcttcttttgtaaatgtgccaatcactggcaagagacccaatatgtgaaagtcacgttcaggacctctttcatccgaatcccatccatatccgggattaatcaagacacgttgtcctctttggccattcttcgtaatgtaaccaacgccatcagagcccaacacagaatctaatacagtaccatcatattgatccataaggatccaaacatccctttttaaaaaaaattaaaaaaagtcaagaaggagcctggttttgtttttaccgatggttgaaagcagcagcttgtatttggacagctacttgatgatccgcaaggttctcggaggatttgtgttccttgaattcaacgccgtacttgaattttgaatcaaaaggttgagtttcagtgagaatagcagagaccattttgtttcaaaaggcagtaatgatgtggtaaaggtagtgaaatggttgtatttatagtcattaaaaaaagcggaggggttagattaataagcagtaaacagctgctgtcacaaataccatttttcaaatgaattaataagcgcgctgaactctattagttttaaagcatcgttgatgaatcatatattcagatataatttattagcatcgtttattcaatcaacacgcaagattaaatgaatttgttcgtatccaaaaccaacttgctaatcttttaggacgtattttttattataaatttttcattttgttaactgtagtacaaaagctgagaattgtaaacgttctgatagattttattaataagccttctattatctgcaaaaccaaccaagatttgatgaaaaaaagaaaagaaaagcatattattcgttttcataaagaaaaattgtgtagtctttaattatagtttattgagatcaagctatacagtagcagaactaaggacacgcttaacaaaagctgtcatcgatatccactttttttttaaacctcaacttgttacttgaatatcatgtacttgcgtgaaataaaagggtatttttcataaacatttgaatgtatttatattgctttgtgctttgaaataacagcttgctgttgtaacatttagttattttatgctttttttatatagaaagttctttgataagtagcatgttttagataatgttatattagtttattacaatttgcattaagtaaagtaattgaaatttatagatgaatttaggaaaagagaggaaaaagaagaatgaaggttgaatgaaatataaacattttcgtctaatcctctaagcatccgagtagtctcgcatgtttttggtggaggcctttttggcaattcgtccacctaaactctttagtcctaaactgtgtcctgggttaccgacttgaaggtttttgagaccatcctcaaatggaaggccagtgacagtggcatcctcggttcctgcctttttagcatatcgcttaatgttggtttttgataaattaatacggaatgcagtgtctagtaaattgttgggttcaaggtattcatgtggaatatgtaaaaggaaggcaagaagttctgaattggttggacatgagtgtaagagatgatctaaatattatttaaaagaaatgtacattggtaaatattccatatccttttctcacctttgcataaatctagaatggctaggcttactcgataaaacactttaatgcctaagaagaaggaatgtatgtaagctgaggatctgaatatgtgtccttttcgtgttttttttagtttaccctcaaaataaaacgcgtcccaaacacgtagcactgattcccaaggaagtgtcatggtaaatgcagttaggaaccattgggctatatacatgattggaagtacatcattgttttctaaatgctgagccaactttgggttatgatcctttaataattgcccaatgatgtatgcatcaattcttaactgggaaagtgtaggtgtgaagtatccattcatataccgatcaatagtagccaccaataaccaaaacgagtcctttttttaatacaaaaatagttaatccatcaactctagatttctatttcttttcttttttttctattacttcgacagtcatctgcataagcattagtcctgctaaacggcccatgccttggcaatattctaaatcagaattgtattgggcatatgcttttaatatatttcgcaaattctgttgtcccaagccatccttttccataaattgtgtgtgatcaggataacatcgttcaatatctctttcaatcacgtcgtaaatagggatcctaggcttggacaacaggttttgaaattgatttgatctcttgtagtcatcactaccagccaagaattgccacactttggctctcacagatgctggtattcctccacgaaccaattttttcatctttacatcctttttaaccgttccagcatcgagtttgttgattatatttaaccattttaattcattttctctgtattctttcatagctttggtagacatatttgctctgcatgtaaataaactattagcttcctgggaagataaaatggggtttcagggggtgaggaacaatgaagaagacatgtacctgaatgaaggacgaccgcgtttgataatgaatccatattcatcaacattttcattttgaataaaagttgaattgttattattctttgttggtgtagtctggcttttcctttgtacaccggtgttttgtatattagtagctactgggcgtgcaggagatcttggtggtggtatagggccgtacagttctgtgttctcttcatccgagtaatcaatgttgagtgcagatgtatcaaatggatcatgattattgttgttattatctaatcatatattacacgtataagattaattttatgattattgataagctgcttttttttttctgtacctagattttctccagaataattgtaggaatcgtatgatattcgagactcttttatattatgacttgaagaagtcgaaactgagcctatactttcaaaactcggcttactgacccagtgtctcgatgagggtacgggtgaagcatatcgatcagaattggaagaaaatgaatgaatagagcctcttaattggttgaattgttcttgtctatttttcatcatttctatatcaaattctgttccatggctacttgtagagtttctatattgcgaatggtcggtaaaatcaagatcagcgtcaagcgattctaatacacgaggatctaattctacaaaatgcacggtttctgcattaaaatttccaataacgccttcacagtatccctaaaagatctcttatattggtaaatctttatataaaatacagcattgtgctgtgtttatttaccatgtaaatatcattctctatatgttttaatatagtaatcctttctcctgtaaacaaatttagccttattttatatctaaaatgcctgtgtacacaaaccttgcaaatacatcagttcttcaggagtgttggccaaaatatccacttttgatacacaagcgcctaaaccacctatatattttttaacttggtcgatgtcacaatcctgtattgttgtaggaaacatacctttctcagcaaaggctttcaactcggctaaactcatcgaatcgacatctattgaagcattatccaaagcttctgctggatctttcaatagtcgtgcaatcttttcattaagctcttcgagattagcagaggtatgtcgtgtaatttttggttccatatatcaagtcaaaaaagagaaaaataaaataaggaagttccctccttttatatgaaagaaggaagaaaaaaaaggtgaagaggatggtttactcccaaataaggaagacatgtgcgattaaacaccgctatgagttacgtggagaagaacctttttttattgtttatttaaaaagtaacaaaatggcccccattttaaatgtctaaatcatcatctggatcttcgtcatcaaagtcatcagcagcgtcaggatcgtaa

SEQ ID NO: 223 - DNA, 3061 bp, Rhizopus sp.
  source 1..3061: mol_type = other DNA
ttctttgttgaagtttttctgagtcttgttctctcaaagggtggaaatagcacaagactgaaggatacgaccaaaaactataggcgattgatatcaaaatataaagaagcttactttgaagacgctggttatactccccccaacttaccatatgctcagcaaatagccttgtacgagtgtatgaagatccaaacggcctactataataacatcaaagctcattttggaaacaggctgcgtggtttgataaacaagttatttaaaaagaaggaaaaggcagagagtctcagaggagaaatgcaagcaaacaagtctagtagtaaagcgataaaagaagctacccgaaagaagatttatggaccttgcaatcaggtgaagcttgccatcgcaaaaaaagagatgcctgaagttggtcttttagatgaccaatcaagaacgcaattaaatgattttctctcaagctactcagaggactacacctttcaaaagaactcaatttactatgacgttatggctagtccaaaaaaccatttcaaagccttcttcagacttgctgaactgtctgaagctgaacagacgaaacagtttgcttgtttcccgctacgtaccacctttatttcttgccacatgacgttggatagcaaaataatccattaccatgttctcaagagcaaaaagaatccaaaaacaggaagcaagtttgagacatagggtgctatcatagacctaaataaaagatgttcgcgcaccaaggatttcaaaagcctttgaggttccaaggaattctcgaaacagatggagtcggtgtctccataataaagcaaaacactgatacaagcagaaagtcgcctaagcccaacgctgaaaagaaagtggacggtaatcaaacagagcatattgaaggactagatcaagccgacttaaagagcgctgaaggcaagtgcgtcttgatagacactggaagacgggacttgatgtactgcatgaaagaaaccagcactgttgaagaaaaacaaacacttatatttaccaagaacaaccgctcaaaatgctcaaggcacttcagatatttaagaaggcgtgctcaaccttttgtggtccagaaagccgaagcaatcttttctagatctaaatccaactctgtagacttgaaaaagtttgtacagtacattaaaacaagagcatcagtaaaaaccattttgtacgaatacagtgctcacggcttcaaattgcgtccaaaaaaaaattcattgcgcatctttaattttcaaacagcgcatctttatttggtcaaattgcgcacttgtgatttctcaaactgcgctaataaaaaagtcaaactgcatattttacaactcaaattgcattatttttattcgtacctaagctattatctctttaaaagcaaatatcagatcgataacatgtactcaataaaaggaaaaattatttttgaagatggtcaaggaaatgtttttgatgagagcgggaatgaagcaatggactgggatgaggaagttgatactcataatttggagaacctaaccaacctaacacgctatttgaataagcaagtacagccggaaatggacttagacagtctggattttgttgaaaaaatgaaaacaatagagaagaaccttgaagagaaaaaaacgaaaagcaataataaaaaaaatctatattctgatgaccaaaaaaacgttatttatatatcttcacaagataaaattgttaaacgcagctgaatcggctcggagagcgggagtgaaagtacgtacagggcaagcgtggtctgcaagaatgaaggaagatcctaactggaatatatacgaaaagcaaacgaatcagaacaaaattggtacaggtcagctacaggagaagcataaagcttttcttcttgattattttgatgagtatccttcagctcgagttaaagatgcaattgatggccttacggaaaacttcgaaaacttctccttgaaagaaactgttgtgggaaagtacattagagaggattgtaatttaacaataaaaaaaagttacccgccatccacatgcaagaaacactgacaatactcgtaaagaaagacacgactgggtgaaaacttggtcgaaaacagatatggatttcaatagtaattgtgtctttattgacgaaagcgctttcgacattaatatgaggccaccaacagctagatctgctcgaggtacaccagtcataattactacgccaacaacaagggctataagccatacgattcttggtgcaatatgtcctatgggagtcgtcaacatggagatcagagttcctttaaaatcaaaaagaataaaagttgcaggaagccgcaaaagaaaaagtccagcagcgaaaaaaccagcaacaggtggcaccaattcaggtcattacgatagatttatgaacttaacgttggatgagatggacaagtatccggaaatgaaaggattttatttggttatggacaactcgcctattcatgacaaaaagagtggagagattgacaagatgattgaagattgaggctataagtgtgtttatctcccgaagtactcaccagaacttaaccctattgaacagttttgggcaagcgtcaaacacaaagtaagaagaagccaatttggtaatacagaggacctcaagacaagaataagcgaggcttgcgatgctgttcctgcacagcatatgaaaaactttattcaacactctgttaacgtgtttgagaaatgcttaaatgatataccgatttaaaagataaatcttttatataattcataatatgtagtatatgaaataaactgatgcatttttcttcctgacaacccactaacaatatgatgtaaaattaataaacctttttcaatttctctatatgggcctagatattcaattgatccgtatataacatttaaaaaataaaatactggtatataacctaattgttccaacaatacatctttaataaatcttataaattttacatcttttaattctgatctatgatccagttcgtatttagaaataggcattcatttgctatca

SEQ ID NO: 224 - DNA, 11480 bp, Rhizopus sp.; identical to SEQ ID NO: 222
  source 1..11480: mol_type = other DNA

SEQ ID NO: 225 - DNA, 11514 bp, Rhizopus sp.
  source 1..11514: mol_type = other DNA
aggctgcgtggtttgataaacaagttatttaaaaagaaggaaaaggcagagagtctcagaggagaaatgcaagcaaacaagtctagtagtaaagcgataaaagaagctacccgaaagaagatttatggaccttgcaatcaggtgaagcttgccatcgcaaaaaaagagatgcctgaagttggtcttttagatgaccaatcaagaacgcaattaaatgattttctctcaagctactcagaggactacacctttcaaaagaactcaatttactatgacgttatggctagtccaaaaaaccatttcaaagccttcttcagacttgctgaactgtctgaagctgaacagacgaaacagtttgcttgtttcccgctacgtaccacctttatttcttgccacatgacgttggatagcaaaataatccattaccatgttctcaagagcaaaaagaatccaaaaacaggaagcaagtttgagacatagggtgctatcatagacctaaataaaagatgttcgcgcaccaaggatttcaaaagcctttgaggttccaaggaattctcgaaacagatggagtcggtgtctccataataaagcaaaacactgatacaagcagaaagtcgcctaagcccaacgctgaaaagaaagtggacggtaatcaaacagagcatattgaaggactagatcaagccgacttaaagagcgctgaaggcaagtgcgtcttgatagacactggaagacgggacttgatgtactgcatgaaagaaaccagcactgttgaagaaaaacaaacacttatatttaccaagaacaaccgctcaaaatgctcaaggcacttcagatatttaagaaggcgtgctcaaccttttgtggtccagaaagccgaagcaatcttttctagatctaaatccaactctgtagacttgaaaaagtttgtacagtacattaaaacaagagcatcagtaaaaaccattttgtacgaatacagtgctcacggcttcaaattgcgtccaaaaaaaaattcattgcgcatctttaattttcaaacagcgcatctttatttggtcaaattgcgcacttgtgatttctcaaactgcgctaataaaaaagtcaaactgcatattttacaactcaaattgcattatttttattcgtacctaagctattatctctttaaaagcaaatatcagatcgataacatgtactcaataaaaggaaaaattatttttgaagatggtcaaggaaatgtttttgatgagagcgggaatgaagcaatggactgggatgaggaagttgatactcataatttggagaacctaaccaacctaacacgctatttgaataagcaagtacagccggaaatggacttagacagtctggattttgttgaaaaaatgaaaacaatagagaagaaccttgaagagaaaaaaacgaaaagcaataataaaaaaaatctatattctgatgaccaaaaaaacgttatttatatatcttcacaagataaaattgttaaacgcagctgaatcggctcggagagcgggagtgaaagtacgtacagggcaagcgtggtctgcaagaatgaaggaagatcctaactggaatatatacgaaaagcaaacgaatcagaacaaaattggtacaggtcagctacaggagaagcataaagcttttcttcttgattattttgatgagtatccttcagctcgagttaaagatgcaattgatggccttacggaaaacttcgaaaacttctccttgaaagaaactgttgtgggaaagtacattagagaggattgtaatttaacaataaaaaaaagttacccgccatccacatgcaagaaacactgacaatactcgtaaagaaagacacgactgggtgaaaacttggtcgaaaacagatatggatttcaatagtaattgtgtctttattgacgaaagcgctttcgacattaatatgaggccaccaacagctagatctgctcgaggtacaccagtcataattactacgccaacaacaagggctataagccatacgattcttggtgcaatatgtcctatgggagtcgtcaacatggagatcagagttcctttaaaatcaaaaagaataaaagttgcaggaagccgcaaaagaaaaagtccagcagcgaaaaaaccagcaacaggtggcaccaattcaggtcattacgatagatttatgaacttaacgttggatgagatggacaagtatccggaaatgaaaggattttatttggttatggacaactcgcctattcatgacaaaaagagtggagagattgacaagatgattgaagattgaggctataagtgtgtttatctcccgaagtactcaccagaacttaaccctattgaacagttttgggcaagcgtcaaacacaaagtaagaagaagccaatttggtaatacagaggacctcaagacaagaataagcgaggcttgcgatgctgttcctgcacagcatatgaaaaactttattcaacactctgttaacgtgtttgagaaatgcttaaatgatataccgatttaaaagataaatcttttatataattcataatatgtagtatatgaaataaactgatgcatttttcttcctgacaacccactaacaatatgatgtaaaattaataaacctttttcaatttctctatatgggcctagatattcaattgatccgtatataacatttaaaaaataaaatactggtatataacctaattgttccaacaatacatctttaataaatcttataaattttacatcttttaattctgatctatgatccagttcgtatttagaaataggcattcatttgctatcagtttatttacttctttatttaaaatatctttgtataaactttcctcttcactttctgtcattatatattgatattcaattttttaaaaaacatcagcttttttatgacaatatatgattcgctacgctacgctacgatacgatacgctacgatacgcgaataaataaaagagttttattggtcaatttaagtataaatcgggatttttttcaacaaagggtatttatggatactgcaaccttttttaacgcttgtatgaatgtttctgttagaaatgagcggtaagttagatttacattgaaattgtgaatattttctctataacatgcaagaagaaattttagacgaaaatgacaaagagttttataattttgttgtcccaactgaatatcatcctggaattgatttaatcagcaaggtcattttaactgatgtacgagtccttaacgtcataactacagctattgctaaagcatcaaaacgttcatatgttattgaacctctagagatcccacataaacagtttggtgctgtcctatacattccccatggtcttcaaaatagtttacctttgatagtcatcaatactattacgacctttgaagaaacgaagtttaatcaaattatttaacaaagcaccaatatttttgaacggtataacacccttcctatttgtgtgatcatcgttgctcagcaacttgatgaaaaaattattgaacaaagctcccagcaccaagagctcccattccttcgagaaataccatgtgcattttgggcaaagcagtgtatattagtgtcatcaaaggatagtaggctcaacaagggtaaattaaaacaccatccattattggatattataattgctatcacaagcaatgaaaaagtcatgttatgtaatgatgaactataataaaattgtttatttaaattttctattatagacttcgtagactctcactagtattgaattgcttaattgactcaatattttcaagatgtcctgttttgaagcattctttccaattgattctcgttgtttttttgaaacgttggacgaaatcatataattctgcattatccacttcattctcaagttctacagtgcttagttgtcttcttttgttgagataaaccaaaggaggagtctcttcaattggcgttgtttcgattgcttcacagtattttcttttctgtcgtttcaagaattccaaagtagcttccacatagcttaatgactttttttttgacgcttcatctcctttttctaggcattttttttatctcgcgcagttggatttcactaatactacaaattttgtttatagcctccaatctttcagcttcttctccaactaactggtcaagattatcatgcgcaattgagtatagtaattttactaaagaatcattccttccatagtctaaagtactaatcaacaaagactgagagcaaaggaaatagccaaccgcttgcaaaggatgtaatattttttcttgttgtttcatctgtaaagtcgaagatgtcagtagcaaacaatgtttagcccatccagtgcttagtatctgtctcgcaaaggggaggtcactatctataggcttgctcagaaaaggtgctgtactacttccaattccaaatatcacaatgataggaagcctgttgtagcgttcgtatgtgagtgtgcagtattgaatggcacgtgccaagaatttgtcgtcggcttgattttgtacttcaactagtacagatggaaatgaactcaagggatcgcggggagcatagagaacatcactttttttttgttataaattctgtaggcgccgaaacatagttatcttctgccgcttctggcacgagagcttttaatagcatgtttatcacttgtttgtcggttaataccagtttgctgatcaaatcagttcctggcctgtgattataagggaggatgcgatcagtgtcatctaaacgattttatgtaagaaattatttgtatttttatagcatgtttacttacctttgtcaatactgaaatagtcagatgttatttttgaaaagtaaaagtgaagaaagaaaaagcgtaacgtatccgtattgtatccataataaaaaaaatctacccctcgtctggtttccaagttaagccgagatattcataatcgtatcatcaagctaaatcagcttatctggcctcatatattgaatcaaaataaaccattgggtgaagtagatgattcagcattcatcgatgccttctgttcgcagccccagtggattaattacaaacctaaaccatttcggttgtctctcatacagcgatctctaccatcatcggcaatgtcaccaacaccaacttccaaatggtcacttttttggaaactgcctatttcgcctgaaagccgatctttatggtatcgtctattccaccgtaaactctatagtcaatcacttctttcaagatttgataatggtttgacctcttcacactgtaaattttgctctgctaatactgaagacttacaacacctcttcgtgcgctgtcctacgaaatggagagtatggatagatgctttcaatttctttagtccacatctcactttcactcaagacaatgtatgctcaatcctttggtcttttcagcagtttacttttgttgacaacagtgatatctagactctcagctgctgtgtgctttccgttatccggcgtgcccattgaagatttactattgacgactttccttttattgataaacagctggtcactcatgctttgtcgcaatttgccaccctcaaaaggggcagactcgatcttgactagcatgttcaatcgcctacactctgttccgtttggttcataccgctctcagacgtgtggctcctattataatttataaaaataaactatttatttacaaaaaaaaaaaaaaaatatctctccatttgcttacttttgctcgctttttaaattagccaatcataaatttttattcctttcccctcacttgtctatcgggctgaattggttgtaattttgacaacatacctgtcgtattactgttttctgaatagatgtacatacaggaactagcgtcacttgacagctgtccttagatgtaaagtcaaaaataaaatgcagcattttataagtattgattttttatgtcaatagaacctgcttttcatcatcaagtattgttttcttttattagagcaattccatgtttccaatcgcgtcttttgtgtttactttagggtgaaagagtaactgcaatgggatcctatattattatgaaacttatatttcaaaccaacagttaaaaagcgttttcctgggaagaaatctttttaaagcctatatatatagtttataaggaaaacatacaaagaatttttatctgcattatactaaatgtttgattgacacacacttattgaaacctgggtacaccggcagcaccagcctggtcaataaaacatgtgctcaacaacctaaaaattcacaaagtatataatgaatccaactctaaccaattattttcatgagatgtgtaatgtactgcttattttactacagttttttccttatctacaagaaatcatattttattacatgctatatgggttcaaggtttgaaaggacctctgctttttcgatacgcgctaatgtttattctgttcatttgtacaaaaagtacaacattttcaatcaatataaatatcatttgggataaatcccatattcacacagacacgttgattttaaaacgcacggtgcttttatcacagtataagaatgagaaatgaaaacatgaataaatgcatggtttatggattcaaattaaatttaattttattaaaattcaattactagtttgccaaattgattaccacgactacataaaaataaaatgttagtattttttttgttttccacgaaataaagtacgaacctcatagttaggatggcttgttcaaatgtgtttttatttaaacctttccaaacatgtgaaacaataggcctaatcttgtgtttttcgacaaattcaaccatctttctaaattctactcttgatcccatggtaactcctctgtaatcgatatttttgatgaagtaagatatcgggatattcagtccggtcgttacagtagctgtttgaccataacctacaacgatgccacctggtcgcatcagtttaggatattcagcataaagaggaccaccggcaccatcgatgactgcagacagcacgttattgcccaagagttcctttagttcctccatgcagttttctaatcatataatgtcaatattgaactacaagaatcctgaatttctaccatctttataattcactccgcctatagcacccagctcaatactcttttgaatcttttctggagaagaagatgtgacgtaaacatgggcacctgcagctacagcaaactgaagagcaaaaagtgcaacccctcctccaataccagtgattaggatatgttggcctttttgaactaagccctttgtaaacaaggatctataaagtacgttacgatcaaaattaagcttttttttacaaaagactttttggtacctgtaggcagtcaatccagccaatggcaaagcagcggcttctgtcattgaaagaaattcaggacaaggcacaatgtcctccttttcgacaatgacttcttcttttgtaaatgtgccaatcactggcaagagacccaatatgtgaaagtcacgttcaggacctctttcatccgaatcccatccatatccgggattaatcaagacacgttgtcctctttggccattcttcgtaatgtaaccaacgccatcagagcccaacacagaatctaatacagtaccatcatattgatccataaggatccaaacatccctttttaaaaaaaattaaaaaaagtcaagaaggagcctggttttgtttttaccgatggttgaaagcagcagcttgtatttggacagctacttgatgatccgcaaggttctcggaggatttgtgttccttgaattcaacgccgtacttgaattttgaatcaaaaggttgagtttcagtgagaatagcagagaccattttgtttcaaaaggcagtaatgatgtggtaaaggtagtgaaatggttgtatttatagtcattaaaaaaagcggaggggttagattaataagcagtaaacagctgctgtcacaaataccatttttcaaatgaattaataagcgcgctgaactctattagttttaaagcatcgttgatgaatcatatattcagatataatttattagcatcgtttattcaatcaacacgcaagattaaatgaatttgttcgtatccaaaaccaacttgctaatcttttaggacgtattttttattataaatttttcattttgttaactgtagtacaaaagctgagaattgtaaacgttctgatagattttattaataagccttctattatctgcaaaaccaaccaagatttgatgaaaaaaagaaaagaaaagcatattattcgttttcataaagaaaaattgtgtagtctttaattatagtttattgagatcaagctatacagtagcagaactaaggacacgcttaacaaaagctgtcatcgatatccactttttttttaaacctcaacttgttacttgaatatcatgtacttgcgtgaaataaaagggtatttttcataaacatttgaatgtatttatattgctttgtgctttgaaataacagcttgctgttgtaacatttagttattttatgctttttttatatagaaagttctttgataagtagcatgttttagataatgttatattagtttattacaatttgcattaagtaaagtaattgaaatttatagatgaatttaggaaaagagaggaaaaagaagaatgaaggttgaatgaaatataaacattttcgtctaatcctctaagcatccgagtagtctcgcatgtttttggtggaggcctttttggcaattcgtccacctaaactctttagtcctaaactgtgtcctgggttaccgacttgaaggtttttgagaccatcctcaaatggaaggccagtgacagtggcatcctcggttcctgcctttttagcatatcgcttaatgttggtttttgataaattaatacggaatgcagtgtctagtaaattgttgggttcaaggtattcatgtggaatatgtaaaaggaaggcaagaagttctgaattggttggacatgagtgtaagagatgatctaaatattatttaaaagaaatgtacattggtaaatattccatatccttttctcacctttgcataaatctagaatggctaggcttactcgataaaacactttaatgcctaagaagaaggaatgtatgtaagctgaggatctgaatatgtgtccttttcgtgttttttttagtttaccctcaaaataaaacgcgtcccaaacacgtagcactgattcccaaggaagtgtcatggtaaatgcagttaggaaccattgggctatatacatgattggaagtacatcattgttttctaaatgctgagccaactttgggttatgatcctttaataattgcccaatgatgtatgcatcaattcttaactgggaaagtgtaggtgtgaagtatccattcatataccgatcaatagtagccaccaataaccaaaacgagtcctttttttaatacaaaaatagttaatccatcaactctagatttctatttcttttcttttttttctattacttcgacagtcatctgcataagcattagtcctgctaaacggcccatgccttggcaatattctaaatcagaattgtattgggcatatgcttttaatatatttcgcaaattctgttgtcccaagccatccttttccataaattgtgtgtgatcaggataacatcgttcaatatctctttcaatcacgtcgtaaatagggatcctaggcttggacaacaggttttgaaattgatttgatctcttgtagtcatcactaccagccaagaattgccacactttggctctcacagatgctggtattcctccacgaaccaattttttcatctttacatcctttttaaccgttccagcatcgagtttgttgattatatttaaccattttaattcattttctctgtattctttcatagctttggtagacatatttgctctgcatgtaaataaactattagcttcctgggaagataaaatggggtttcagggggtgaggaacaatgaagaagacatgtacctgaatgaaggacgaccgcgtttgataatgaatccatattcatcaacattttcattttgaataaaagttgaattgttattattctttgttggtgtagtctggcttttcctttgtacaccggtgttttgtatattagtagctactgggcgtgcaggagatcttggtggtggtatagggccgtacagttctgtgttctcttcatccgagtaatcaatgttgagtgcagatgtatcaaatggatcatgattattgttgttattatctaatcatatattacacgtataagattaattttatgattattgataagctgcttttttttttctgtacctagattttctccagaataattgtaggaatcgtatgatattcgagactcttttatattatgacttgaagaagtcgaaactgagcctatactttcaaaactcggcttactgacccagtgtctcgatgagggtacgggtgaagcatatcgatcagaattggaagaaaatgaatgaatagagcctcttaattggttgaattgttcttgtctatttttcatcatttctatatcaaattctgttccatggctacttgtagagtttctatattgcgaatggtcggtaaaatcaagatcagcgtcaagcgattctaatacacgaggatctaattctacaaaatgcacggtttctgcattaaaatttccaataacgccttcacagtatccctaaaagatctcttatattggtaaatctttatataaaatacagcattgtgctgtgtttatttaccatgtaaatatcattctctatatgttttaatatagtaatcctttctcctgtaaacaaatttagccttattttatatctaaaatgcctgtgtacacaaaccttgcaaatacatcagttcttcaggagtgttggccaaaatatccacttttgatacacaagcgcctaaaccacctatatattttttaacttggtcgatgtcacaatcctgtattgttgtaggaaacatacctttctcagcaaaggctttcaactcggctaaactcatcgaatcgacatctattgaagcattatccaaagcttctgctggatctttcaatagtcgtgcaatcttttcattaagctcttcgagattagcagaggtatgtcgtgtaatttttggttccatatatcaagtcaaaaaagagaaaaataaaataaggaagttccctccttttatatgaaagaaggaagaaaaaaaaggtgaagaggatggtttactcccaaataaggaagacatgtgcgattaaacaccgctatgagttacgtggagaagaacctttttttattgtttatttaaaaagtaacaaaatggcccccattttaaatgtctaaatcatcatctggatcttcgtcatcaaagtcatcagcagcgtcaggatcgtaa

SEQ ID NO: 226 - DNA, 12520 bp, Rhizopus sp.
  source 1..12520: mol_type = other DNA
accacaaaattgatactattatagactcatttgaaatatatgtagaagacaactcagacgacgacttccaacccgttgtaacagctagaaaaagaaaaagtaagttgcattgtcaagcttgatgtaggtaaacagctagtttaacgtatgaaactccatcataggtagggaaaatactccacagagtggattacaaaagaggctcaaaggcaaaggaaaagctacagattctgaagttactactacgagtagtactggtatctctacaacagatgaaactatcatgttcaataagatcactcttgatgactatgatcttgaatatagcagtgacgattttgatgcacctgtcgtcaaaagaccctttttgggtgaatcaaccaaatctgcttttcgtatcaccaaatcaacttctgctattgtggagtcaagcacaactgcttctaaaacaagtctaactttccccaagcctagtaaacctgttccaactgctttcaattcagctgcaacttctgtcaagccaagtttttgtcctgtgcctattgacaaggcaagtgacattaaagaaggccctaaaaagataagcaagcgtgtgatgacaattaaagcgactgtaaataatatttggaaaccagcatatttacaggcattacatgatttggttcacactaccaacttactagttacacatacctttgccttcacaaagtacatatatttacaagaactggcatcaaatggaaattttgcactgaacaactttgtgacaaaagatttctttgttgaagtttttctgagtcttgttctctccaagggtggaaatagcacaagactgaaggatacgaccaaaaactataggcgattgatatcaaaatataaagaagcttactttgaagacgctggttatactccccccaacttaccatatgctcagcaaatagccttgtacgagtgtatgaagatccaaacggcctactataataacatcaaagctcattttggaaacaggctgcgtggtttgataaacaagttatttaaaaagaaggaaaaggcagagagtctcagaggagaaatgcaagcaaacaagtctagtagtaaagcgataaaagaagctacccgaaagaagatttatggaccttgcaatcaggtgaagcttgccatcgcaaaaaaagagatgcctgaagttggtcttttagatgaccaatcaagaacgcaattaaatgattttctctcaagctactcagaggactacacctttcaaaagaactcaatttactatgacgttatggctagtccaaaaaaccatttcaaagccttcttcagacttgctgaactgtctgaagctgaacagacgaaacagtttgcttgtttcccgctacgtaccacctttatttcttgccacatgacgttggatagcaaaataatccattaccatgttctcaagagcaaaaagaatccaaaaacaggaagcaagtttgagacatagggtgctatcatagacctaaataaaagatgttcgcgcaccaaggatttcaaaagcctttgaggttccaaggaattctcgaaacagatggagtcggtgtctccataataaagcaaaacactgatacaagcagaaagtcgcctaagcccaacgctgaaaagaaagtggacggtaatcaaacagagcatattgaaggactagatcaagccgacttaaagagcgctgaaggcaagtgcgtcttgatagacactggaagacgggacttgatgtactgcatgaaagaaaccagcactgttgaagaaaaacaaacacttatatttaccaagaacaaccgctcaaaatgctcaaggcacttcagatatttaagaaggcgtgctcaaccttttgtggtccagaaagccgaagcaatcttttctagatctaaatccaactctgtagacttgaaaaagtttgtacagtacattaaaacaagagcatcagtaaaaaccattttgtacgaatacagtgctcacggcttcaaattgcgtccaaaaaaaaattcattgcgcatctttaattttcaaacagcgcatctttatttggtcaaattgcgcacttgtgatttctcaaactgcgctaataaaaaagtcaaactgcatattttacaactcaaattgcattatttttattcgtacctaagctattatctctttaaaagcaaatatcagatcgataacatgtactcaataaaaggaaaaattatttttgaagatggtcaaggaaatgtttttgatgagagcgggaatgaagcaatggactgggatgaggaagttgatactcataatttggagaacctaaccaacctaacacgctatttgaataagcaagtacagccggaaatggacttagacagtctggattttgttgaaaaaatgaaaacaatagagaagaaccttgaagagaaaaaaacgaaaagcaataataaaaaaaatctatattctgatgaccaaaaaaacgttatttatatatcttcacaagataaaattgttaaacgcagctgaatcggctcggagagcgggagtgaaagtacgtacagggcaagcgtggtctgcaagaatgaaggaagatcctaactggaatatatacgaaaagcaaacgaatcagaacaaaattggtacaggtcagctacaggagaagcataaagcttttcttcttgattattttgatgagtatccttcagctcgagttaaagatgcaattgatggccttacggaaaacttcgaaaacttctccttgaaagaaactgttgtgggaaagtacattagagaggattgtaatttaacaataaaaaaaagttacccgccatccacatgcaagaaacactgacaatactcgtaaagaaagacacgactgggtgaaaacttggtcgaaaacagatatggatttcaatagtaattgtgtctttattgacgaaagcgctttcgacattaatatgaggccaccaacagctagatctgctcgaggtacaccagtcataattactacgccaacaacaagggctataagccatacgattcttggtgcaatatgtcctatgggagtcgtcaacatggagatcagagttcctttaaaatcaaaaagaataaaagttgcaggaagccgcaaaagaaaaagtccagcagcgaaaaaaccagcaacaggtggcaccaattcaggtcattacgatagatttatgaacttaacgttggatgagatggacaagtatccggaaatgaaaggattttatttggttatggacaactcgcctattcatgacaaaaagagtggagagattgacaagatgattgaagattgaggctataagtgtgtttatctcccgaagtactcaccagaacttaaccctattgaacagttttgggcaagcgtcaaacacaaagtaagaagaagccaatttggtaatacagaggacctcaagacaagaataagcgaggcttgcgatgctgttcctgcacagcatatgaaaaactttattcaacactctgttaacgtgtttgagaaatgcttaaatgatataccgatttaaaagataaatcttttatataattcataatatgtagtatatgaaataaactgatgcatttttcttcctgacaacccactaacaatatgatgtaaaattaataaacctttttcaatttctctatatgggcctagatattcaattgatccgtatataacatttaaaaaataaaatactggtatataacctaattgttccaacaatacatctttaataaatcttataaattttacatcttttaattctgatctatgatccagttcgtatttagaaataggcattcatttgctatcagtttatttacttctttatttaaaatatctttgtataaactttcctcttcactttctgtcattatatattgatattcaattttttaaaaaacatcagcttttttatgacaatatatgattcgctacgctacgctacgatacgatacgctacgatacgcgaataaataaaagagttttattggtcaatttaagtataaatcgggatttttttcaacaaagggtatttatggatactgcaaccttttttaacgcttgtatgaatgtttctgttagaaatgagcggtaagttagatttacattgaaattgtgaatattttctctataacatgcaagaagaaattttagacgaaaatgacaaagagttttataattttgttgtcccaactgaatatcatcctggaattgatttaatcagcaaggtcattttaactgatgtacgagtccttaacgtcataactacagctattgctaaagcatcaaaacgttcatatgttattgaacctctagagatcccacataaacagtttggtgctgtcctatacattccccatggtcttcaaaatagtttacctttgatagtcatcaatactattacgacctttgaagaaacgaagtttaatcaaattatttaacaaagcaccaatatttttgaacggtataacacccttcctatttgtgtgatcatcgttgctcagcaacttgatgaaaaaattattgaacaaagctcccagcaccaagagctcccattccttcgagaaataccatgtgcattttgggcaaagcagtgtatattagtgtcatcaaaggatagtaggctcaacaagggtaaattaaaacaccatccattattggatattataattgctatcacaagcaatgaaaaagtcatgttatgtaatgatgaactataataaaattgtttatttaaattttctattatagacttcgtagactctcactagtattgaattgcttaattgactcaatattttcaagatgtcctgttttgaagcattctttccaattgattctcgttgtttttttgaaacgttggacgaaatcatataattctgcattatccacttcattctcaagttctacagtgcttagttgtcttcttttgttgagataaaccaaaggaggagtctcttcaattggcgttgtttcgattgcttcacagtattttcttttctgtcgtttcaagaattccaaagtagcttccacatagcttaatgactttttttttgacgcttcatctcctttttctaggcattttttttatctcgcgcagttggatttcactaatactacaaattttgtttatagcctccaatctttcagcttcttctccaactaactggtcaagattatcatgcgcaattgagtatagtaattttactaaagaatcattccttccatagtctaaagtactaatcaacaaagactgagagcaaaggaaatagccaaccgcttgcaaaggatgtaatattttttcttgttgtttcatctgtaaagtcgaagatgtcagtagcaaacaatgtttagcccatccagtgcttagtatctgtctcgcaaaggggaggtcactatctataggcttgctcagaaaaggtgctgtactacttccaattccaaatatcacaatgataggaagcctgttgtagcgttcgtatgtgagtgtgcagtattgaatggcacgtgccaagaatttgtcgtcggcttgattttgtacttcaactagtacagatggaaatgaactcaagggatcgcggggagcatagagaacatcactttttttttgttataaattctgtaggcgccgaaacatagttatcttctgccgcttctggcacgagagcttttaatagcatgtttatcacttgtttgtcggttaataccagtttgctgatcaaatcagttcctggcctgtgattataagggaggatgcgatcagtgtcatctaaacgattttatgtaagaaattatttgtatttttatagcatgtttacttacctttgtcaatactgaaatagtcagatgttatttttgaaaagtaaaagtgaagaaagaaaaagcgtaacgtatccgtattgtatccataataaaaaaaatctacccctcgtctggtttccaagttaagccgagatattcataatcgtatcatcaagctaaatcagcttatctggcctcatatattgaatcaaaataaaccattgggtgaagtagatgattcagcattcatcgatgccttctgttcgcagccccagtggattaattacaaacctaaaccatttcggttgtctctcatacagcgatctctaccatcatcggcaatgtcaccaacaccaacttccaaatggtcacttttttggaaactgcctatttcgcctgaaagccgatctttatggtatcgtctattccaccgtaaactctatagtcaatcacttctttcaagatttgataatggtttgacctcttcacactgtaaattttgctctgctaatactgaagacttacaacacctcttcgtgcgctgtcctacgaaatggagagtatggatagatgctttcaatttctttagtccacatctcactttcactcaagacaatgtatgctcaatcctttggtcttttcagcagtttacttttgttgacaacagtgatatctagactctcagctgctgtgtgctttccgttatccggcgtgcccattgaagatttactattgacgactttccttttattgataaacagctggtcactcatgctttgtcgcaatttgccaccctcaaaaggggcagactcgatcttgactagcatgttcaatcgcctacactctgttccgtttggttcataccgctctcagacgtgtggctcctattataatttataaaaataaactatttatttacaaaaaaaaaaaaaaaatatctctccatttgcttacttttgctcgctttttaaattagccaatcataaatttttattcctttcccctcacttgtctatcgggctgaattggttgtaattttgacaacatacctgtcgtattactgttttctgaatagatgtacatacaggaactagcgtcacttgacagctgtccttagatgtaaagtcaaaaataaaatgcagcattttataagtattgattttttatgtcaatagaacctgcttttcatcatcaagtattgttttcttttattagagcaattccatgtttccaatcgcgtcttttgtgtttactttagggtgaaagagtaactgcaatgggatcctatattattatgaaacttatatttcaaaccaacagttaaaaagcgttttcctgggaagaaatctttttaaagcctatatatatagtttataaggaaaacatacaaagaatttttatctgcattatactaaatgtttgattgacacacacttattgaaacctgggtacaccggcagcaccagcctggtcaataaaacatgtgctcaacaacctaaaaattcacaaagtatataatgaatccaactctaaccaattattttcatgagatgtgtaatgtactgcttattttactacagttttttccttatctacaagaaatcatattttattacatgctatatgggttcaaggtttgaaaggacctctgctttttcgatacgcgctaatgtttattctgttcatttgtacaaaaagtacaacattttcaatcaatataaatatcatttgggataaatcccatattcacacagacacgttgattttaaaacgcacggtgcttttatcacagtataagaatgagaaatgaaaacatgaataaatgcatggtttatggattcaaattaaatttaattttattaaaattcaattactagtttgccaaattgattaccacgactacataaaaataaaatgttagtattttttttgttttccacgaaataaagtacgaacctcatagttaggatggcttgttcaaatgtgtttttatttaaacctttccaaacatgtgaaacaataggcctaatcttgtgtttttcgacaaattcaaccatctttctaaattctactcttgatcccatggtaactcctctgtaatcgatatttttgatgaagtaagatatcgggatattcagtccggtcgttacagtagctgtttgaccataacctacaacgatgccacctggtcgcatcagtttaggatattcagcataaagaggaccaccggcaccatcgatgactgcagacagcacgttattgcccaagagttcctttagttcctccatgcagttttctaatcatataatgtcaatattgaactacaagaatcctgaatttctaccatctttataattcactccgcctatagcacccagctcaatactcttttgaatcttttctggagaagaagatgtgacgtaaacatgggcacctgcagctacagcaaactgaagagcaaaaagtgcaacccctcctccaataccagtgattaggatatgttggcctttttgaactaagccctttgtaaacaaggatctataaagtacgttacgatcaaaattaagcttttttttacaaaagactttttggtacctgtaggcagtcaatccagccaatggcaaagcagcggcttctgtcattgaaagaaattcaggacaaggcacaatgtcctccttttcgacaatgacttcttcttttgtaaatgtgccaatcactggcaagagacccaatatgtgaaagtcacgttcaggacctctttcatccgaatcccatccatatccgggattaatcaagacacgttgtcctctttggccattcttcgtaatgtaaccaacgccatcagagcccaacacagaatctaatacagtaccatcatattgatccataaggatccaaacatccctttttaaaaaaaattaaaaaaagtcaagaaggagcctggttttgtttttaccgatggttgaaagcagcagcttgtatttggacagctacttgatgatccgcaaggttctcggaggatttgtgttccttgaattcaacgccgtacttgaattttgaatcaaaaggttgagtttcagtgagaatagcagagaccattttgtttcaaaaggcagtaatgatgtggtaaaggtagtgaaatggttgtatttatagtcattaaaaaaagcggaggggttagattaataagcagtaaacagctgctgtcacaaataccatttttcaaatgaattaataagcgcgctgaactctattagttttaaagcatcgttgatgaatcatatattcagatataatttattagcatcgtttattcaatcaacacgcaagattaaatgaatttgttcgtatccaaaaccaacttgctaatcttttaggacgtattttttattataaatttttcattttgttaactgtagtacaaaagctgagaattgtaaacgttctgatagattttattaataagccttctattatctgcaaaaccaaccaagatttgatgaaaaaaagaaaagaaaagcatattattcgttttcataaagaaaaattgtgtagtctttaattatagtttattgagatcaagctatacagtagcagaactaaggacacgcttaacaaaagctgtcatcgatatccactttttttttaaacctcaacttgttacttgaatatcatgtacttgcgtgaaataaaagggtatttttcataaacatttgaatgtatttatattgctttgtgctttgaaataacagcttgctgttgtaacatttagttattttatgctttttttatatagaaagttctttgataagtagcatgttttagataatgttatattagtttattacaatttgcattaagtaaagtaattgaaatttatagatgaatttaggaaaagagaggaaaaagaagaatgaaggttgaatgaaatataaacattttcgtctaatcctctaagcatccgagtagtctcgcatgtttttggtggaggcctttttggcaattcgtccacctaaactctttagtcctaaactgtgtcctgggttaccgacttgaaggtttttgagaccatcctcaaatggaaggccagtgacagtggcatcctcggttcctgcctttttagcatatcgcttaatgttggtttttgataaattaatacggaatgcagtgtctagtaaattgttgggttcaaggtattcatgtggaatatgtaaaaggaaggcaagaagttctgaattggttggacatgagtgtaagagatgatctaaatattatttaaaagaaatgtacattggtaaatattccatatccttttctcacctttgcataaatctagaatggctaggcttactcgataaaacactttaatgcctaagaagaaggaatgtatgtaagctgaggatctgaatatgtgtccttttcgtgttttttttagtttaccctcaaaataaaacgcgtcccaaacacgtagcactgattcccaaggaagtgtcatggtaaatgcagttaggaaccattgggctatatacatgattggaagtacatcattgttttctaaatgctgagccaactttgggttatgatcctttaataattgcccaatgatgtatgcatcaattcttaactgggaaagtgtaggtgtgaagtatccattcatataccgatcaatagtagccaccaataaccaaaacgagtcctttttttaatacaaaaatagttaatccatcaactctagatttctatttcttttcttttttttctattacttcgacagtcatctgcataagcattagtcctgctaaacggcccatgccttggcaatattctaaatcagaattgtattgggcatatgcttttaatatatttcgcaaattctgttgtcccaagccatccttttccataaattgtgtgtgatcaggataacatcgttcaatatctctttcaatcacgtcgtaaatagggatcctaggcttggacaacaggttttgaaattgatttgatctcttgtagtcatcactaccagccaagaattgccacactttggctctcacagatgctggtattcctccacgaaccaattttttcatctttacatcctttttaaccgttccagcatcgagtttgttgattatatttaaccattttaattcattttctctgtattctttcatagctttggtagacatatttgctctgcatgtaaataaactattagcttcctgggaagataaaatggggtttcagggggtgaggaacaatgaagaagacatgtacctgaatgaaggacgaccgcgtttgataatgaatccatattcatcaacattttcattttgaataaaagttgaattgttattattctttgttggtgtagtctggcttttcctttgtacaccggtgttttgtatattagtagctactgggcgtgcaggagatcttggtggtggtatagggccgtacagttctgtgttctcttcatccgagtaatcaatgttgagtgcagatgtatcaaatggatcatgattattgttgttattatctaatcatatattacacgtataagattaattttatgattattgataagctgcttttttttttctgtacctagattttctccagaataattgtaggaatcgtatgatattcgagactcttttatattatgacttgaagaagtcgaaactgagcctatactttcaaaactcggcttactgacccagtgtctcgatgagggtacgggtgaagcatatcgatcagaattggaagaaaatgaatgaatagagcctcttaattggttgaattgttcttgtctatttttcatcatttctatatcaaattctgttccatggctacttgtagagtttctatattgcgaatggtcggtaaaatcaagatcagcgtcaagcgattctaatacacgaggatctaattctacaaaatgcacggtttctgcattaaaatttccaataacgccttcacagtatccctaaaagatctcttatattggtaaatctttatataaaatacagcattgtgctgtgtttatttaccatgtaaatatcattctctatatgttttaatatagtaatcctttctcctgtaaacaaatttagccttattttatatctaaaatgcctgtgtacacaaaccttgcaaatacatcagttcttcaggagtgttggccaaaatatccacttttgatacacaagcgcctaaaccacctatatattttttaacttggtcgatgtcacaatcctgtattgttgtaggaaacatacctttctcagcaaaggctttcaactcggctaaactcatcgaatcgacatctattgaagcattatccaaagcttctgctggatctttcaatagtcgtgcaatcttttcattaagctcttcgagattagcagaggtatgtcgtgtaatttttggttccatatatcaagtcaaaaaagagaaaaataaaataaggaagttccctccttttatatgaaagaaggaagaaaaaaaaggtgaagaggatggtttactcccaaataaggaagacatgtgcgattaaacaccgctatgagttacgtggagaagaacctttttttattgtttatttaaaaagtaacaaaatggcccccattttaaatgtctaaatcatcatctggatcttcgtcatcaaagtcatcagcagcgtcaggatcgtaa

SEQ ID NO: 227 - DNA, 2354 bp, unidentified
  misc_feature 1..2354: note = Fanzor polypeptide
  source 1..2354: mol_type = other DNA
tgttctcaagagcaaaaagaatccaaaaacaggaagcaagtttgagacatggggtgccgtcgtagacctaaataaaaggtgttcgcgcatcaaggatttcaaaagcctttgcggttccaaggaattctcgaaacagatggagtcggtgtctccataataacgcaaaacactgatacaagcagaaagtcgcctaaacccaatattgaaaagaaagtagacggtaaccaaacagagcatattgaaggactagatcaagccaacttaaagagcattgaaggcaagtgcgtcttgatagacactggaagacgggacttgatgtactgcatgaaagaaaccagcactgttgaagaaaaacaaacacttatatttaccaagaacaaccgctcaaaatgctcaaggcatttcagatatttaagaaggcgtgctcaaccttttgtggtccagaaagccgaagcaatcctttctagatctaaatccaactctgtagacttgaaaaagtttgtacagtacattaaaacaagagcatcagtaaaaccattttgtacgaatacagtgctcacggcttcaaattgcgtccaaaaaaaaattcattgcgcatctttaattttcaaacagcgcatctttatttggtcaaattgcgcacttgtgatttctcaaactgcgctaataaaaaagtcaaactgcatattttacaactcaaattgcattacttttatttgtacctttttcataagctattatctctttaaaagcaaatatcagatcgataacatgtactcaataaaaggaaaaattatttttgaagatggtcaaggaaatgtttttgatgagagcgggaatgaagcaatggactgggatgaggaagttgatcctcataatttggagaacctaaccaacctaacacgctatttgaataagcaagtacagccggaaatggacttagacagtctggattttgttgaaaaaatgaaaacaatagagaagaaccttgaagagaaaaaaacgaaaagcaataataaaaaaaaatctatgttctgatgaccaaaaaaacgttatttatatatcttcacaagataaaattgttaaacgcagctgaatcggctcgaagagcgggagtgaaagtacgtacagggcaagcgtggtctgcaagaatgaaggaagatcctaactggaatatatacgaaaagcaaacgaatcagaacaaaattggacgaaatcatataattctgcattatccacttcattctcaagttctacagtgcttagttgtcttcttttgttgagataaaccaaaggaggagtctcttcaattggcgttgtttcgattgcttagtattttcttttctgtcgtttcaagaattccaaagtagcttccacatagcttaatgactttttttttgacgcttcatctcctttttccaggcatttttttatctcgcgcagttggacttcactaatactacaaattttgtttatagcctccaatctttcagcttcttctccaattaactggtcaagattatcatgcgcaattgagtatagtaattttactaaagaatcattccttccatagtctaaagtactaatcaacaaagactgagagcaaaggaaatagccaaccgcttgcaaaggatgtaatattttttcttgttgtttcatctgtaaagtcgaagatgtcagtagcaaacaatgtttagcccatccagtgcttagtatctgtctcgcaaaggggaggtcactatctatagacttgctcagaaaaggtgctgtactacttccaattccaaatatcacaatgatagaaagcctgttgtagcgttcgtatgtgagtgtacagtattgaatggcacgtgccaagaatttgtcgtcggcttgattttgtacttcaactagtacagatggaaatgaactcaagggatcgcggggagcatagagaacatcacttttttttttgttataaattctgtaggcgccgaaacatagttatcttctgccgcttctggcacgagagcttttaatagcatgtttatcacttgtttgtcggttaataccagtttgctgatcaaatcagttcctggcctgtgattataagggaggatgcgatcagtgtcatctaaacgattttatgtaagaaattatttgtatttttatagcatgtttacttacctttgtcaatactgaaatagtcagatattatttttgaaaagtaaaagtgaagaaagaaaaagcgtaacgtatccgtattgtatccataataaaaaaaatctacccctcgtctggtttccaagttaagccgagatattcataatcgtatcatcaagctaaatcagcttatctggcctcatatattgaat

SEQ ID NO: 228 - DNA, 11434 bp, unidentified
  misc_feature 1..11434: note = Fanzor polypeptide
  source 1..11434: mol_type = other DNA
aaagaaggaaaaggcagagagtctcagaggagaaatgcaagcaaacaagtctagtagtaaagcgataaaagaagctacccgaaagaagatttatggaccttgcaatcaggtgaagcttgccatcgcaaaaaaagagatgcctgaagttggtcttttagatgaccaatcaagaacgcaattaaatgattttctctcaagctactcagaggactacacctttcaaaagaactcaatttactatgacgttatggctagtccaaaaaaccatttcaaagccttcttcagacttgctgaacagtctgaagctgaacagacgaaacagtttgcttgtttcccgctacgtaccacctttatttcttgctacatgacgttggatagcaaaataatccattaccatgttctcaagagcaaaaagaatccaaaaacaggaagcaagtttgagacatggggtgccgtcgtagacctaaataaaaggtgttcgcgcatcaaggatttcaaaagcctttgcggttccaaggaattctcgaaacagatggagtcggtgtctccataataacgcaaaacactgatacaagcagaaagtcgcctaaacccaatattgaaaagaaagtagacggtaaccaaacagagcatattgaaggactagatcaagccaacttaaagagcattgaaggcaagtgcgtcttgatagacactggaagacgggacttgatgtactgcatgaaagaaaccagcactgttgaagaaaaacaaacacttatatttaccaagaacaaccgctcaaaatgctcaaggcatttcagatatttaagaaggcgtgctcaaccttttgtggtccagaaagccgaagcaatcctttctagatctaaatccaactctgtagacttgaaaaagtttgtacagtacattaaaacaagagcatcagtaaaaccattttgtacgaatacagtgctcacggcttcaaattgcgtccaaaaaaaaattcattgcgcatctttaattttcaaacagcgcatctttatttggtcaaattgcgcacttgtgatttctcaaactgcgctaataaaaaagtcaaactgcatattttacaactcaaattgcattacttttatttgtacctttttcataagctattatctctttaaaagcaaatatcagatcgataacatgtactcaataaaaggaaaaattatttttgaagatggtcaaggaaatgtttttgatgagagcgggaatgaagcaatggactgggatgaggaagttgatcctcataatttggagaacctaaccaacctaacacgctatttgaataagcaagtacagccggaaatggacttagacagtctggattttgttgaaaaaatgaaaacaatagagaagaaccttgaagagaaaaaaacgaaaagcaataataaaaaaaaatctatgttctgatgaccaaaaaaacgttatttatatatcttcacaagataaaattgttaaacgcagctgaatcggctcgaagagcgggagtgaaagtacgtacagggcaagcgtggtctgcaagaatgaaggaagatcctaactggaatatatacgaaaagcaaacgaatcagaacaaaattggacgaaatcatataattctgcattatccacttcattctcaagttctacagtgcttagttgtcttcttttgttgagataaaccaaaggaggagtctcttcaattggcgttgtttcgattgcttagtattttcttttctgtcgtttcaagaattccaaagtagcttccacatagcttaatgactttttttttgacgcttcatctcctttttccaggcatttttttatctcgcgcagttggacttcactaatactacaaattttgtttatagcctccaatctttcagcttcttctccaattaactggtcaagattatcatgcgcaattgagtatagtaattttactaaagaatcattccttccatagtctaaagtactaatcaacaaagactgagagcaaaggaaatagccaaccgcttgcaaaggatgtaatattttttcttgttgtttcatctgtaaagtcgaagatgtcagtagcaaacaatgtttagcccatccagtgcttagtatctgtctcgcaaaggggaggtcactatctatagacttgctcagaaaaggtgctgtactacttccaattccaaatatcacaatgatagaaagcctgttgtagcgttcgtatgtgagtgtacagtattgaatggcacgtgccaagaatttgtcgtcggcttgattttgtacttcaactagtacagatggaaatgaactcaagggatcgcggggagcatagagaacatcacttttttttttgttataaattctgtaggcgccgaaacatagttatcttctgccgcttctggcacgagagcttttaatagcatgtttatcacttgtttgtcggttaataccagtttgctgatcaaatcagttcctggcctgtgattataagggaggatgcgatcagtgtcatctaaacgattttatgtaagaaattatttgtatttttatagcatgtttacttacctttgtcaatactgaaatagtcagatattatttttgaaaagtaaaagtgaagaaagaaaaagcgtaacgtatccgtattgtatccataataaaaaaaatctacccctcgtctggtttccaagttaagccgagatattcataatcgtatcatcaagctaaatcagcttatctggcctcatatattgaatcaaaataaaccattgggtgaagtagatgattcagcattcatcgatgccttctgttcgcagccccagtggattaattacaaacctaaaccatttcggttgtctctcatacagcgatctctaccatcatcggcaatgtcaccaacaccaacttccaaatggtcacttttttggaaactgcctatttcgcctgaaagccgatctttatggtatcgtctattccaccgtaaactctatagtcaatcacttctttcaagatttgataatggtttgacctcttcacactgtaaattttgctctgctaatactgaagacttacaacacctcttcgtgcgctgtcctacgaaatggagagtatggatagatgctttcaatttctttagtccacatctcactttcactcaagacaatgtatgctcaatcctttggtcttttcagcagtttacttttgttgacaacagtgatatctagactctcagctgctgtgtgctttccgttatccggcgtgcccattgaagatttactattgacgactttccttttattgataaacagctgatcactcatgctttgtcgcaatttgccaccctcaaaaggggcagactcgatcttgactagcatgttcaatcgcctacactctgttccgtttggttcataccgctctcagacgtgtggctcctattataatttataaaaataaactatttatttacaaaaaaaaaaaaaaatatctctccatttgcttacttttgctcgctttttaaattagccaatcataaatttttattcctttcccctcacttgtctatcgggctgaattggttgtaattttgacaacatacctgtcgtattactgttttctgaatagatgtacatacaggaactagcgtcacttgacagctgtccttagatgtaaagtcaaaaacaaaatgcagcattttataagtattgatttttttatgtcaatagaacctgcttttcatcatcaagtattgttttcttttattagagcaattccatgtttccaatcgcgtcttttgtgtttactttagggtgaaagagtaactgcaatgtgatcctatattattatgaaacttatatttcaaaccaacagttaaaaagcgttttcctgggaagaaatctttttaaagcctatgtatatatagtttataaggaaaacatacaaagaatttttatctgcattatactaaatgtttgattgacacacacttattgaaacctgggtacaccggcagcaccagcctggtcaataaaacatgtgctcaacaacctaaaaattcacaaagtatataatgaatccaactctaaccaattattttcatgagatgtgtaatgtactgcttattttactacagttttttccttatctacaagaaatcatattttattacatgctatatgggttcaaggtttgaaaggacctctgctttttcgatacgcgctaatgtttattctgttcatttgtgtaaaaagtacaacattttcaatcaatataaatatcatttgggataaatcccatattcacacagacacgttgattttaaaacgcacggtgcttttatcacagtataagaatgagaaatgaaaacatgaataaatgcatggtttatggattcaaattaaatttaattttattaaaattcaattactagtttgccaaattgattaccacgactacataaaaataaaatgttagtatttctttttgttttccacgaaataaagtacgaacctcatagttaggatggcttgttcaaatgtgtttttatttaaacctttccaaacatgtgaaacaataggcctaatcttgtgtttttcgacaaattcaaccatttttctaaattctactcttgatcccatggtaactcctctgtaatcgatatttttgatgaagtaagatatcggaatattcagtccggtcgttacagtagctgtttgaccataacctacaacgatgccacctggtcgcatcagtttaggatattcagcataaagaggaccaccggcaccatcgatgactgcagacagcacgttattgcccaagagtttctttagttcctccatgcagttttctaatcatataatgtcaatattgaactacaagaatcctcaatttctaccatctttataattcactccgcctatagcacccagctcaatactcttttgaatcttttctggagaagaagatgtgacgtaaacatgggcacctgcagctacagcaaactgaagagcaaaaagtgcaacccctcctccaataccagtgattaggatatgttggcctttttgaactaagccctttgtaaacaaggatctataaagcatgttacgatcaaaattaagctttttttgtacaaaaggctttttggtacctgtaggcagtcaatccagccaatggcaaagcagcggcttctgtcattgaaagaaattcaggacaaggcacaatgtcctccttttcgacaatgacttcttcttttgtaaatgtgccaatcactggcaagagacccaatatgtgaaagtcacgttcaggacctctttcatccgaatcccatccatatccgggattaatcaagacacgttgtcctctttggccatttttcgtaatgtaaccaacgccatcagagcccaacacagaatctaatacagtaccatcatattgatccataaggatccaaacatccctttttaaaaaaaattaaaaaaagtcaagaaggagcctggttttgtttttaccgatggttgaaagcagcagcttgtatttggacagctacttgatgatccgcaaggttctcggaggatttgtgttccttgaattcaacgccgtacttgaattttgaatcaaaaggttgagtttcagtgagaatagcagagaccattttgtttcaaaaggcagtaatgatgtggtaaaggtagtgaaatggttgtatttatagtcattaaaaaaagcggaggggttagattaataagcagtaaacagctgctgtcacaaataccatttttcaaatgaattaataagcgcgctgaattctattaattttaaagcatcgttgatgaatcatatattcagatataatttattagcatcgtttattcaatcaacacgcaagattaaatgaatttgttcgtatccaaaaccaacttgctaatcttttaggacgtatttttcattgtaaatttttcattttgttaactgtagtacaaaagctgagaattgtaaacgttctgatagattttattaataagccttctattatctgcaaaaccaaccaagatttgatgaaaaaaagaaaaggaaagcatattattcgttttcataaagaaaaattgtgtagtctttaattatagtttattgagatcaagctatacagtagcagaactaaggacacgcttaacaaaagctgtcatcgatatccactttttttttaaacctcaacttgttacttgaatatcatgtacttgcgtgaaataaaagggtatttttcataaacatttgaatgtatttatattgctttgtgctttgaaataacagcttgctgttgtaacatttagttattttatgctttttttatatagaaagttctttgataagtagcatgttttagataatgttatattagtttattacaatttgcattaagtaaagtaattgaaatttatagatgaatttaggaaaagagaggaaaaagaagaatgaaggttgaatgaaatataaacattttcgtctaatcctctaagcatccgagtagtctcgcatgtttttggtggaggcctttttggcaattcgtccacctaaactctttagtcctaaactgtgtcctgggttaccgacttgaaggtttttgagaccatcctcaaatggaaggccagtgacagtggcatcctcggttcctgcctttttagcatatcgcttaatgttggtttttgataaattaatacggaatgcagtgtctagtaaattgttgggttcaaggtattcatgtggaatatgtaaaaggaaggcaagaagttctgaattggttggacatgagtgtaagagatgatctaaatattatttaaaagaaatgtacattggtaaatattccatatccttttctcacctttgcataaatctagaatggctaggcttactcgataaaacactttaatgcctaagaagaaggaatgtatgtaagctgaggatctgaatatgtgtccttttcgtgttttttttagtttaccctcaaaataaaacgcgtcccaaacacgtagcactgattcccaaggaagtgtcatggtaaatgcagttaggaaccattgggctatatacatgattggaagtacatcattgttttctaaatgctgagccaactttgggttatgatcctttaataattgcccaatgatgtatgcatcaattcttaactgggaaagtgtaggtgtgaagtatccattcatataccgatcaatagtagccaccaataaccaaaacgagtcctttttttaatacaaaaatagttaatccatcaactctagatttctatttcttttcttttttttctattacttcgacagtcatctgcataagcattagtcctgctaaacggcccatgccttggcaatattctaaatcagaattgtattgggcatatgcttttaatatatttcgcaaattctgttgtcccaagccatccttttccataaattgtgtgtgatcaggataacatcgttcaatatctctttcaatcacgtcgtaaatagggatcctaggcttggacaacaggttttgaaattgatttgatctcttgtagtcatcactaccagccaagaattgccacactttggctctcacagatgctggtattcctccacgaaccaattttttcatctttacatcctttttaaccgttccagcatcgagtttgttgattatatttaaccattttaattcattttctctgtattctttcatagctttggtagacatatttgctctgcatgtaaataaactattagcttcctgggaagataaaatggggtttcagggggtgaggaacaatgaagaagacatgtacctgaatgaaggacgaccgcgtttgataatgaatccatattcatcaacattttcattttgaataaaagttgaattgttattattctttgttggtgtagtctggcttttcctttgtacaccggtgttttgtatattagtagctactgggcgtgcaggagatcttggtggtggtatagggccgtacagttctgtgttctcttcatccgagtaatcaatgttgagtgcagatgtatcaaatggatcatgattattgttgttattatctaatcatatattacacgtataagattaattttatgattattgataagctgcttttttttttctgtacctagattttctccagaataattgtaggaatcgtatgatattcgagactcttttatattatgacttgaagaagtcgaaactgagcctatactttcaaaactcggcttactgacccagtgtctcgatgagggtacgggtgaagcatatcgatcagaattggaagaaaatgaatgaatagagcctcttaattggttgaattgttcttgtctatttttcatcatttctatatcaaattctgttccatggctacttgtagagtttctatattgcgaatggtcggtaaaatcaagatcagcgtcaagcgattctaatacacgaggatctaattctacaaaatgcacggtttctgcattaaaatttccaataacgccttcacagtatccctaaaagatctcttatattggtaaatctttatataaaatacagcattgtgctgtgtttatttaccatgtaaatatcattctctatatgttttaatatagtaatcctttctcctgtaaacaaatttagccttattttatatctaaaatgcctgtgtacacaaaccttgcaaatacatcagttcttcaggagtgttggccaaaatatccacttttgatacacaagcgcctaaaccacctatatattttttaacttggtcgatgtcacaatcctgtattgttgtaggaaacatacctttctcagcaaaggctttcaactcggctaaactcatcgaatcgacatctattgaagcattatccaaagcttctgctggatctttcaatagtcgtgcaatcttttcattaagctcttcgagattagcagaggtatgtcgtgtaatttttggttccatatatcaagtcaaaaaagagaaaaataaaataaggaagttccctccttttatatgaaagaaggaagaaaaaaaaggtgaagaggatggtttactcccaaataaggaagacatgtgcgattaaacaccgctatgagttacgtggagaagaacctttttttattgtttatttaaaaagtaacaaaatggcccccattttaaatgtctaaatcatcatctggatcttcgtcatcaaagtcatcagcagcgtcaggatcgtaatagattaagcctccttgcttcttttgctcctcaacgctaacttctaattgttgagccttgtaataaggcaagaccaaattctcctttgcttttctttgttcatcggtcaatgacaagttgaaggataaattggctgctggatcgggttggttgtctacttgcatctcttcaggttgattttcaacttcgacaacgcctgttaattgacttgctggtaccacttgaagtattccatctctcacaaggaacccatttgtctcataagttactttaccactctttttacgccattcaatatgtacaataccaccctttgtgattgcattggaagtggtagtcaaatatgaaaacgtatcttgaggtgtgaatccagtcagagctgcttgcgtatcaaagtgtgtgcgttctttaagtgcttcaagctttattgtgacagtagctaatttgttgatagattcttgcatacttaagccatttttagttggtaacttgatatcaaagtgatgtctaatcgccaagtgtgtggtgtctattgcttttttagtacaaatgaataaaaaaaaaaaaatacgataaccaaccagttgttaatgattctaatgtttttacaagttgataagttttaaattgagataccataaataatgacgctagagagtcaacaagaatcgtgcagcatggtgtatcatttacttgcttgatcaatggaagtaaaatggagttttcaatatcagttatattgttaatcaattgtacattgggatcatcgtttgctttattcacattatcccaaccatatggatctgtgtagcagtcgatgatgtgtatgtcttttgttgattcaaattgcttcttccaaacttttggtgatgtttctgttaacagcactacaagtgatttgttgtttttaagtgcgcgtttaccaatgtccactaagatggacattcccgataagcgaatagagtcattgattaaaataaaagaagaagacttgtttaatatttgttcaaagcaaagtgtattcattttgcttaaaaaagtttgattatctatttcttgggggctgttactttttgacaaatgcgtgacttgtagtgattttttctccatcattttatcatgcaattctaaacaacggcaaggacaactctatgtaaagagggaatggtgattcaattataggtcttaaatatagcttcgttaatgttaagctgatggctagaataatctcgttgtaatagagtatatctctataagaactttagatattcagcgcgttcacagtagaggcaaaggtgtttacaccaaaagccaatacaatctaggatttgatggtcacagtatctttcaataaactgtacaagatgcaatactattccttcctttgactaccatgcatttttctgtcgtcacagtttgataaacttatttttatatttgccgagttaaattatttatcattgaaattaaataaaaatcaaatatagaatttgaaccttgtagtttcaaatgaaatactgagaataccaaatttaagtcaattcttcattgagctgttgaaatgttgtattctttgtcataaatcattagaattagctattgcccattgtcatcgattaattctagaacatcccataaattggaaggcacttggtttcttacatattggcctagtttatctctttgatatattgtttgatgaagtattcaagcttactctgaacaccttgcttctaattggttttgtctttttttactgatgcatttaataaaaatatcattaaagttatatttcattctatttgcatactaaattcattgtttcaaacatctagctctttcttcctatatttctactattcagggacattcattcaagttactgaagaaaatgtatgcataaaacctgctatgaagaagtttaaaaaaccagacggattgacactcatggacgacaatatgatcattgtggttgctgcggtagtaatgtcacattgaatcagttcgtcaggatcgagataaccatgtggcttaaaaaggaacgctagagtatgcaaaagagttttcttgtggtagggcttgattataaattgtatatgctccagccttcggctggttgtcagaaactacacatttagatggcttctatctgtaacacatttgctttcagtagtagtatattggtggtgataatct

SEQ ID NO: 229 - DNA, 3699 bp, unidentified
  source 1..3699: mol_type = other DNA
  misc_feature 1..3699: note = Fanzor polypeptide
gatttctttgttgaagtttttctgagtcttgttctctcaaagggtggaaatagcacaagactgaaggatacgaccaaaaactataggcgattgatatcaaaatataaagaagcttactttgaagacgctggttatactccccccaacttaccatatgctcagcaaatagccttgtacgagtgtatgaagatccaaacggcctactataataacatcaaagctcattttggaaacaggctgcgtggtttgataaacaagttatttaaaaagaaggaaaaggcagagagtctcagaggagaaatgcaagcaaacaagtctagtagtaaagcgataaaagaagctacccgaaagaagatttatggaccttgcaatcaggtgaagcttgccatcgcaaaaaaagagatgcctgaagttggtcttttagatgaccaatcaagaacgcaattaaatgattttctctcaagctactcagaggactacacctttcaaaagaactcaatttactatgacgttatggctagtccaaaaaaccatttcaaagccttcttcagacttgctgaacagtctgaagctgaacagacgaaacagtttgcttgtttcccgctacgtaccacctttatttcttgctacatgacgttggatagcaaaataatccattaccatgttctcaagagcaaaaagaatccaaaaacaggaagcaagtttgagacatggggtgccgtcgtagacctaaataaaaggtgttcgcgcatcaaggatttcaaaagcctttgcggttccaaggaattctcgaaacagatggagtcggtgtctccataataacgcaaaacactgatacaagcagaaagtcgcctaaacccaatattgaaaagaaagtagacggtaaccaaacagagcatattgaaggactagatcaagccaacttaaagagcattgaaggcaagtgcgtcttgatagacactggaagacgggacttgatgtactgcatgaaagaaaccagcactgttgaagaaaaacaaacacttatatttaccaagaacaaccgctcaaaatgctcaaggcatttcagatatttaagaaggcgtgctcaaccttttgtggtccagaaagccgaagcaatcctttctagatctaaatccaactctgtagacttgaaaaagtttgtacagtacattaaaacaagagcatcagtaaaaccattttgtacgaatacagtgctcacggcttcaaattgcgtccaaaaaaaaattcattgcgcatctttaattttcaaacagcgcatctttatttggtcaaattgcgcacttgtgatttctcaaactgcgctaataaaaaagtcaaactgcatattttacaactcaaattgcattacttttatttgtacctttttcataagctattatctctttaaaagcaaatatcagatcgataacatgtactcaataaaaggaaaaattatttttgaagatggtcaaggaaatgtttttgatgagagcgggaatgaagcaatggactgggatgaggaagttgatcctcataatttggagaacctaaccaacctaacacgctatttgaataagcaagtacagccggaaatggacttagacagtctggattttgttgaaaaaatgaaaacaatagagaagaaccttgaagagaaaaaaacgaaaagcaataataaaaaaaaatctatgttctgatgaccaaaaaaacgttatttatatatcttcacaagataaaattgttaaacgcagctgaatcggctcgaagagcgggagtgaaagtacgtacagggcaagcgtggtctgcaagaatgaaggaagatcctaactggaatatatacgaaaagcaaacgaatcagaacaaaattggacgaaatcatataattctgcattatccacttcattctcaagttctacagtgcttagttgtcttcttttgttgagataaaccaaaggaggagtctcttcaattggcgttgtttcgattgcttagtattttcttttctgtcgtttcaagaattccaaagtagcttccacatagcttaatgactttttttttgacgcttcatctcctttttccaggcatttttttatctcgcgcagttggacttcactaatactacaaattttgtttatagcctccaatctttcagcttcttctccaattaactggtcaagattatcatgcgcaattgagtatagtaattttactaaagaatcattccttccatagtctaaagtactaatcaacaaagactgagagcaaaggaaatagccaaccgcttgcaaaggatgtaatattttttcttgttgtttcatctgtaaagtcgaagatgtcagtagcaaacaatgtttagcccatccagtgcttagtatctgtctcgcaaaggggaggtcactatctatagacttgctcagaaaaggtgctgtactacttccaattccaaatatcacaatgatagaaagcctgttgtagcgttcgtatgtgagtgtacagtattgaatggcacgtgccaagaatttgtcgtcggcttgattttgtacttcaactagtacagatggaaatgaactcaagggatcgcggggagcatagagaacatcacttttttttttgttataaattctgtaggcgccgaaacatagttatcttctgccgcttctggcacgagagcttttaatagcatgtttatcacttgtttgtcggttaataccagtttgctgatcaaatcagttcctggcctgtgattataagggaggatgcgatcagtgtcatctaaacgattttatgtaagaaattatttgtatttttatagcatgtttacttacctttgtcaatactgaaatagtcagatattatttttgaaaagtaaaagtgaagaaagaaaaagcgtaacgtatccgtattgtatccataataaaaaaaatctacccctcgtctggtttccaagttaagccgagatattcataatcgtatcatcaagctaaatcagcttatctggcctcatatattgaatcaaaataaaccattgggtgaagtagatgattcagcattcatcgatgccttctgttcgcagccccagtggattaattacaaacctaaaccatttcggttgtctctcatacagcgatctctaccatcatcggcaatgtcaccaacaccaacttccaaatggtcacttttttggaaactgcctatttcgcctgaaagccgatctttatggtatcgtctattccaccgtaaactctatagtcaatcacttctttcaagatttgataatggtttgacctcttcacactgtaaattttgctctgctaatactgaagacttacaacacctcttcgtgcgctgtcctacgaaatggagagtatggatagatgctttcaatttctttagtccacatctcactttcactcaagacaatgtatgctcaatcctttggtcttttcagcagtttacttttgttgacaacagtgatatctagactctcagctgctgtgtgctttccgttatccggcgtgcccattgaagatttactattgacgactttccttttattgataaacagctgatcactcatgctttgtcgcaatttgccaccctcaaaaggggcagactcgatcttgactagcatgttcaatcgcctacactctgttccgtttggttcataccgctctcagacgtgtggctcctattata

SEQ ID NO: 230 - DNA, 12517 bp, Rhizopus sp.
  source 1..12517: mol_type = other DNA
agcggaaatggtaggctccatatctaataatggatcgaaatgtcactgaccacaaaattgatactattatagacttatttgaaatatatgtagaagacaactcagacgacgacttccaacccgttgtaacagctagaaaaagaaaaagtaagttgcattgtcaagcttgatgtaggtaaacagctagtttaacgtatgaaactccatcataggtagggaaaatactccacagagtggattacaaaagaggctcaaaggcaaaggaaaagctacagattctgaagttactactacgagtagtactggtatctctacaacagatgaaactatcatgttcaataagatcactcttgatgactatgatcttgaatatagcagtgacgattttgatgcacctgtcgtcaaaagaccctttttgggtgaatcaaccaaatctgcttttcgtatcaccaaatcaacttctgctattgtggagtcaagcacaactgcttctaaaacaagtctaactttccccaagcctagtaaacctgttccaactgctttcaattcagctgcaacttctgtcaagccaagtttttgtcctgtgcctattgacaaggcaagtgacattaaagaaggccctaagaagataagcaagcgtgtgatgacaattaaaacgactgtaaagaatatttggaaaccagcatatttacaggcattgcatgatttggttcacactaccaacttactagttacacatacctttgccttcacaaagtacatatatttacaagaactggcagcaaatgaaaattttgcgctgaacaactttgtgacaaaggatttctttgttgaagtttttctgagtcttgttctctcaaagggtggaaatagcacaagactgaaggatacgaccaaaaactataggcgattgatatcaaaatataaagaagcttactttgaagacgctggttatactccccccaacttaccatatgctcagcaaatagccttgtacgagtgtatgaagatccaaacggcctactataataacatcaaagctcattttggaaacaggctgcgtggtttgataaacaagttatttaaaaagaaggaaaaggcagagagtctcagaggagaaatgcaagcaaacaagtctagtagtaaagcgataaaagaagctacccgaaagaagatttatggaccttgcaatcaggtgaagcttgccatcgcaaaaaaagagatgcctgaagttggtcttttagatgaccaatcaagaacgcaattaaatgattttctctcaagctactcagaggactacacctttcaaaagaactcaatttactatgacgttatggctagtccaaaaaaccatttcaaagccttcttcagacttgctgaacagtctgaagctgaacagacgaaacagtttgcttgtttcccgctacgtaccacctttatttcttgctacatgacgttggatagcaaaataatccattaccatgttctcaagagcaaaaagaatccaaaaacaggaagcaagtttgagacatggggtgccgtcgtagacctaaataaaaggtgttcgcgcatcaaggatttcaaaagcctttgcggttccaaggaattctcgaaacagatggagtcggtgtctccataataacgcaaaacactgatacaagcagaaagtcgcctaaacccaatattgaaaagaaagtagacggtaaccaaacagagcatattgaaggactagatcaagccaacttaaagagcattgaaggcaagtgcgtcttgatagacactggaagacgggacttgatgtactgcatgaaagaaaccagcactgttgaagaaaaacaaacacttatatttaccaagaacaaccgctcaaaatgctcaaggcatttcagatatttaagaaggcgtgctcaaccttttgtggtccagaaagccgaagcaatcctttctagatctaaatccaactctgtagacttgaaaaagtttgtacagtacattaaaacaagagcatcagtaaaaccattttgtacgaatacagtgctcacggcttcaaattgcgtccaaaaaaaaattcattgcgcatctttaattttcaaacagcgcatctttatttggtcaaattgcgcacttgtgatttctcaaactgcgctaataaaaaagtcaaactgcatattttacaactcaaattgcattacttttatttgtacctttttcataagctattatctctttaaaagcaaatatcagatcgataacatgtactcaataaaaggaaaaattatttttgaagatggtcaaggaaatgtttttgatgagagcgggaatgaagcaatggactgggatgaggaagttgatcctcataatttggagaacctaaccaacctaacacgctatttgaataagcaagtacagccggaaatggacttagacagtctggattttgttgaaaaaatgaaaacaatagagaagaaccttgaagagaaaaaaacgaaaagcaataataaaaaaaaatctatgttctgatgaccaaaaaaacgttatttatatatcttcacaagataaaattgttaaacgcagctgaatcggctcgaagagcgggagtgaaagtacgtacagggcaagcgtggtctgcaagaatgaaggaagatcctaactggaatatatacgaaaagcaaacgaatcagaacaaaattggacgaaatcatataattctgcattatccacttcattctcaagttctacagtgcttagttgtcttcttttgttgagataaaccaaaggaggagtctcttcaattggcgttgtttcgattgcttagtattttcttttctgtcgtttcaagaattccaaagtagcttccacatagcttaatgactttttttttgacgcttcatctcctttttccaggcatttttttatctcgcgcagttggacttcactaatactacaaattttgtttatagcctccaatctttcagcttcttctccaattaactggtcaagattatcatgcgcaattgagtatagtaattttactaaagaatcattccttccatagtctaaagtactaatcaacaaagactgagagcaaaggaaatagccaaccgcttgcaaaggatgtaatattttttcttgttgtttcatctgtaaagtcgaagatgtcagtagcaaacaatgtttagcccatccagtgcttagtatctgtctcgcaaaggggaggtcactatctatagacttgctcagaaaaggtgctgtactacttccaattccaaatatcacaatgatagaaagcctgttgtagcgttcgtatgtgagtgtacagtattgaatggcacgtgccaagaatttgtcgtcggcttgattttgtacttcaactagtacagatggaaatgaactcaagggatcgcggggagcatagagaacatcacttttttttttgttataaattctgtaggcgccgaaacatagttatcttctgccgcttctggcacgagagcttttaatagcatgtttatcacttgtttgtcggttaataccagtttgctgatcaaatcagttcctggcctgtgattataagggaggatgcgatcagtgtcatctaaacgattttatgtaagaaattatttgtatttttatagcatgtttacttacctttgtcaatactgaaatagtcagatattatttttgaaaagtaaaagtgaagaaagaaaaagcgtaacgtatccgtattgtatccataataaaaaaaatctacccctcgtctggtttccaagttaagccgagatattcataatcgtatcatcaagctaaatcagcttatctggcctcatatattgaatcaaaataaaccattgggtgaagtagatgattcagcattcatcgatgccttctgttcgcagccccagtggattaattacaaacctaaaccatttcggttgtctctcatacagcgatctctaccatcatcggcaatgtcaccaacaccaacttccaaatggtcacttttttggaaactgcctatttcgcctgaaagccgatctttatggtatcgtctattccaccgtaaactctatagtcaatcacttctttcaagatttgataatggtttgacctcttcacactgtaaattttgctctgctaatactgaagacttacaacacctcttcgtgcgctgtcctacgaaatggagagtatggatagatgctttcaatttctttagtccacatctcactttcactcaagacaatgtatgctcaatcctttggtcttttcagcagtttacttttgttgacaacagtgatatctagactctcagctgctgtgtgctttccgttatccggcgtgcccattgaagatttactattgacgactttccttttattgataaacagctgatcactcatgctttgtcgcaatttgccaccctcaaaaggggcagactcgatcttgactagcatgttcaatcgcctacactctgttccgtttggttcataccgctctcagacgtgtggctcctattataatttataaaaataaactatttatttacaaaaaaaaaaaaaaatatctctccatttgcttacttttgctcgctttttaaattagccaatcataaatttttattcctttcccctcacttgtctatcgggctgaattggttgtaattttgacaacatacctgtcgtattactgttttctgaatagatgtacatacaggaactagcgtcacttgacagctgtccttagatgtaaagtcaaaaacaaaatgcagcattttataagtattgatttttttatgtcaatagaacctgcttttcatcatcaagtattgttttcttttattagagcaattccatgtttccaatcgcgtcttttgtgtttactttagggtgaaagagtaactgcaatgtgatcctatattattatgaaacttatatttcaaaccaacagttaaaaagcgttttcctgggaagaaatctttttaaagcctatgtatatatagtttataaggaaaacatacaaagaatttttatctgcattatactaaatgtttgattgacacacacttattgaaacctgggtacaccggcagcaccagcctggtcaataaaacatgtgctcaacaacctaaaaattcacaaagtatataatgaatccaactctaaccaattattttcatgagatgtgtaatgtactgcttattttactacagttttttccttatctacaagaaatcatattttattacatgctatatgggttcaaggtttgaaaggacctctgctttttcgatacgcgctaatgtttattctgttcatttgtgtaaaaagtacaacattttcaatcaatataaatatcatttgggataaatcccatattcacacagacacgttgattttaaaacgcacggtgcttttatcacagtataagaatgagaaatgaaaacatgaataaatgcatggtttatggattcaaattaaatttaattttattaaaattcaattactagtttgccaaattgattaccacgactacataaaaataaaatgttagtatttctttttgttttccacgaaataaagtacgaacctcatagttaggatggcttgttcaaatgtgtttttatttaaacctttccaaacatgtgaaacaataggcctaatcttgtgtttttcgacaaattcaaccatttttctaaattctactcttgatcccatggtaactcctctgtaatcgatatttttgatgaagtaagatatcggaatattcagtccggtcgttacagtagctgtttgaccataacctacaacgatgccacctggtcgcatcagtttaggatattcagcataaagaggaccaccggcaccatcgatgactgcagacagcacgttattgcccaagagtttctttagttcctccatgcagttttctaatcatataatgtcaatattgaactacaagaatcctcaatttctaccatctttataattcactccgcctatagcacccagctcaatactcttttgaatcttttctggagaagaagatgtgacgtaaacatgggcacctgcagctacagcaaactgaagagcaaaaagtgcaacccctcctccaataccagtgattaggatatgttggcctttttgaactaagccctttgtaaacaaggatctataaagcatgttacgatcaaaattaagctttttttgtacaaaaggctttttggtacctgtaggcagtcaatccagccaatggcaaagcagcggcttctgtcattgaaagaaattcaggacaaggcacaatgtcctccttttcgacaatgacttcttcttttgtaaatgtgccaatcactggcaagagacccaatatgtgaaagtcacgttcaggacctctttcatccgaatcccatccatatccgggattaatcaagacacgttgtcctctttggccatttttcgtaatgtaaccaacgccatcagagcccaacacagaatctaatacagtaccatcatattgatccataaggatccaaacatccctttttaaaaaaaattaaaaaaagtcaagaaggagcctggttttgtttttaccgatggttgaaagcagcagcttgtatttggacagctacttgatgatccgcaaggttctcggaggatttgtgttccttgaattcaacgccgtacttgaattttgaatcaaaaggttgagtttcagtgagaatagcagagaccattttgtttcaaaaggcagtaatgatgtggtaaaggtagtgaaatggttgtatttatagtcattaaaaaaagcggaggggttagattaataagcagtaaacagctgctgtcacaaataccatttttcaaatgaattaataagcgcgctgaattctattaattttaaagcatcgttgatgaatcatatattcagatataatttattagcatcgtttattcaatcaacacgcaagattaaatgaatttgttcgtatccaaaaccaacttgctaatcttttaggacgtatttttcattgtaaatttttcattttgttaactgtagtacaaaagctgagaattgtaaacgttctgatagattttattaataagccttctattatctgcaaaaccaaccaagatttgatgaaaaaaagaaaaggaaagcatattattcgttttcataaagaaaaattgtgtagtctttaattatagtttattgagatcaagctatacagtagcagaactaaggacacgcttaacaaaagctgtcatcgatatccactttttttttaaacctcaacttgttacttgaatatcatgtacttgcgtgaaataaaagggtatttttcataaacatttgaatgtatttatattgctttgtgctttgaaataacagcttgctgttgtaacatttagttattttatgctttttttatatagaaagttctttgataagtagcatgttttagataatgttatattagtttattacaatttgcattaagtaaagtaattgaaatttatagatgaatttaggaaaagagaggaaaaagaagaatgaaggttgaatgaaatataaacattttcgtctaatcctctaagcatccgagtagtctcgcatgtttttggtggaggcctttttggcaattcgtccacctaaactctttagtcctaaactgtgtcctgggttaccgacttgaaggtttttgagaccatcctcaaatggaaggccagtgacagtggcatcctcggttcctgcctttttagcatatcgcttaatgttggtttttgataaattaatacggaatgcagtgtctagtaaattgttgggttcaaggtattcatgtggaatatgtaaaaggaaggcaagaagttctgaattggttggacatgagtgtaagagatgatctaaatattatttaaaagaaatgtacattggtaaatattccatatccttttctcacctttgcataaatctagaatggctaggcttactcgataaaacactttaatgcctaagaagaaggaatgtatgtaagctgaggatctgaatatgtgtccttttcgtgttttttttagtttaccctcaaaataaaacgcgtcccaaacacgtagcactgattcccaaggaagtgtcatggtaaatgcagttaggaaccattgggctatatacatgattggaagtacatcattgttttctaaatgctgagccaactttgggttatgatcctttaataattgcccaatgatgtatgcatcaattcttaactgggaaagtgtaggtgtgaagtatccattcatataccgatcaatagtagccaccaataaccaaaacgagtcctttttttaatacaaaaatagttaatccatcaactctagatttctatttcttttcttttttttctattacttcgacagtcatctgcataagcattagtcctgctaaacggcccatgccttggcaatattctaaatcagaattgtattgggcatatgcttttaatatatttcgcaaattctgttgtcccaagccatccttttccataaattgtgtgtgatcaggataacatcgttcaatatctctttcaatcacgtcgtaaatagggatcctaggcttggacaacaggttttgaaattgatttgatctcttgtagtcatcactaccagccaagaattgccacactttggctctcacagatgctggtattcctccacgaaccaattttttcatctttacatcctttttaaccgttccagcatcgagtttgttgattatatttaaccattttaattcattttctctgtattctttcatagctttggtagacatatttgctctgcatgtaaataaactattagcttcctgggaagataaaatggggtttcagggggtgaggaacaatgaagaagacatgtacctgaatgaaggacgaccgcgtttgataatgaatccatattcatcaacattttcattttgaataaaagttgaattgttattattctttgttggtgtagtctggcttttcctttgtacaccggtgttttgtatattagtagctactgggcgtgcaggagatcttggtggtggtatagggccgtacagttctgtgttctcttcatccgagtaatcaatgttgagtgcagatgtatcaaatggatcatgattattgttgttattatctaatcatatattacacgtataagattaattttatgattattgataagctgcttttttttttctgtacctagattttctccagaataattgtaggaatcgtatgatattcgagactcttttatattatgacttgaagaagtcgaaactgagcctatactttcaaaactcggcttactgacccagtgtctcgatgagggtacgggtgaagcatatcgatcagaattggaagaaaatgaatgaatagagcctcttaattggttgaattgttcttgtctatttttcatcatttctatatcaaattctgttccatggctacttgtagagtttctatattgcgaatggtcggtaaaatcaagatcagcgtcaagcgattctaatacacgaggatctaattctacaaaatgcacggtttctgcattaaaatttccaataacgccttcacagtatccctaaaagatctcttatattggtaaatctttatataaaatacagcattgtgctgtgtttatttaccatgtaaatatcattctctatatgttttaatatagtaatcctttctcctgtaaacaaatttagccttattttatatctaaaatgcctgtgtacacaaaccttgcaaatacatcagttcttcaggagtgttggccaaaatatccacttttgatacacaagcgcctaaaccacctatatattttttaacttggtcgatgtcacaatcctgtattgttgtaggaaacatacctttctcagcaaaggctttcaactcggctaaactcatcgaatcgacatctattgaagcattatccaaagcttctgctggatctttcaatagtcgtgcaatcttttcattaagctcttcgagattagcagaggtatgtcgtgtaatttttggttccatatatcaagtcaaaaaagagaaaaataaaataaggaagttccctccttttatatgaaagaaggaagaaaaaaaaggtgaagaggatggtttactcccaaataaggaagacatgtgcgattaaacaccgctatgagttacgtggagaagaacctttttttattgtttatttaaaaagtaacaaaatggcccccattttaaatgtctaaatcatcatctggatcttcgtcatcaaagtcatcagcagcgtcaggatcgtaatagattaagcctccttgcttcttttgctcctcaacgctaacttctaattgttgagccttgtaataaggcaagaccaaattctcctttgcttttctttgttcatcggtcaatgacaagttgaaggataaattggctgctggatcgggttggttgtctacttgcatctcttcaggttgattttcaacttcgacaacgcctgttaattgacttgctggtaccacttgaagtattccatctctcacaaggaacccatttgtctcataagttactttaccactctttttacgccattcaatatgtacaataccaccctttgtgattgcattggaagtggtagtcaaatatgaaaacgtatcttgaggtgtgaatccagtcagagctgcttgcgtatcaaagtgtgtgcgttctttaagtgcttcaagctttattgtgacagtagctaatttgttgatagattcttgcatacttaagccatttttagttggtaacttgatatcaaagtgatgtctaatcgccaagtgtgtggtgtctattgcttttttagtacaaatgaataaaaaaaaaaaaatacgataaccaaccagttgttaatgattctaatgtttttacaagttgataagttttaaattgagataccataaataatgacgctagagagtcaacaagaatcgtgcagcatggtgtatcatttacttgcttgatcaatggaagtaaaatggagttttcaatatcagttatattgttaatcaattgtacattgggatcatcgtttgctttattcacattatcccaaccatatggatctgtgtagcagtcgatgatgtgtatgtcttttgttgattcaaattgcttcttccaaacttttggtgatgtttctgttaacagcactacaagtgatttgttgtttttaagtgcgcgtttaccaatgtccactaagatggacattcccgataagcgaatagagtcattgattaaaataaaagaagaagacttgtttaatatttgttcaaagcaaagtgtattcattttgcttaaaaaagtttgattatctatttcttgggggctgttactttttgacaaatgcgtgacttgtagtgattttttctccatcattttatcatgcaattctaaacaacggcaaggacaactctatgtaaagagggaatggtgattcaattataggtcttaaatatagcttcgttaatgttaagctgatggctagaataatctcgttgtaatagagtatatctctataagaactttagatattcagcgcgttcacagtagaggcaaaggtgtttacaccaaaagccaatacaatctaggatttgatggtcacagtatctttcaataaactgtacaagatgcaatactattccttcctttgactaccatgcatttttctgtcgtcacagtttgataaacttatttttatatttgccgagttaaattatttatcattgaaattaaataaaaatcaaatatagaatttgaaccttgtagtttcaaatgaaatactgagaataccaaatttaagtcaattcttcattgagctgttgaaatgttgtattctttgtcataaatcattagaattagctattgcccattgtcatcgattaattctagaacatcccataaattggaaggcacttggtttcttacatattggcctagtttatctctttgatatattgtttgatgaagtattcaagcttactctgaacaccttgcttctaattggttttgtctttttttactgatgcatttaataaaaatatcattaaagttatatttcattctatttgcatactaaattcattgtttcaaacatctagctctttcttcctatatttctactattcagggacattcattcaagttactgaagaaaatgtatgcataaaacctgctatgaagaagtttaaaaaaccagacggattgacactcatggacgacaatatgatcattgtggttgctgcggtagtaatgtcacattgaatcagttcgtcaggatcgagataaccatgtggcttaaaaaggaacgctagagtatgcaaaagagttttcttgtggtagggcttgattataaattgtatatgctccagccttcggctggttgtcagaaactacacatttagatggcttctatctgtaacacatttgctttcagtagtagtatattggtggtgataa

SEQ ID NO: 231 - DNA, 11695 bp, Rhizopus sp.
  source 1..11695: mol_type = other DNA
tttctttgttgaagtttttctgagtcttgttctctcaaagggtggaaatagcacaagactgaaggatacgaccaaaaactataggcgattgctatcgaaatataaaaaagcttactttgaagacgctggttaaactccccaaagcttaccataagctcagcaaatagccttgtacgagtgtacgaagatccaaacggcctactataatagcatcaaagctcattttggaaacaggctgcgtggtttgataaacaagttatttaaaaagaaggaaaaggcagagagtctcagaggagaaatgcaagcaaacaagtctagtagtaaagcgataaaagaagctacccgaaagaagatttatggaccttgcaatcaggtgaagcttgccatcgcaaaaaaagagatgcctgaagttggtcttttagatgaccaatcaagaacgcaattaaatgattttctctcaagctactcagaggactacacctttcaaaagaactcaatttactatgacgttatggctagtccaaaaaaccatttcaaagccttcttcagacttgctgaacagtctgaagctgaacagacgaaacagtttgcttgtttcccgctacgtaccacctttatttcttgctacatgacgttggatagcaaaataatccattaccatgttctcaagagcaaaaagaatccaaaaacaggaagcaagtttgagacatggggtgccgtcgtagacctaaataaaaggtgttcgcgcatcaaggatttcaaaagcctttgcggttccaaggaattctcgaaacagatggagtcggtgtctccataataacgcaaaacactgatacaagcagaaagtcgcctaaacccaatattgaaaagaaagtagacggtaaccaaacagagcatattgaaggactagatcaagccaacttaaagagcattgaaggcaagtgcgtcttgatagacactggaagacgggacttgatgtactgcatgaaagaaaccagcactgttgaagaaaaacaaacacttatatttaccaagaacaaccgctcaaaatgctcaaggcatttcagatatttaagaaggcgtgctcaaccttttgtggtccagaaagccgaagcaatcctttctagatctaaatccaactctgtagacttgaaaaagtttgtacagtacattaaaacaagagcatcagtaaaaccattttgtacgaatacagtgctcacggcttcaaattgcgtccaaaaaaaaattcattgcgcatctttaattttcaaacagcgcatctttatttggtcaaattgcgcacttgtgatttctcaaactgcgctaataaaaaagtcaaactgcatattttacaactcaaattgcattacttttatttgtacctttttcataagctattatctctttaaaagcaaatatcagatcgataacatgtactcaataaaaggaaaaattatttttgaagatggtcaaggaaatgtttttgatgagagcgggaatgaagcaatggactgggatgaggaagttgatcctcataatttggagaacctaaccaacctaacacgctatttgaataagcaagtacagccggaaatggacttagacagtctggattttgttgaaaaaatgaaaacaatagagaagaaccttgaagagaaaaaaacgaaaagcaataataaaaaaaaatctatgttctgatgaccaaaaaaacgttatttatatatcttcacaagataaaattgttaaacgcagctgaatcggctcgaagagcgggagtgaaagtacgtacagggcaagcgtggtctgcaagaatgaaggaagatcctaactggaatatatacgaaaagcaaacgaatcagaacaaaattggacgaaatcatataattctgcattatccacttcattctcaagttctacagtgcttagttgtcttcttttgttgagataaaccaaaggaggagtctcttcaattggcgttgtttcgattgcttagtattttcttttctgtcgtttcaagaattccaaagtagcttccacatagcttaatgactttttttttgacgcttcatctcctttttccaggcatttttttatctcgcgcagttggacttcactaatactacaaattttgtttatagcctccaatctttcagcttcttctccaattaactggtcaagattatcatgcgcaattgagtatagtaattttactaaagaatcattccttccatagtctaaagtactaatcaacaaagactgagagcaaaggaaatagccaaccgcttgcaaaggatgtaatattttttcttgttgtttcatctgtaaagtcgaagatgtcagtagcaaacaatgtttagcccatccagtgcttagtatctgtctcgcaaaggggaggtcactatctatagacttgctcagaaaaggtgctgtactacttccaattccaaatatcacaatgatagaaagcctgttgtagcgttcgtatgtgagtgtacagtattgaatggcacgtgccaagaatttgtcgtcggcttgattttgtacttcaactagtacagatggaaatgaactcaagggatcgcggggagcatagagaacatcacttttttttttgttataaattctgtaggcgccgaaacatagttatcttctgccgcttctggcacgagagcttttaatagcatgtttatcacttgtttgtcggttaataccagtttgctgatcaaatcagttcctggcctgtgattataagggaggatgcgatcagtgtcatctaaacgattttatgtaagaaattatttgtatttttatagcatgtttacttacctttgtcaatactgaaatagtcagatattatttttgaaaagtaaaagtgaagaaagaaaaagcgtaacgtatccgtattgtatccataataaaaaaaatctacccctcgtctggtttccaagttaagccgagatattcataatcgtatcatcaagctaaatcagcttatctggcctcatatattgaatcaaaataaaccattgggtgaagtagatgattcagcattcatcgatgccttctgttcgcagccccagtggattaattacaaacctaaaccatttcggttgtctctcatacagcgatctctaccatcatcggcaatgtcaccaacaccaacttccaaatggtcacttttttggaaactgcctatttcgcctgaaagccgatctttatggtatcgtctattccaccgtaaactctatagtcaatcacttctttcaagatttgataatggtttgacctcttcacactgtaaattttgctctgctaatactgaagacttacaacacctcttcgtgcgctgtcctacgaaatggagagtatggatagatgctttcaatttctttagtccacatctcactttcactcaagacaatgtatgctcaatcctttggtcttttcagcagtttacttttgttgacaacagtgatatctagactctcagctgctgtgtgctttccgttatccggcgtgcccattgaagatttactattgacgactttccttttattgataaacagctgatcactcatgctttgtcgcaatttgccaccctcaaaaggggcagactcgatcttgactagcatgttcaatcgcctacactctgttccgtttggttcataccgctctcagacgtgtggctcctattataatttataaaaataaactatttatttacaaaaaaaaaaaaaaatatctctccatttgcttacttttgctcgctttttaaattagccaatcataaatttttattcctttcccctcacttgtctatcgggctgaattggttgtaattttgacaacatacctgtcgtattactgttttctgaatagatgtacatacaggaactagcgtcacttgacagctgtccttagatgtaaagtcaaaaacaaaatgcagcattttataagtattgatttttttatgtcaatagaacctgcttttcatcatcaagtattgttttcttttattagagcaattccatgtttccaatcgcgtcttttgtgtttactttagggtgaaagagtaactgcaatgtgatcctatattattatgaaacttatatttcaaaccaacagttaaaaagcgttttcctgggaagaaatctttttaaagcctatgtatatatagtttataaggaaaacatacaaagaatttttatctgcattatactaaatgtttgattgacacacacttattgaaacctgggtacaccggcagcaccagcctggtcaataaaacatgtgctcaacaacctaaaaattcacaaagtatataatgaatccaactctaaccaattattttcatgagatgtgtaatgtactgcttattttactacagttttttccttatctacaagaaatcatattttattacatgctatatgggttcaaggtttgaaaggacctctgctttttcgatacgcgctaatgtttattctgttcatttgtgtaaaaagtacaacattttcaatcaatataaatatcatttgggataaatcccatattcacacagacacgttgattttaaaacgcacggtgcttttatcacagtataagaatgagaaatgaaaacatgaataaatgcatggtttatggattcaaattaaatttaattttattaaaattcaattactagtttgccaaattgattaccacgactacataaaaataaaatgttagtatttctttttgttttccacgaaataaagtacgaacctcatagttaggatggcttgttcaaatgtgtttttatttaaacctttccaaacatgtgaaacaataggcctaatcttgtgtttttcgacaaattcaaccatttttctaaattctactcttgatcccatggtaactcctctgtaatcgatatttttgatgaagtaagatatcggaatattcagtccggtcgttacagtagctgtttgaccataacctacaacgatgccacctggtcgcatcagtttaggatattcagcataaagaggaccaccggcaccatcgatgactgcagacagcacgttattgcccaagagtttctttagttcctccatgcagttttctaatcatataatgtcaatattgaactacaagaatcctcaatttctaccatctttataattcactccgcctatagcacccagctcaatactcttttgaatcttttctggagaagaagatgtgacgtaaacatgggcacctgcagctacagcaaactgaagagcaaaaagtgcaacccctcctccaataccagtgattaggatatgttggcctttttgaactaagccctttgtaaacaaggatctataaagcatgttacgatcaaaattaagctttttttgtacaaaaggctttttggtacctgtaggcagtcaatccagccaatggcaaagcagcggcttctgtcattgaaagaaattcaggacaaggcacaatgtcctccttttcgacaatgacttcttcttttgtaaatgtgccaatcactggcaagagacccaatatgtgaaagtcacgttcaggacctctttcatccgaatcccatccatatccgggattaatcaagacacgttgtcctctttggccatttttcgtaatgtaaccaacgccatcagagcccaacacagaatctaatacagtaccatcatattgatccataaggatccaaacatccctttttaaaaaaaattaaaaaaagtcaagaaggagcctggttttgtttttaccgatggttgaaagcagcagcttgtatttggacagctacttgatgatccgcaaggttctcggaggatttgtgttccttgaattcaacgccgtacttgaattttgaatcaaaaggttgagtttcagtgagaatagcagagaccattttgtttcaaaaggcagtaatgatgtggtaaaggtagtgaaatggttgtatttatagtcattaaaaaaagcggaggggttagattaataagcagtaaacagctgctgtcacaaataccatttttcaaatgaattaataagcgcgctgaattctattaattttaaagcatcgttgatgaatcatatattcagatataatttattagcatcgtttattcaatcaacacgcaagattaaatgaatttgttcgtatccaaaaccaacttgctaatcttttaggacgtatttttcattgtaaatttttcattttgttaactgtagtacaaaagctgagaattgtaaacgttctgatagattttattaataagccttctattatctgcaaaaccaaccaagatttgatgaaaaaaagaaaaggaaagcatattattcgttttcataaagaaaaattgtgtagtctttaattatagtttattgagatcaagctatacagtagcagaactaaggacacgcttaacaaaagctgtcatcgatatccactttttttttaaacctcaacttgttacttgaatatcatgtacttgcgtgaaataaaagggtatttttcataaacatttgaatgtatttatattgctttgtgctttgaaataacagcttgctgttgtaacatttagttattttatgctttttttatatagaaagttctttgataagtagcatgttttagataatgttatattagtttattacaatttgcattaagtaaagtaattgaaatttatagatgaatttaggaaaagagaggaaaaagaagaatgaaggttgaatgaaatataaacattttcgtctaatcctctaagcatccgagtagtctcgcatgtttttggtggaggcctttttggcaattcgtccacctaaactctttagtcctaaactgtgtcctgggttaccgacttgaaggtttttgagaccatcctcaaatggaaggccagtgacagtggcatcctcggttcctgcctttttagcatatcgcttaatgttggtttttgataaattaatacggaatgcagtgtctagtaaattgttgggttcaaggtattcatgtggaatatgtaaaaggaaggcaagaagttctgaattggttggacatgagtgtaagagatgatctaaatattatttaaaagaaatgtacattggtaaatattccatatccttttctcacctttgcataaatctagaatggctaggcttactcgataaaacactttaatgcctaagaagaaggaatgtatgtaagctgaggatctgaatatgtgtccttttcgtgttttttttagtttaccctcaaaataaaacgcgtcccaaacacgtagcactgattcccaaggaagtgtcatggtaaatgcagttaggaaccattgggctatatacatgattggaagtacatcattgttttctaaatgctgagccaactttgggttatgatcctttaataattgcccaatgatgtatgcatcaattcttaactgggaaagtgtaggtgtgaagtatccattcatataccgatcaatagtagccaccaataaccaaaacgagtcctttttttaatacaaaaatagttaatccatcaactctagatttctatttcttttcttttttttctattacttcgacagtcatctgcataagcattagtcctgctaaacggcccatgccttggcaatattctaaatcagaattgtattgggcatatgcttttaatatatttcgcaaattctgttgtcccaagccatccttttccataaattgtgtgtgatcaggataacatcgttcaatatctctttcaatcacgtcgtaaatagggatcctaggcttggacaacaggttttgaaattgatttgatctcttgtagtcatcactaccagccaagaattgccacactttggctctcacagatgctggtattcctccacgaaccaattttttcatctttacatcctttttaaccgttccagcatcgagtttgttgattatatttaaccattttaattcattttctctgtattctttcatagctttggtagacatatttgctctgcatgtaaataaactattagcttcctgggaagataaaatggggtttcagggggtgaggaacaatgaagaagacatgtacctgaatgaaggacgaccgcgtttgataatgaatccatattcatcaacattttcattttgaataaaagttgaattgttattattctttgttggtgtagtctggcttttcctttgtacaccggtgttttgtatattagtagctactgggcgtgcaggagatcttggtggtggtatagggccgtacagttctgtgttctcttcatccgagtaatcaatgttgagtgcagatgtatcaaatggatcatgattattgttgttattatctaatcatatattacacgtataagattaattttatgattattgataagctgcttttttttttctgtacctagattttctccagaataattgtaggaatcgtatgatattcgagactcttttatattatgacttgaagaagtcgaaactgagcctatactttcaaaactcggcttactgacccagtgtctcgatgagggtacgggtgaagcatatcgatcagaattggaagaaaatgaatgaatagagcctcttaattggttgaattgttcttgtctatttttcatcatttctatatcaaattctgttccatggctacttgtagagtttctatattgcgaatggtcggtaaaatcaagatcagcgtcaagcgattctaatacacgaggatctaattctacaaaatgcacggtttctgcattaaaatttccaataacgccttcacagtatccctaaaagatctcttatattggtaaatctttatataaaatacagcattgtgctgtgtttatttaccatgtaaatatcattctctatatgttttaatatagtaatcctttctcctgtaaacaaatttagccttattttatatctaaaatgcctgtgtacacaaaccttgcaaatacatcagttcttcaggagtgttggccaaaatatccacttttgatacacaagcgcctaaaccacctatatattttttaacttggtcgatgtcacaatcctgtattgttgtaggaaacatacctttctcagcaaaggctttcaactcggctaaactcatcgaatcgacatctattgaagcattatccaaagcttctgctggatctttcaatagtcgtgcaatcttttcattaagctcttcgagattagcagaggtatgtcgtgtaatttttggttccatatatcaagtcaaaaaagagaaaaataaaataaggaagttccctccttttatatgaaagaaggaagaaaaaaaaggtgaagaggatggtttactcccaaataaggaagacatgtgcgattaaacaccgctatgagttacgtggagaagaacctttttttattgtttatttaaaaagtaacaaaatggcccccattttaaatgtctaaatcatcatctggatcttcgtcatcaaagtcatcagcagcgtcaggatcgtaatagattaagcctccttgcttcttttgctcctcaacgctaacttctaattgttgagccttgtaataaggcaagaccaaattctcctttgcttttctttgttcatcggtcaatgacaagttgaaggataaattggctgctggatcgggttggttgtctacttgcatctcttcaggttgattttcaacttcgacaacgcctgttaattgacttgctggtaccacttgaagtattccatctctcacaaggaacccatttgtctcataagttactttaccactctttttacgccattcaatatgtacaataccaccctttgtgattgcattggaagtggtagtcaaatatgaaaacgtatcttgaggtgtgaatccagtcagagctgcttgcgtatcaaagtgtgtgcgttctttaagtgcttcaagctttattgtgacagtagctaatttgttgatagattcttgcatacttaagccatttttagttggtaacttgatatcaaagtgatgtctaatcgccaagtgtgtggtgtctattgcttttttagtacaaatgaataaaaaaaaaaaaatacgataaccaaccagttgttaatgattctaatgtttttacaagttgataagttttaaattgagataccataaataatgacgctagagagtcaacaagaatcgtgcagcatggtgtatcatttacttgcttgatcaatggaagtaaaatggagttttcaatatcagttatattgttaatcaattgtacattgggatcatcgtttgctttattcacattatcccaaccatatggatctgtgtagcagtcgatgatgtgtatgtcttttgttgattcaaattgcttcttccaaacttttggtgatgtttctgttaacagcactacaagtgatttgttgtttttaagtgcgcgtttaccaatgtccactaagatggacattcccgataagcgaatagagtcattgattaaaataaaagaagaagacttgtttaatatttgttcaaagcaaagtgtattcattttgcttaaaaaagtttgattatctatttcttgggggctgttactttttgacaaatgcgtgacttgtagtgattttttctccatcattttatcatgcaattctaaacaacggcaaggacaactctatgtaaagagggaatggtgattcaattataggtcttaaatatagcttcgttaatgttaagctgatggctagaataatctcgttgtaatagagtatatctctataagaactttagatattcagcgcgttcacagtagaggcaaaggtgtttacaccaaaagccaatacaatctaggatttgatggtcacagtatctttcaataaactgtacaagatgcaatactattccttcctttgactaccatgcatttttctgtcgtcacagtttgataaacttatttttatatttgccgagttaaattatttatcattgaaattaaataaaaatcaaatatagaatttgaaccttgtagtttcaaatgaaatactgagaataccaaatttaagtcaattcttcattgagctgttgaaatgttgtattctttgtcataaatcattagaattagctattgcccattgtcatcgattaattctagaacatcccataaattggaaggcacttggtttcttacatattggcctagtttatctctttgatatattgtttgatgaagtattcaagcttactctgaacaccttgcttctaattggttttgtctttttttactgatgcatttaataaaaatatcattaaagttatatttcattctatttgcatactaaattcattgtttcaaacatctagctctttcttcctatatttctactattcagggacattcattcaagttactgaagaaaatgtatgcataaaacctgctatgaagaagtttaaaaaaccagacggattgacactcatggacgacaatatgatcattgtggttgctgcggtagtaatgtcacattgaatcagttcgtcaggatcgagataaccatgtggcttaaaaaggaacgctagagtatgcaaaagagttttcttgtggtagggcttgattataaattgtatatgctccagccttcggctggttgtcagaaactacacatttagatggcttctatctgtaacacatttgctttcagtagtagtatattggtggtgataa

SEQ ID NO: 232 - DNA, 11429 bp, Rhizopus sp.
  source 1..11429: mol_type = other DNA
agaaggaaaaggcagagagtctcagaggagaaatgcaagcaaacaagtctagtagtaaagcgataaaagaagctacccgaaagaagatttatggaccttgcaatcaggtgaagcttgccatcgcaaaaaaagagatgcctgaagttggtcttttagatgaccaatcaagaacgcaattaaatgattttctctcaagctactcagaggactacacctttcaaaagaactcaatttactatgacgttatggctagtccaaaaaaccatttcaaagccttcttcagacttgctgaacagtctgaagctgaacagacgaaacagtttgcttgtttcccgctacgtaccacctttatttcttgctacatgacgttggatagcaaaataatccattaccatgttctcaagagcaaaaagaatccaaaaacaggaagcaagtttgagacatggggtgccgtcgtagacctaaataaaaggtgttcgcgcatcaaggatttcaaaagcctttgcggttccaaggaattctcgaaacagatggagtcggtgtctccataataacgcaaaacactgatacaagcagaaagtcgcctaaacccaatattgaaaagaaagtagacggtaaccaaacagagcatattgaaggactagatcaagccaacttaaagagcattgaaggcaagtgcgtcttgatagacactggaagacgggacttgatgtactgcatgaaagaaaccagcactgttgaagaaaaacaaacacttatatttaccaagaacaaccgctcaaaatgctcaaggcatttcagatatttaagaaggcgtgctcaaccttttgtggtccagaaagccgaagcaatcctttctagatctaaatccaactctgtagacttgaaaaagtttgtacagtacattaaaacaagagcatcagtaaaaccattttgtacgaatacagtgctcacggcttcaaattgcgtccaaaaaaaaattcattgcgcatctttaattttcaaacagcgcatctttatttggtcaaattgcgcacttgtgatttctcaaactgcgctaataaaaaagtcaaactgcatattttacaactcaaattgcattacttttatttgtacctttttcataagctattatctctttaaaagcaaatatcagatcgataacatgtactcaataaaaggaaaaattatttttgaagatggtcaaggaaatgtttttgatgagagcgggaatgaagcaatggactgggatgaggaagttgatcctcataatttggagaacctaaccaacctaacacgctatttgaataagcaagtacagccggaaatggacttagacagtctggattttgttgaaaaaatgaaaacaatagagaagaaccttgaagagaaaaaaacgaaaagcaataataaaaaaaaatctatgttctgatgaccaaaaaaacgttatttatatatcttcacaagataaaattgttaaacgcagctgaatcggctcgaagagcgggagtgaaagtacgtacagggcaagcgtggtctgcaagaatgaaggaagatcctaactggaatatatacgaaaagcaaacgaatcagaacaaaattggacgaaatcatataattctgcattatccacttcattctcaagttctacagtgcttagttgtcttcttttgttgagataaaccaaaggaggagtctcttcaattggcgttgtttcgattgcttagtattttcttttctgtcgtttcaagaattccaaagtagcttccacatagcttaatgactttttttttgacgcttcatctcctttttccaggcatttttttatctcgcgcagttggacttcactaatactacaaattttgtttatagcctccaatctttcagcttcttctccaattaactggtcaagattatcatgcgcaattgagtatagtaattttactaaagaatcattccttccatagtctaaagtactaatcaacaaagactgagagcaaaggaaatagccaaccgcttgcaaaggatgtaatattttttcttgttgtttcatctgtaaagtcgaagatgtcagtagcaaacaatgtttagcccatccagtgcttagtatctgtctcgcaaaggggaggtcactatctatagacttgctcagaaaaggtgctgtactacttccaattccaaatatcacaatgatagaaagcctgttgtagcgttcgtatgtgagtgtacagtattgaatggcacgtgccaagaatttgtcgtcggcttgattttgtacttcaactagtacagatggaaatgaactcaagggatcgcggggagcatagagaacatcacttttttttttgttataaattctgtaggcgccgaaacatagttatcttctgccgcttctggcacgagagcttttaatagcatgtttatcacttgtttgtcggttaataccagtttgctgatcaaatcagttcctggcctgtgattataagggaggatgcgatcagtgtcatctaaacgattttatgtaagaaattatttgtatttttatagcatgtttacttacctttgtcaatactgaaatagtcagatattatttttgaaaagtaaaagtgaagaaagaaaaagcgtaacgtatccgtattgtatccataataaaaaaaatctacccctcgtctggtttccaagttaagccgagatattcataatcgtatcatcaagctaaatcagcttatctggcctcatatattgaatcaaaataaaccattgggtgaagtagatgattcagcattcatcgatgccttctgttcgcagccccagtggattaattacaaacctaaaccatttcggttgtctctcatacagcgatctctaccatcatcggcaatgtcaccaacaccaacttccaaatggtcacttttttggaaactgcctatttcgcctgaaagccgatctttatggtatcgtctattccaccgtaaactctatagtcaatcacttctttcaagatttgataatggtttgacctcttcacactgtaaattttgctctgctaatactgaagacttacaacacctcttcgtgcgctgtcctacgaaatggagagtatggatagatgctttcaatttctttagtccacatctcactttcactcaagacaatgtatgctcaatcctttggtcttttcagcagtttacttttgttgacaacagtgatatctagactctcagctgctgtgtgctttccgttatccggcgtgcccattgaagatttactattgacgactttccttttattgataaacagctgatcactcatgctttgtcgcaatttgccaccctcaaaaggggcagactcgatcttgactagcatgttcaatcgcctacactctgttccgtttggttcataccgctctcagacgtgtggctcctattataatttataaaaataaactatttatttacaaaaaaaaaaaaaaatatctctccatttgcttacttttgctcgctttttaaattagccaatcataaatttttattcctttcccctcacttgtctatcgggctgaattggttgtaattttgacaacatacctgtcgtattactgttttctgaatagatgtacatacaggaactagcgtcacttgacagctgtccttagatgtaaagtcaaaaacaaaatgcagcattttataagtattgatttttttatgtcaatagaacctgcttttcatcatcaagtattgttttcttttattagagcaattccatgtttccaatcgcgtcttttgtgtttactttagggtgaaagagtaactgcaatgtgatcctatattattatgaaacttatatttcaaaccaacagttaaaaagcgttttcctgggaagaaatctttttaaagcctatgtatatatagtttataaggaaaacatacaaagaatttttatctgcattatactaaatgtttgattgacacacacttattgaaacctgggtacaccggcagcaccagcctggtcaataaaacatgtgctcaacaacctaaaaattcacaaagtatataatgaatccaactctaaccaattattttcatgagatgtgtaatgtactgcttattttactacagttttttccttatctacaagaaatcatattttattacatgctatatgggttcaaggtttgaaaggacctctgctttttcgatacgcgctaatgtttattctgttcatttgtgtaaaaagtacaacattttcaatcaatataaatatcatttgggataaatcccatattcacacagacacgttgattttaaaacgcacggtgcttttatcacagtataagaatgagaaatgaaaacatgaataaatgcatggtttatggattcaaattaaatttaattttattaaaattcaattactagtttgccaaattgattaccacgactacataaaaataaaatgttagtatttctttttgttttccacgaaataaagtacgaacctcatagttaggatggcttgttcaaatgtgtttttatttaaacctttccaaacatgtgaaacaataggcctaatcttgtgtttttcgacaaattcaaccatttttctaaattctactcttgatcccatggtaactcctctgtaatcgatatttttgatgaagtaagatatcggaatattcagtccggtcgttacagtagctgtttgaccataacctacaacgatgccacctggtcgcatcagtttaggatattcagcataaagaggaccaccggcaccatcgatgactgcagacagcacgttattgcccaagagtttctttagttcctccatgcagttttctaatcatataatgtcaatattgaactacaagaatcctcaatttctaccatctttataattcactccgcctatagcacccagctcaatactcttttgaatcttttctggagaagaagatgtgacgtaaacatgggcacctgcagctacagcaaactgaagagcaaaaagtgcaacccctcctccaataccagtgattaggatatgttggcctttttgaactaagccctttgtaaacaaggatctataaagcatgttacgatcaaaattaagctttttttgtacaaaaggctttttggtacctgtaggcagtcaatccagccaatggcaaagcagcggcttctgtcattgaaagaaattcaggacaaggcacaatgtcctccttttcgacaatgacttcttcttttgtaaatgtgccaatcactggcaagagacccaatatgtgaaagtcacgttcaggacctctttcatccgaatcccatccatatccgggattaatcaagacacgttgtcctctttggccatttttcgtaatgtaaccaacgccatcagagcccaacacagaatctaatacagtaccatcatattgatccataaggatccaaacatccctttttaaaaaaaattaaaaaaagtcaagaaggagcctggttttgtttttaccgatggttgaaagcagcagcttgtatttggacagctacttgatgatccgcaaggttctcggaggatttgtgttccttgaattcaacgccgtacttgaattttgaatcaaaaggttgagtttcagtgagaatagcagagaccattttgtttcaaaaggcagtaatgatgtggtaaaggtagtgaaatggttgtatttatagtcattaaaaaaagcggaggggttagattaataagcagtaaacagctgctgtcacaaataccatttttcaaatgaattaataagcgcgctgaattctattaattttaaagcatcgttgatgaatcatatattcagatataatttattagcatcgtttattcaatcaacacgcaagattaaatgaatttgttcgtatccaaaaccaacttgctaatcttttaggacgtatttttcattgtaaatttttcattttgttaactgtagtacaaaagctgagaattgtaaacgttctgatagattttattaataagccttctattatctgcaaaaccaaccaagatttgatgaaaaaaagaaaaggaaagcatattattcgttttcataaagaaaaattgtgtagtctttaattatagtttattgagatcaagctatacagtagcagaactaaggacacgcttaacaaaagctgtcatcgatatccactttttttttaaacctcaacttgttacttgaatatcatgtacttgcgtgaaataaaagggtatttttcataaacatttgaatgtatttatattgctttgtgctttgaaataacagcttgctgttgtaacatttagttattttatgctttttttatatagaaagttctttgataagtagcatgttttagataatgttatattagtttattacaatttgcattaagtaaagtaattgaaatttatagatgaatttaggaaaagagaggaaaaagaagaatgaaggttgaatgaaatataaacattttcgtctaatcctctaagcatccgagtagtctcgcatgtttttggtggaggcctttttggcaattcgtccacctaaactctttagtcctaaactgtgtcctgggttaccgacttgaaggtttttgagaccatcctcaaatggaaggccagtgacagtggcatcctcggttcctgcctttttagcatatcgcttaatgttggtttttgataaattaatacggaatgcagtgtctagtaaattgttgggttcaaggtattcatgtggaatatgtaaaaggaaggcaagaagttctgaattggttggacatgagtgtaagagatgatctaaatattatttaaaagaaatgtacattggtaaatattccatatccttttctcacctttgcataaatctagaatggctaggcttactcgataaaacactttaatgcctaagaagaaggaatgtatgtaagctgaggatctgaatatgtgtccttttcgtgttttttttagtttaccctcaaaataaaacgcgtcccaaacacgtagcactgattcccaaggaagtgtcatggtaaatgcagttaggaaccattgggctatatacatgattggaagtacatcattgttttctaaatgctgagccaactttgggttatgatcctttaataattgcccaatgatgtatgcatcaattcttaactgggaaagtgtaggtgtgaagtatccattcatataccgatcaatagtagccaccaataaccaaaacgagtcctttttttaatacaaaaatagttaatccatcaactctagatttctatttcttttcttttttttctattacttcgacagtcatctgcataagcattagtcctgctaaacggcccatgccttggcaatattctaaatcagaattgtattgggcatatgcttttaatatatttcgcaaattctgttgtcccaagccatccttttccataaattgtgtgtgatcaggataacatcgttcaatatctctttcaatcacgtcgtaaatagggatcctaggcttggacaacaggttttgaaattgatttgatctcttgtagtcatcactaccagccaagaattgccacactttggctctcacagatgctggtattcctccacgaaccaattttttcatctttacatcctttttaaccgttccagcatcgagtttgttgattatatttaaccattttaattcattttctctgtattctttcatagctttggtagacatatttgctctgcatgtaaataaactattagcttcctgggaagataaaatggggtttcagggggtgaggaacaatgaagaagacatgtacctgaatgaaggacgaccgcgtttgataatgaatccatattcatcaacattttcattttgaataaaagttgaattgttattattctttgttggtgtagtctggcttttcctttgtacaccggtgttttgtatattagtagctactgggcgtgcaggagatcttggtggtggtatagggccgtacagttctgtgttctcttcatccgagtaatcaatgttgagtgcagatgtatcaaatggatcatgattattgttgttattatctaatcatatattacacgtataagattaattttatgattattgataagctgcttttttttttctgtacctagattttctccagaataattgtaggaatcgtatgatattcgagactcttttatattatgacttgaagaagtcgaaactgagcctatactttcaaaactcggcttactgacccagtgtctcgatgagggtacgggtgaagcatatcgatcagaattggaagaaaatgaatgaatagagcctcttaattggttgaattgttcttgtctatttttcatcatttctatatcaaattctgttccatggctacttgtagagtttctatattgcgaatggtcggtaaaatcaagatcagcgtcaagcgattctaatacacgaggatctaattctacaaaatgcacggtttctgcattaaaatttccaataacgccttcacagtatccctaaaagatctcttatattggtaaatctttatataaaatacagcattgtgctgtgtttatttaccatgtaaatatcattctctatatgttttaatatagtaatcctttctcctgtaaacaaatttagccttattttatatctaaaatgcctgtgtacacaaaccttgcaaatacatcagttcttcaggagtgttggccaaaatatccacttttgatacacaagcgcctaaaccacctatatattttttaacttggtcgatgtcacaatcctgtattgttgtaggaaacatacctttctcagcaaaggctttcaactcggctaaactcatcgaatcgacatctattgaagcattatccaaagcttctgctggatctttcaatagtcgtgcaatcttttcattaagctcttcgagattagcagaggtatgtcgtgtaatttttggttccatatatcaagtcaaaaaagagaaaaataaaataaggaagttccctccttttatatgaaagaaggaagaaaaaaaaggtgaagaggatggtttactcccaaataaggaagacatgtgcgattaaacaccgctatgagttacgtggagaagaacctttttttattgtttatttaaaaagtaacaaaatggcccccattttaaatgtctaaatcatcatctggatcttcgtcatcaaagtcatcagcagcgtcaggatcgtaatagattaagcctccttgcttcttttgctcctcaacgctaacttctaattgttgagccttgtaataaggcaagaccaaattctcctttgcttttctttgttcatcggtcaatgacaagttgaaggataaattggctgctggatcgggttggttgtctacttgcatctcttcaggttgattttcaacttcgacaacgcctgttaattgacttgctggtaccacttgaagtattccatctctcacaaggaacccatttgtctcataagttactttaccactctttttacgccattcaatatgtacaataccaccctttgtgattgcattggaagtggtagtcaaatatgaaaacgtatcttgaggtgtgaatccagtcagagctgcttgcgtatcaaagtgtgtgcgttctttaagtgcttcaagctttattgtgacagtagctaatttgttgatagattcttgcatacttaagccatttttagttggtaacttgatatcaaagtgatgtctaatcgccaagtgtgtggtgtctattgcttttttagtacaaatgaataaaaaaaaaaaaatacgataaccaaccagttgttaatgattctaatgtttttacaagttgataagttttaaattgagataccataaataatgacgctagagagtcaacaagaatcgtgcagcatggtgtatcatttacttgcttgatcaatggaagtaaaatggagttttcaatatcagttatattgttaatcaattgtacattgggatcatcgtttgctttattcacattatcccaaccatatggatctgtgtagcagtcgatgatgtgtatgtcttttgttgattcaaattgcttcttccaaacttttggtgatgtttctgttaacagcactacaagtgatttgttgtttttaagtgcgcgtttaccaatgtccactaagatggacattcccgataagcgaatagagtcattgattaaaataaaagaagaagacttgtttaatatttgttcaaagcaaagtgtattcattttgcttaaaaaagtttgattatctatttcttgggggctgttactttttgacaaatgcgtgacttgtagtgattttttctccatcattttatcatgcaattctaaacaacggcaaggacaactctatgtaaagagggaatggtgattcaattataggtcttaaatatagcttcgttaatgttaagctgatggctagaataatctcgttgtaatagagtatatctctataagaactttagatattcagcgcgttcacagtagaggcaaaggtgtttacaccaaaagccaatacaatctaggatttgatggtcacagtatctttcaataaactgtacaagatgcaatactattccttcctttgactaccatgcatttttctgtcgtcacagtttgataaacttatttttatatttgccgagttaaattatttatcattgaaattaaataaaaatcaaatatagaatttgaaccttgtagtttcaaatgaaatactgagaataccaaatttaagtcaattcttcattgagctgttgaaatgttgtattctttgtcataaatcattagaattagctattgcccattgtcatcgattaattctagaacatcccataaattggaaggcacttggtttcttacatattggcctagtttatctctttgatatattgtttgatgaagtattcaagcttactctgaacaccttgcttctaattggttttgtctttttttactgatgcatttaataaaaatatcattaaagttatatttcattctatttgcatactaaattcattgtttcaaacatctagctctttcttcctatatttctactattcagggacattcattcaagttactgaagaaaatgtatgcataaaacctgctatgaagaagtttaaaaaaccagacggattgacactcatggacgacaatatgatcattgtggttgctgcggtagtaatgtcacattgaatcagttcgtcaggatcgagataaccatgtggcttaaaaaggaacgctagagtatgcaaaagagttttcttgtggtagggcttgattataaattgtatatgctccagccttcggctggttgtcagaaactacacatttagatggcttctatctgtaacacatttgctttcagtagtagtatattggtggtgataa

SEQ ID NO: 233 - DNA, 11429 bp, Rhizopus sp.; identical to SEQ ID NO: 232
  source 1..11429: mol_type = other DNA

SEQ ID NO: 234 - DNA, 11429 bp, Rhizopus sp.; identical to SEQ ID NO: 232
  source 1..11429: mol_type = other DNA

SEQ ID NO: 235 - DNA, 11429 bp, Rhizopus sp.; identical to SEQ ID NO: 232
  source 1..11429: mol_type = other DNA

SEQ ID NO: 236 - DNA, 11429 bp, Rhizopus sp.; identical to SEQ ID NO: 232
  source 1..11429: mol_type = other DNA

SEQ ID NO: 237 - DNA, 11697 bp, Rhizopus sp.
  source 1..11697: mol_type = other DNA
gatttctttgttgaagtttttctgagtcttgttctctcaaagggtggaaatagcacaagactgaaggatacgaccaaaaactataggcgattgctatcgaaatataaaaaagcttactttgaagacgctggttaaactccccaaagcttaccataagctcagcaaatagccttgtacgagtgtacgaagatccaaacggcctactataatagcatcaaagctcattttggaaacaggctgcgtggtttgataaacaagttatttaaaaagaaggaaaaggcagagagtctcagaggagaaatgcaagcaaacaagtctagtagtaaagcgataaaagaagctacccgaaagaagatttatggaccttgcaatcaggtgaagcttgccatcgcaaaaaaagagatgcctgaagttggtcttttagatgaccaatcaagaacgcaattaaatgattttctctcaagctactcagaggactacacctttcaaaagaactcaatttactatgacgttatggctagtccaaaaaaccatttcaaagccttcttcagacttgctgaacagtctgaagctgaacagacgaaacagtttgcttgtttcccgctacgtaccacctttatttcttgctacatgacgttggatagcaaaataatccattaccatgttctcaagagcaaaaagaatccaaaaacaggaagcaagtttgagacatggggtgccgtcgtagacctaaataaaaggtgttcgcgcatcaaggatttcaaaagcctttgcggttccaaggaattctcgaaacagatggagtcggtgtctccataataacgcaaaacactgatacaagcagaaagtcgcctaaacccaatattgaaaagaaagtagacggtaaccaaacagagcatattgaaggactagatcaagccaacttaaagagcattgaaggcaagtgcgtcttgatagacactggaagacgggacttgatgtactgcatgaaagaaaccagcactgttgaagaaaaacaaacacttatatttaccaagaacaaccgctcaaaatgctcaaggcatttcagatatttaagaaggcgtgctcaaccttttgtggtccagaaagccgaagcaatcctttctagatctaaatccaactctgtagacttgaaaaagtttgtacagtacattaaaacaagagcatcagtaaaaccattttgtacgaatacagtgctcacggcttcaaattgcgtccaaaaaaaaattcattgcgcatctttaattttcaaacagcgcatctttatttggtcaaattgcgcacttgtgatttctcaaactgcgctaataaaaaagtcaaactgcatattttacaactcaaattgcattacttttatttgtacctttttcataagctattatctctttaaaagcaaatatcagatcgataacatgtactcaataaaaggaaaaattatttttgaagatggtcaaggaaatgtttttgatgagagcgggaatgaagcaatggactgggatgaggaagttgatcctcataatttggagaacctaaccaacctaacacgctatttgaataagcaagtacagccggaaatggacttagacagtctggattttgttgaaaaaatgaaaacaatagagaagaaccttgaagagaaaaaaacgaaaagcaataataaaaaaaaatctatgttctgatgaccaaaaaaacgttatttatatatcttcacaagataaaattgttaaacgcagctgaatcggctcgaagagcgggagtgaaagtacgtacagggcaagcgtggtctgcaagaatgaaggaagatcctaactggaatatatacgaaaagcaaacgaatcagaacaaaattggacgaaatcatataattctgcattatccacttcattctcaagttctacagtgcttagttgtcttcttttgttgagataaaccaaaggaggagtctcttcaattggcgttgtttcgattgcttagtattttcttttctgtcgtttcaagaattccaaagtagcttccacatagcttaatgactttttttttgacgcttcatctcctttttccaggcatttttttatctcgcgcagttggacttcactaatactacaaattttgtttatagcctccaatctttcagcttcttctccaattaactggtcaagattatcatgcgcaattgagtatagtaattttactaaagaatcattccttccatagtctaaagtactaatcaacaaagactgagagcaaaggaaatagccaaccgcttgcaaaggatgtaatattttttcttgttgtttcatctgtaaagtcgaagatgtcagtagcaaacaatgtttagcccatccagtgcttagtatctgtctcgcaaaggggaggtcactatctatagacttgctcagaaaaggtgctgtactacttccaattccaaatatcacaatgatagaaagcctgttgtagcgttcgtatgtgagtgtacagtattgaatggcacgtgccaagaatttgtcgtcggcttgattttgtacttcaactagtacagatggaaatgaactcaagggatcgcggggagcatagagaacatcacttttttttttgttataaattctgtaggcgccgaaacatagttatcttctgccgcttctggcacgagagcttttaatagcatgtttatcacttgtttgtcggttaataccagtttgctgatcaaatcagttcctggcctgtgattataagggaggatgcgatcagtgtcatctaaacgattttatgtaagaaattatttgtatttttatagcatgtttacttacctttgtcaatactgaaatagtcagatattatttttgaaaagtaaaagtgaagaaagaaaaagcgtaacgtatccgtattgtatccataataaaaaaaatctacccctcgtctggtttccaagttaagccgagatattcataatcgtatcatcaagctaaatcagcttatctggcctcatatattgaatcaaaataaaccattgggtgaagtagatgattcagcattcatcgatgccttctgttcgcagccccagtggattaattacaaacctaaaccatttcggttgtctctcatacagcgatctctaccatcatcggcaatgtcaccaacaccaacttccaaatggtcacttttttggaaactgcctatttcgcctgaaagccgatctttatggtatcgtctattccaccgtaaactctatagtcaatcacttctttcaagatttgataatggtttgacctcttcacactgtaaattttgctctgctaatactgaagacttacaacacctcttcgtgcgctgtcctacgaaatggagagtatggatagatgctttcaatttctttagtccacatctcactttcactcaagacaatgtatgctcaatcctttggtcttttcagcagtttacttttgttgacaacagtgatatctagactctcagctgctgtgtgctttccgttatccggcgtgcccattgaagatttactattgacgactttccttttattgataaacagctgatcactcatgctttgtcgcaatttgccaccctcaaaaggggcagactcgatcttgactagcatgttcaatcgcctacactctgttccgtttggttcataccgctctcagacgtgtggctcctattataatttataaaaataaactatttatttacaaaaaaaaaaaaaaatatctctccatttgcttacttttgctcgctttttaaattagccaatcataaatttttattcctttcccctcacttgtctatcgggctgaattggttgtaattttgacaacatacctgtcgtattactgttttctgaatagatgtacatacaggaactagcgtcacttgacagctgtccttagatgtaaagtcaaaaacaaaatgcagcattttataagtattgatttttttatgtcaatagaacctgcttttcatcatcaagtattgttttcttttattagagcaattccatgtttccaatcgcgtcttttgtgtttactttagggtgaaagagtaactgcaatgtgatcctatattattatgaaacttatatttcaaaccaacagttaaaaagcgttttcctgggaagaaatctttttaaagcctatgtatatatagtttataaggaaaacatacaaagaatttttatctgcattatactaaatgtttgattgacacacacttattgaaacctgggtacaccggcagcaccagcctggtcaataaaacatgtgctcaacaacctaaaaattcacaaagtatataatgaatccaactctaaccaattattttcatgagatgtgtaatgtactgcttattttactacagttttttccttatctacaagaaatcatattttattacatgctatatgggttcaaggtttgaaaggacctctgctttttcgatacgcgctaatgtttattctgttcatttgtgtaaaaagtacaacattttcaatcaatataaatatcatttgggataaatcccatattcacacagacacgttgattttaaaacgcacggtgcttttatcacagtataagaatgagaaatgaaaacatgaataaatgcatggtttatggattcaaattaaatttaattttattaaaattcaattactagtttgccaaattgattaccacgactacataaaaataaaatgttagtatttctttttgttttccacgaaataaagtacgaacctcatagttaggatggcttgttcaaatgtgtttttatttaaacctttccaaacatgtgaaacaataggcctaatcttgtgtttttcgacaaattcaaccatttttctaaattctactcttgatcccatggtaactcctctgtaatcgatatttttgatgaagtaagatatcggaatattcagtccggtcgttacagtagctgtttgaccataacctacaacgatgccacctggtcgcatcagtttaggatattcagcataaagaggaccaccggcaccatcgatgactgcagacagcacgttattgcccaagagtttctttagttcctccatgcagttttctaatcatataatgtcaatattgaactacaagaatcctcaatttctaccatctttataattcactccgcctatagcacccagctcaatactcttttgaatcttttctggagaagaagatgtgacgtaaacatgggcacctgcagctacagcaaactgaagagcaaaaagtgcaacccctcctccaataccagtgattaggatatgttggcctttttgaactaagccctttgtaaacaaggatctataaagcatgttacgatcaaaattaagctttttttgtacaaaaggctttttggtacctgtaggcagtcaatccagccaatggcaaagcagcggcttctgtcattgaaagaaattcaggacaaggcacaatgtcctccttttcgacaatgacttcttcttttgtaaatgtgccaatcactggcaagagacccaatatgtgaaagtcacgttcaggacctctttcatccgaatcccatccatatccgggattaatcaagacacgttgtcctctttggccatttttcgtaatgtaaccaacgccatcagagcccaacacagaatctaatacagtaccatcatattgatccataaggatccaaacatccctttttaaaaaaaattaaaaaaagtcaagaaggagcctggttttgtttttaccgatggttgaaagcagcagcttgtatttggacagctacttgatgatccgcaaggttctcggaggatttgtgttccttgaattcaacgccgtacttgaattttgaatcaaaaggttgagtttcagtgagaatagcagagaccattttgtttcaaaaggcagtaatgatgtggtaaaggtagtgaaatggttgtatttatagtcattaaaaaaagcggaggggttagattaataagcagtaaacagctgctgtcacaaataccatttttcaaatgaattaataagcgcgctgaattctattaattttaaagcatcgttgatgaatcatatattcagatataatttattagcatcgtttattcaatcaacacgcaagattaaatgaatttgttcgtatccaaaaccaacttgctaatcttttaggacgtatttttcattgtaaatttttcattttgttaactgtagtacaaaagctgagaattgtaaacgttctgatagattttattaataagccttctattatctgcaaaaccaaccaagatttgatgaaaaaaagaaaaggaaagcatattattcgttttcataaagaaaaattgtgtagtctttaattatagtttattgagatcaagctatacagtagcagaactaaggacacgcttaacaaaagctgtcatcgatatccactttttttttaaacctcaacttgttacttgaatatcatgtacttgcgtgaaataaaagggtatttttcataaacatttgaatgtatttatattgctttgtgctttgaaataacagcttgctgttgtaacatttagttattttatgctttttttatatagaaagttctttgataagtagcatgttttagataatgttatattagtttattacaatttgcattaagtaaagtaattgaaatttatagatgaatttaggaaaagagaggaaaaagaagaatgaaggttgaatgaaatataaacattttcgtctaatcctctaagcatccgagtagtctcgcatgtttttggtggaggcctttttggcaattcgtccacctaaactctttagtcctaaactgtgtcctgggttaccgacttgaaggtttttgagaccatcctcaaatggaaggccagtgacagtggcatcctcggttcctgcctttttagcatatcgcttaatgttggtttttgataaattaatacggaatgcagtgtctagtaaattgttgggttcaaggtattcatgtggaatatgtaaaaggaaggcaagaagttctgaattggttggacatgagtgtaagagatgatctaaatattatttaaaagaaatgtacattggtaaatattccatatccttttctcacctttgcataaatctagaatggctaggcttactcgataaaacactttaatgcctaagaagaaggaatgtatgtaagctgaggatctgaatatgtgtccttttcgtgttttttttagtttaccctcaaaataaaacgcgtcccaaacacgtagcactgattcccaaggaagtgtcatggtaaatgcagttaggaaccattgggctatatacatgattggaagtacatcattgttttctaaatgctgagccaactttgggttatgatcctttaataattgcccaatgatgtatgcatcaattcttaactgggaaagtgtaggtgtgaagtatccattcatataccgatcaatagtagccaccaataaccaaaacgagtcctttttttaatacaaaaatagttaatccatcaactctagatttctatttcttttcttttttttctattacttcgacagtcatctgcataagcattagtcctgctaaacggcccatgccttggcaatattctaaatcagaattgtattgggcatatgcttttaatatatttcgcaaattctgttgtcccaagccatccttttccataaattgtgtgtgatcaggataacatcgttcaatatctctttcaatcacgtcgtaaatagggatcctaggcttggacaacaggttttgaaattgatttgatctcttgtagtcatcactaccagccaagaattgccacactttggctctcacagatgctggtattcctccacgaaccaattttttcatctttacatcctttttaaccgttccagcatcgagtttgttgattatatttaaccattttaattcattttctctgtattctttcatagctttggtagacatatttgctctgcatgtaaataaactattagcttcctgggaagataaaatggggtttcagggggtgaggaacaatgaagaagacatgtacctgaatgaaggacgaccgcgtttgataatgaatccatattcatcaacattttcattttgaataaaagttgaattgttattattctttgttggtgtagtctggcttttcctttgtacaccggtgttttgtatattagtagctactgggcgtgcaggagatcttggtggtggtatagggccgtacagttctgtgttctcttcatccgagtaatcaatgttgagtgcagatgtatcaaatggatcatgattattgttgttattatctaatcatatattacacgtataagattaattttatgattattgataagctgcttttttttttctgtacctagattttctccagaataattgtaggaatcgtatgatattcgagactcttttatattatgacttgaagaagtcgaaactgagcctatactttcaaaactcggcttactgacccagtgtctcgatgagggtacgggtgaagcatatcgatcagaattggaagaaaatgaatgaatagagcctcttaattggttgaattgttcttgtctatttttcatcatttctatatcaaattctgttccatggctacttgtagagtttctatattgcgaatggtcggtaaaatcaagatcagcgtcaagcgattctaatacacgaggatctaattctacaaaatgcacggtttctgcattaaaatttccaataacgccttcacagtatccctaaaagatctcttatattggtaaatctttatataaaatacagcattgtgctgtgtttatttaccatgtaaatatcattctctatatgttttaatatagtaatcctttctcctgtaaacaaatttagccttattttatatctaaaatgcctgtgtacacaaaccttgcaaatacatcagttcttcaggagtgttggccaaaatatccacttttgatacacaagcgcctaaaccacctatatattttttaacttggtcgatgtcacaatcctgtattgttgtaggaaacatacctttctcagcaaaggctttcaactcggctaaactcatcgaatcgacatctattgaagcattatccaaagcttctgctggatctttcaatagtcgtgcaatcttttcattaagctcttcgagattagcagaggtatgtcgtgtaatttttggttccatatatcaagtcaaaaaagagaaaaataaaataaggaagttccctccttttatatgaaagaaggaagaaaaaaaaggtgaagaggatggtttactcccaaataaggaagacatgtgcgattaaacaccgctatgagttacgtggagaagaacctttttttattgtttatttaaaaagtaacaaaatggcccccattttaaatgtctaaatcatcatctggatcttcgtcatcaaagtcatcagcagcgtcaggatcgtaatagattaagcctccttgcttcttttgctcctcaacgctaacttctaattgttgagccttgtaataaggcaagaccaaattctcctttgcttttctttgttcatcggtcaatgacaagttgaaggataaattggctgctggatcgggttggttgtctacttgcatctcttcaggttgattttcaacttcgacaacgcctgttaattgacttgctggtaccacttgaagtattccatctctcacaaggaacccatttgtctcataagttactttaccactctttttacgccattcaatatgtacaataccaccctttgtgattgcattggaagtggtagtcaaatatgaaaacgtatcttgaggtgtgaatccagtcagagctgcttgcgtatcaaagtgtgtgcgttctttaagtgcttcaagctttattgtgacagtagctaatttgttgatagattcttgcatacttaagccatttttagttggtaacttgatatcaaagtgatgtctaatcgccaagtgtgtggtgtctattgcttttttagtacaaatgaataaaaaaaaaaaaatacgataaccaaccagttgttaatgattctaatgtttttacaagttgataagttttaaattgagataccataaataatgacgctagagagtcaacaagaatcgtgcagcatggtgtatcatttacttgcttgatcaatggaagtaaaatggagttttcaatatcagttatattgttaatcaattgtacattgggatcatcgtttgctttattcacattatcccaaccatatggatctgtgtagcagtcgatgatgtgtatgtcttttgttgattcaaattgcttcttccaaacttttggtgatgtttctgttaacagcactacaagtgatttgttgtttttaagtgcgcgtttaccaatgtccactaagatggacattcccgataagcgaatagagtcattgattaaaataaaagaagaagacttgtttaatatttgttcaaagcaaagtgtattcattttgcttaaaaaagtttgattatctatttcttgggggctgttactttttgacaaatgcgtgacttgtagtgattttttctccatcattttatcatgcaattctaaacaacggcaaggacaactctatgtaaagagggaatggtgattcaattataggtcttaaatatagcttcgttaatgttaagctgatggctagaataatctcgttgtaatagagtatatctctataagaactttagatattcagcgcgttcacagtagaggcaaaggtgtttacaccaaaagccaatacaatctaggatttgatggtcacagtatctttcaataaactgtacaagatgcaatactattccttcctttgactaccatgcatttttctgtcgtcacagtttgataaacttatttttatatttgccgagttaaattatttatcattgaaattaaataaaaatcaaatatagaatttgaaccttgtagtttcaaatgaaatactgagaataccaaatttaagtcaattcttcattgagctgttgaaatgttgtattctttgtcataaatcattagaattagctattgcccattgtcatcgattaattctagaacatcccataaattggaaggcacttggtttcttacatattggcctagtttatctctttgatatattgtttgatgaagtattcaagcttactctgaacaccttgcttctaattggttttgtctttttttactgatgcatttaataaaaatatcattaaagttatatttcattctatttgcatactaaattcattgtttcaaacatctagctctttcttcctatatttctactattcagggacattcattcaagttactgaagaaaatgtatgcataaaacctgctatgaagaagtttaaaaaaccagacggattgacactcatggacgacaatatgatcattgtggttgctgcggtagtaatgtcacattgaatcagttcgtcaggatcgagataaccatgtggcttaaaaaggaacgctagagtatgcaaaagagttttcttgtggtagggcttgattataaattgtatatgctccagccttcggctggttgtcagaaactacacatttagatggcttctatctgtaacacatttgctttcagtagtagtatattggtggtgataa

SEQ ID NO: 238 - DNA, 11431 bp, Rhizopus sp.
  source 1..11431: mol_type = other DNA
aaagaaggaaaaggcagagagtctcagaggagaaatgcaagcaaacaagtctagtagtaaagcgataaaagaagctacccgaaagaagatttatggaccttgcaatcaggtgaagcttgccatcgcaaaaaaagagatgcctgaagttggtcttttagatgaccaatcaagaacgcaattaaatgattttctctcaagctactcagaggactacacctttcaaaagaactcaatttactatgacgttatggctagtccaaaaaaccatttcaaagccttcttcagacttgctgaacagtctgaagctgaacagacgaaacagtttgcttgtttcccgctacgtaccacctttatttcttgctacatgacgttggatagcaaaataatccattaccatgttctcaagagcaaaaagaatccaaaaacaggaagcaagtttgagacatggggtgccgtcgtagacctaaataaaaggtgttcgcgcatcaaggatttcaaaagcctttgcggttccaaggaattctcgaaacagatggagtcggtgtctccataataacgcaaaacactgatacaagcagaaagtcgcctaaacccaatattgaaaagaaagtagacggtaaccaaacagagcatattgaaggactagatcaagccaacttaaagagcattgaaggcaagtgcgtcttgatagacactggaagacgggacttgatgtactgcatgaaagaaaccagcactgttgaagaaaaacaaacacttatatttaccaagaacaaccgctcaaaatgctcaaggcatttcagatatttaagaaggcgtgctcaaccttttgtggtccagaaagccgaagcaatcctttctagatctaaatccaactctgtagacttgaaaaagtttgtacagtacattaaaacaagagcatcagtaaaaccattttgtacgaatacagtgctcacggcttcaaattgcgtccaaaaaaaaattcattgcgcatctttaattttcaaacagcgcatctttatttggtcaaattgcgcacttgtgatttctcaaactgcgctaataaaaaagtcaaactgcatattttacaactcaaattgcattacttttatttgtacctttttcataagctattatctctttaaaagcaaatatcagatcgataacatgtactcaataaaaggaaaaattatttttgaagatggtcaaggaaatgtttttgatgagagcgggaatgaagcaatggactgggatgaggaagttgatcctcataatttggagaacctaaccaacctaacacgctatttgaataagcaagtacagccggaaatggacttagacagtctggattttgttgaaaaaatgaaaacaatagagaagaaccttgaagagaaaaaaacgaaaagcaataataaaaaaaaatctatgttctgatgaccaaaaaaacgttatttatatatcttcacaagataaaattgttaaacgcagctgaatcggctcgaagagcgggagtgaaagtacgtacagggcaagcgtggtctgcaagaatgaaggaagatcctaactggaatatatacgaaaagcaaacgaatcagaacaaaattggacgaaatcatataattctgcattatccacttcattctcaagttctacagtgcttagttgtcttcttttgttgagataaaccaaaggaggagtctcttcaattggcgttgtttcgattgcttagtattttcttttctgtcgtttcaagaattccaaagtagcttccacatagcttaatgactttttttttgacgcttcatctcctttttccaggcatttttttatctcgcgcagttggacttcactaatactacaaattttgtttatagcctccaatctttcagcttcttctccaattaactggtcaagattatcatgcgcaattgagtatagtaattttactaaagaatcattccttccatagtctaaagtactaatcaacaaagactgagagcaaaggaaatagccaaccgcttgcaaaggatgtaatattttttcttgttgtttcatctgtaaagtcgaagatgtcagtagcaaacaatgtttagcccatccagtgcttagtatctgtctcgcaaaggggaggtcactatctatagacttgctcagaaaaggtgctgtactacttccaattccaaatatcacaatgatagaaagcctgttgtagcgttcgtatgtgagtgtacagtattgaatggcacgtgccaagaatttgtcgtcggcttgattttgtacttcaactagtacagatggaaatgaactcaagggatcgcggggagcatagagaacatcacttttttttttgttataaattctgtaggcgccgaaacatagttatcttctgccgcttctggcacgagagcttttaatagcatgtttatcacttgtttgtcggttaataccagtttgctgatcaaatcagttcctggcctgtgattataagggaggatgcgatcagtgtcatctaaacgattttatgtaagaaattatttgtatttttatagcatgtttacttacctttgtcaatactgaaatagtcagatattatttttgaaaagtaaaagtgaagaaagaaaaagcgtaacgtatccgtattgtatccataataaaaaaaatctacccctcgtctggtttccaagttaagccgagatattcataatcgtatcatcaagctaaatcagcttatctggcctcatatattgaatcaaaataaaccattgggtgaagtagatgattcagcattcatcgatgccttctgttcgcagccccagtggattaattacaaacctaaaccatttcggttgtctctcatacagcgatctctaccatcatcggcaatgtcaccaacaccaacttccaaatggtcacttttttggaaactgcctatttcgcctgaaagccgatctttatggtatcgtctattccaccgtaaactctatagtcaatcacttctttcaagatttgataatggtttgacctcttcacactgtaaattttgctctgctaatactgaagacttacaacacctcttcgtgcgctgtcctacgaaatggagagtatggatagatgctttcaatttctttagtccacatctcactttcactcaagacaatgtatgctcaatcctttggtcttttcagcagtttacttttgttgacaacagtgatatctagactctcagctgctgtgtgctttccgttatccggcgtgcccattgaagatttactattgacgactttccttttattgataaacagctgatcactcatgctttgtcgcaatttgccaccctcaaaaggggcagactcgatcttgactagcatgttcaatcgcctacactctgttccgtttggttcataccgctctcagacgtgtggctcctattataatttataaaaataaactatttatttacaaaaaaaaaaaaaaatatctctccatttgcttacttttgctcgctttttaaattagccaatcataaatttttattcctttcccctcacttgtctatcgggctgaattggttgtaattttgacaacatacctgtcgtattactgttttctgaatagatgtacatacaggaactagcgtcacttgacagctgtccttagatgtaaagtcaaaaacaaaatgcagcattttataagtattgatttttttatgtcaatagaacctgcttttcatcatcaagtattgttttcttttattagagcaattccatgtttccaatcgcgtcttttgtgtttactttagggtgaaagagtaactgcaatgtgatcctatattattatgaaacttatatttcaaaccaacagttaaaaagcgttttcctgggaagaaatctttttaaagcctatgtatatatagtttataaggaaaacatacaaagaatttttatctgcattatactaaatgtttgattgacacacacttattgaaacctgggtacaccggcagcaccagcctggtcaataaaacatgtgctcaacaacctaaaaattcacaaagtatataatgaatccaactctaaccaattattttcatgagatgtgtaatgtactgcttattttactacagttttttccttatctacaagaaatcatattttattacatgctatatgggttcaaggtttgaaaggacctctgctttttcgatacgcgctaatgtttattctgttcatttgtgtaaaaagtacaacattttcaatcaatataaatatcatttgggataaatcccatattcacacagacacgttgattttaaaacgcacggtgcttttatcacagtataagaatgagaaatgaaaacatgaataaatgcatggtttatggattcaaattaaatttaattttattaaaattcaattactagtttgccaaattgattaccacgactacataaaaataaaatgttagtatttctttttgttttccacgaaataaagtacgaacctcatagttaggatggcttgttcaaatgtgtttttatttaaacctttccaaacatgtgaaacaataggcctaatcttgtgtttttcgacaaattcaaccatttttctaaattctactcttgatcccatggtaactcctctgtaatcgatatttttgatgaagtaagatatcggaatattcagtccggtcgttacagtagctgtttgaccataacctacaacgatgccacctggtcgcatcagtttaggatattcagcataaagaggaccaccggcaccatcgatgactgcagacagcacgttattgcccaagagtttctttagttcctccatgcagttttctaatcatataatgtcaatattgaactacaagaatcctcaatttctaccatctttataattcactccgcctatagcacccagctcaatactcttttgaatcttttctggagaagaagatgtgacgtaaacatgggcacctgcagctacagcaaactgaagagcaaaaagtgcaacccctcctccaataccagtgattaggatatgttggcctttttgaactaagccctttgtaaacaaggatctataaagcatgttacgatcaaaattaagctttttttgtacaaaaggctttttggtacctgtaggcagtcaatccagccaatggcaaagcagcggcttctgtcattgaaagaaattcaggacaaggcacaatgtcctccttttcgacaatgacttcttcttttgtaaatgtgccaatcactggcaagagacccaatatgtgaaagtcacgttcaggacctctttcatccgaatcccatccatatccgggattaatcaagacacgttgtcctctttggccatttttcgtaatgtaaccaacgccatcagagcccaacacagaatctaatacagtaccatcatattgatccataaggatccaaacatccctttttaaaaaaaattaaaaaaagtcaagaaggagcctggttttgtttttaccgatggttgaaagcagcagcttgtatttggacagctacttgatgatccgcaaggttctcggaggatttgtgttccttgaattcaacgccgtacttgaattttgaatcaaaaggttgagtttcagtgagaatagcagagaccattttgtttcaaaaggcagtaatgatgtggtaaaggtagtgaaatggttgtatttatagtcattaaaaaaagcggaggggttagattaataagcagtaaacagctgctgtcacaaataccatttttcaaatgaattaataagcgcgctgaattctattaattttaaagcatcgttgatgaatcatatattcagatataatttattagcatcgtttattcaatcaacacgcaagattaaatgaatttgttcgtatccaaaaccaacttgctaatcttttaggacgtatttttcattgtaaatttttcattttgttaactgtagtacaaaagctgagaattgtaaacgttctgatagattttattaataagccttctattatctgcaaaaccaaccaagatttgatgaaaaaaagaaaaggaaagcatattattcgttttcataaagaaaaattgtgtagtctttaattatagtttattgagatcaagctatacagtagcagaactaaggacacgcttaacaaaagctgtcatcgatatccactttttttttaaacctcaacttgttacttgaatatcatgtacttgcgtgaaataaaagggtatttttcataaacatttgaatgtatttatattgctttgtgctttgaaataacagcttgctgttgtaacatttagttattttatgctttttttatatagaaagttctttgataagtagcatgttttagataatgttatattagtttattacaatttgcattaagtaaagtaattgaaatttatagatgaatttaggaaaagagaggaaaaagaagaatgaaggttgaatgaaatataaacattttcgtctaatcctctaagcatccgagtagtctcgcatgtttttggtggaggcctttttggcaattcgtccacctaaactctttagtcctaaactgtgtcctgggttaccgacttgaaggtttttgagaccatcctcaaatggaaggccagtgacagtggcatcctcggttcctgcctttttagcatatcgcttaatgttggtttttgataaattaatacggaatgcagtgtctagtaaattgttgggttcaaggtattcatgtggaatatgtaaaaggaaggcaagaagttctgaattggttggacatgagtgtaagagatgatctaaatattatttaaaagaaatgtacattggtaaatattccatatccttttctcacctttgcataaatctagaatggctaggcttactcgataaaacactttaatgcctaagaagaaggaatgtatgtaagctgaggatctgaatatgtgtccttttcgtgttttttttagtttaccctcaaaataaaacgcgtcccaaacacgtagcactgattcccaaggaagtgtcatggtaaatgcagttaggaaccattgggctatatacatgattggaagtacatcattgttttctaaatgctgagccaactttgggttatgatcctttaataattgcccaatgatgtatgcatcaattcttaactgggaaagtgtaggtgtgaagtatccattcatataccgatcaatagtagccaccaataaccaaaacgagtcctttttttaatacaaaaatagttaatccatcaactctagatttctatttcttttcttttttttctattacttcgacagtcatctgcataagcattagtcctgctaaacggcccatgccttggcaatattctaaatcagaattgtattgggcatatgcttttaatatatttcgcaaattctgttgtcccaagccatccttttccataaattgtgtgtgatcaggataacatcgttcaatatctctttcaatcacgtcgtaaatagggatcctaggcttggacaacaggttttgaaattgatttgatctcttgtagtcatcactaccagccaagaattgccacactttggctctcacagatgctggtattcctccacgaaccaattttttcatctttacatcctttttaaccgttccagcatcgagtttgttgattatatttaaccattttaattcattttctctgtattctttcatagctttggtagacatatttgctctgcatgtaaataaactattagcttcctgggaagataaaatggggtttcagggggtgaggaacaatgaagaagacatgtacctgaatgaaggacgaccgcgtttgataatgaatccatattcatcaacattttcattttgaataaaagttgaattgttattattctttgttggtgtagtctggcttttcctttgtacaccggtgttttgtatattagtagctactgggcgtgcaggagatcttggtggtggtatagggccgtacagttctgtgttctcttcatccgagtaatcaatgttgagtgcagatgtatcaaatggatcatgattattgttgttattatctaatcatatattacacgtataagattaattttatgattattgataagctgcttttttttttctgtacctagattttctccagaataattgtaggaatcgtatgatattcgagactcttttatattatgacttgaagaagtcgaaactgagcctatactttcaaaactcggcttactgacccagtgtctcgatgagggtacgggtgaagcatatcgatcagaattggaagaaaatgaatgaatagagcctcttaattggttgaattgttcttgtctatttttcatcatttctatatcaaattctgttccatggctacttgtagagtttctatattgcgaatggtcggtaaaatcaagatcagcgtcaagcgattctaatacacgaggatctaattctacaaaatgcacggtttctgcattaaaatttccaataacgccttcacagtatccctaaaagatctcttatattggtaaatctttatataaaatacagcattgtgctgtgtttatttaccatgtaaatatcattctctatatgttttaatatagtaatcctttctcctgtaaacaaatttagccttattttatatctaaaatgcctgtgtacacaaaccttgcaaatacatcagttcttcaggagtgttggccaaaatatccacttttgatacacaagcgcctaaaccacctatatattttttaacttggtcgatgtcacaatcctgtattgttgtaggaaacatacctttctcagcaaaggctttcaactcggctaaactcatcgaatcgacatctattgaagcattatccaaagcttctgctggatctttcaatagtcgtgcaatcttttcattaagctcttcgagattagcagaggtatgtcgtgtaatttttggttccatatatcaagtcaaaaaagagaaaaataaaataaggaagttccctccttttatatgaaagaaggaagaaaaaaaaggtgaagaggatggtttactcccaaataaggaagacatgtgcgattaaacaccgctatgagttacgtggagaagaacctttttttattgtttatttaaaaagtaacaaaatggcccccattttaaatgtctaaatcatcatctggatcttcgtcatcaaagtcatcagcagcgtcaggatcgtaatagattaagcctccttgcttcttttgctcctcaacgctaacttctaattgttgagccttgtaataaggcaagaccaaattctcctttgcttttctttgttcatcggtcaatgacaagttgaaggataaattggctgctggatcgggttggttgtctacttgcatctcttcaggttgattttcaacttcgacaacgcctgttaattgacttgctggtaccacttgaagtattccatctctcacaaggaacccatttgtctcataagttactttaccactctttttacgccattcaatatgtacaataccaccctttgtgattgcattggaagtggtagtcaaatatgaaaacgtatcttgaggtgtgaatccagtcagagctgcttgcgtatcaaagtgtgtgcgttctttaagtgcttcaagctttattgtgacagtagctaatttgttgatagattcttgcatacttaagccatttttagttggtaacttgatatcaaagtgatgtctaatcgccaagtgtgtggtgtctattgcttttttagtacaaatgaataaaaaaaaaaaaatacgataaccaaccagttgttaatgattctaatgtttttacaagttgataagttttaaattgagataccataaataatgacgctagagagtcaacaagaatcgtgcagcatggtgtatcatttacttgcttgatcaatggaagtaaaatggagttttcaatatcagttatattgttaatcaattgtacattgggatcatcgtttgctttattcacattatcccaaccatatggatctgtgtagcagtcgatgatgtgtatgtcttttgttgattcaaattgcttcttccaaacttttggtgatgtttctgttaacagcactacaagtgatttgttgtttttaagtgcgcgtttaccaatgtccactaagatggacattcccgataagcgaatagagtcattgattaaaataaaagaagaagacttgtttaatatttgttcaaagcaaagtgtattcattttgcttaaaaaagtttgattatctatttcttgggggctgttactttttgacaaatgcgtgacttgtagtgattttttctccatcattttatcatgcaattctaaacaacggcaaggacaactctatgtaaagagggaatggtgattcaattataggtcttaaatatagcttcgttaatgttaagctgatggctagaataatctcgttgtaatagagtatatctctataagaactttagatattcagcgcgttcacagtagaggcaaaggtgtttacaccaaaagccaatacaatctaggatttgatggtcacagtatctttcaataaactgtacaagatgcaatactattccttcctttgactaccatgcatttttctgtcgtcacagtttgataaacttatttttatatttgccgagttaaattatttatcattgaaattaaataaaaatcaaatatagaatttgaaccttgtagtttcaaatgaaatactgagaataccaaatttaagtcaattcttcattgagctgttgaaatgttgtattctttgtcataaatcattagaattagctattgcccattgtcatcgattaattctagaacatcccataaattggaaggcacttggtttcttacatattggcctagtttatctctttgatatattgtttgatgaagtattcaagcttactctgaacaccttgcttctaattggttttgtctttttttactgatgcatttaataaaaatatcattaaagttatatttcattctatttgcatactaaattcattgtttcaaacatctagctctttcttcctatatttctactattcagggacattcattcaagttactgaagaaaatgtatgcataaaacctgctatgaagaagtttaaaaaaccagacggattgacactcatggacgacaatatgatcattgtggttgctgcggtagtaatgtcacattgaatcagttcgtcaggatcgagataaccatgtggcttaaaaaggaacgctagagtatgcaaaagagttttcttgtggtagggcttgattataaattgtatatgctccagccttcggctggttgtcagaaactacacatttagatggcttctatctgtaacacatttgctttcagtagtagtatattggtggtgataa

SEQ ID NO: 239 - DNA, 21056 bp, unidentified
  misc_feature 1..21056: note = Fanzor polypeptide
  source 1..21056: mol_type = other DNA
tcttgtcgtataagctgccgagataaatgactgatgccacgatatccgatgggctttgtcgtcttgtcgatgatcccgcattacagatgctcgcgtacgccttcttgcctgccaagataacttccctcaggatgaccttcgatggttcgaacagatatgggaaacaattttcgagacttgtttcgatttcattcacaagtcgtttgtacactttgtttactttgtcctcagtattgcgaaaaacatacttcttcaagttgagtcgagtagatgatgtcatctatctaatctaatctatctatctaatactactatgagtcttctgtgtaagacaaaccctttatactatttttcatgttgtgtggggggcaaagcggattgtcgtactgcggttaaggggggcccctcccaatgaatgtacatcccatcgaccatgcgtgagacggccgctgattcggggacgcgacaaaacattattttttttttcttccgcttactttttcgctcctgcatttaggttcgtcttcttcgggtaatgggaacatctcggcatggcaaacccgttttggcagtgcctcggccgtcgtgcgtttctggacgaacgtgtggaacgtgttcctcagcacgcggatgtaacgcacatatgtcgataagaatgcgtcgatacctatgcgtggacagttcgtgtcgtgctcctggttgtgcacatagttttggaacacgagaattccgctcggatgaaggagtcgcattgcgtgtacgccgctctcgagagcatgcaccgaatcttttgcgtctacgtaaacgatatcgtacgttccacctgaggacgaagaattagaaagggatgccagtgacgtttctgggggcagcactgttgaattgcctgctttatccacaactttttggagcgtgtttctcacgttttcaggtgggttccacactgcctgtccgcgctcgtacacacacggtttgtaatcgaacgggtcgaggacggtggcagtgtccttaggtcctgtgagtacgttttctattagccactgcaggaccctgccttcatatgcgcctacgagtagcgcatgcactccattgttgcggtaggatgccttgcccctccatttcgggtcaagcagaatactctcccatgcgggtatgtgatccgtgaaccagtcgattctgaattgggccatttgtaaatggggcggaaaaaaatgttgagaacaactttgtaatggcggcggcgtctttctgtcgaaaaaaaaggcttccaatgtaaatcgttgcacatgttcctagcatcggctgctatattcttcgtcctatgtctgttatcgtacgacaagatgctccccaaattttcgagcaatctgtatcgccgtctgaagatccatgtgtccgacccagacaaaaacacaacaaagttgacacctttgtattttttggctctaagcattcacggtaatatgacggcggcttttgctttgtcattgggagttctattttgctccaccttctgcattattacattagttgtgtccaagtacatgattccaaatgtacgcaaccggttattgaatatcttagatcttcgccggttattctccatattgtcatctagccatcgtgatctccacattgcgatggtagttgtgttggtcagtgttattcttgtcgggacgatggtattcataaaagacaccgattgcaatagcaaggaagaggaaacattggcgaagatacaataccaggtactgtttacaaatatcaatgccgcattcatggcgcttattgttttactgatgtacacaatcatgaacatcaacactacagtctagcttgagacatcagcaccaaggaatcacaattccgctccataccatgtttcgcagccagtcaaaattggccgggaggcaggaacgcccattacgatgtgatgcgatggatgatctggaatcagggtttcatcatcacagtggacgcgaaataacaaacacactgcatgaatgcatctgccaagtcgtccttctttttctcctccaagaactcggacataatcgagtgatccttgatcacatcgtgaagaagaacgcacgttcgaacgacggcgtcccccttgttcagtgcatacttcctacgttgctccggcaatgaacttccacgtccacgtcgccccctgctgctttcaacagttccactaggtcctcctctattgccacggttgtcgtcctctagaggggcatcggagtcgattgacatatcaatcaccactggtactgttgcaaagcgttctagcagctctctcagaggtggtaatgaatccattgaaacgggtaagcaatccgtcttcagctttattacaggactcacaaacacgacgcgtccgacttgcttcctcaatacaaactcgctgaagtactggcacaaaaacatttgaacggccatcatgatcatgctgcgacgcttgggttgtctctcgataaggacgtagtcgatgttctctccttggccaccttctctcaatttggttccaaaccgcttctccatttcggcggtcaacacgagggcacacctttcagggaaattggatacagacgaccctccgagatcaatcacctcccattcagtgacctttccggacgctatcgaattttccggaaacgacattcgacagaaagcgaggttcctcgttcccacgtcaaacgatagaaatgaatgaggcatggtgaactctgatggtttgatttaactggactccgtatgtaggcgaacaactccttaagtaccctccctcctgaataaaacaatcagtgtttaagcggtactactttgtggatgcggcgcaagctggaatacttcccccgacatctagagatccatccacacgtgcaaaagtacgtttaccgactctcaagttcgagttgcacttgctgttgctgtttgcggtgacatgttttccatgcgggcgctgatgcgtatggtgcgggtcgaacgagaaccacgcggaatccgatggggcgttggcgatccgctcgttcgtgcgacccatgtgcacccgcattggatgttgcggttgacccacataatcgaggtagaaatcgcgaaagacgttatccggacagagaagcgaccaaggtgacgctgaagcggtggtctcttgcatagcctcgttcctagcattatcacgcgccactatgagacgtgtgcacaattcctgttgagcatcgctccgcatcgaatatccctcccactcacacgcaatctgcagtgctcttgcgttcaggagcgtctgcgtgaagcttgctacacgtaggcagacctcatctggaccatcattgagagtcatgaacccgcacgacggcactacacgtgtgtggctgtcaaatgctatcgcaatgatatgaccgtgcaagctgacttcgctacgtccgtcaagcagccctaacagtgggcggaacgcgcgccactccgtgtctggtgtaagatccgtaagggcggcgcgcaaggcggtgatatcctcgatgaacgcggacgtgcacatgacagagacatcgcactcttctgcaacatgatgattgtcggatggcggtgataaggcattcatgaagtgatccagagcgcaccctcccaccattacgcacctcgaagatcgggatgcaaagaaggcgcgagcaagggcgcgcgcacgaaatactagaagatgatcgtcattgcatgaggcggcgggtccattcatgggtgggtttgggtgttcttgttcgacaattcgtagccctgattctacccaattcgtttccgacgtgaagttctgctcgatgagtagcatgcgtctcaccgcatactctaggcgccaatgagaattgaacgggtcgcagagcatgttcatgatgtccagcttagcaaactgcggatgtacaacctttgatttgggaactgcttccacacatggaatcttgtggtagatggactctggaacgaacgtcacatcgcacatgcgtacgaattcgatgctgatcgtgaaggtgctgtcatgctgcgcctccttgccgcgaacaaactcgtgattcctagacaacgtcatacacaactcagcaacgtcctcaagaggcgtggggctgtagaactcaacgtctatgtagtcgtcatcatcgttgtagagcccttctttgtctgacgccacgagaagagtgtgtatagcatagcccccgtatattatgcgaccgcgttctcgagcaaactcaacgatgactttcaatgcagcttttcgctctgaagatgttggacgcatatgcatcgaactagcaacttgagctgatcgggacaaggcaacagcattgctacaaatttcttcaacatctgatgaataaatcaatggggggatgagtgtaacaccggacatatctttcacatgtccgttgggttggatgtgaacgattaaagaccctcttctttacacttgttctcaaataaagttgtaatgtaagtttatttcgcaaccagtaaaaatcgcccgggaggctggaacgcccattaacaactgtattcagtgtaaacataactcgattaattaagtgagttgaatgtgaggtgaatgtgaggtgattgtgaagaacaacaaacaggatgaaaacaggattcgtgtacgctctcttggagcgcgagtttacaaagaccaaagagcccgtcataaaaataggtatgagtagaaaggcaaacccagcagacagacttcgagggtaccccaagggtagcttttacatttgggtacgacacacgccgtccgcgtcaaaggacgagcgcctgatcctcgcgacaatgaagatatggttcaagcagcgaacggacttaggggcagagtactttgagggagaccaaaacgtggttactggcctgctctccgcgctaatgcaggcccgggagagcatgatgagcgaagagtcggacgatgatgttgtgtcctcagattctcctgaggaccaggggatcgagaagccagagccccagcaaaagcctgcacctgtcgacaacatcgctttgttcgatgcgtttgccagagagaaatttcctacactcaacagggccagcatcccgtgcgcaaagatgcatgcgatgttttcagacttctggaatattaacacggaggctgtgatgcgtgtgggaaacacatggattgaacgccagtgcaagtcgcgtctgggcgcaacgctgaggccgcatacagaccccgatacaaacctaccaaatcccatgattgttttcccacccttgttgttcgacaaggatcgccacaatgtaccaataccccatccattgttcacgaaatattcttacagaagaacgtaaacaaatggccgtggttcactaatattttgaggaagttgattccgcggtgctgatatacactcgaaccggagtgtacggtacacattgcggtgtaacctaatgttgtcgcgaccaccggagggggaccgagtggtgtctacaacaatacgagtttttattcatcaacaacaacagagctgctgtgggcaaatggaagaggtcgtcctagacccatcaattccatgcagtgcagccttgcgattgtgagagcagaagagcgatcccggtccgagtaaatgcatgtttctggagagaatcgcagtcctcgtacctctgggtaccgctcgatcgatttttgagaatcgacaagggaagtggcgaagccacccctcctgtgcttctcttgtgcgcctttacgtttattgtacaaccttacccctaagtggtcgcaatcagcgacctttggcatcgttttcgatttagtgtgaccaaaacgttcaccacccaacctaagattcacgtctgctgaacaaacacttgggatcttgtaaacacgttctttttctttacccgtctcccacgacataagagtcgttttgaactcatctgtcacagaaacgtcctctttgaaaattcttttacacgatgcgaacatggccccggtgggaactgcaacttctccaggtccagtaggcttcagtttcgtgatggcagatccgtaggccacgcaaaccttcataccaggaagttctttcatcatgcaccgcttgatacccgcccagaaagagtctttgacctttcgttttccgatgtaacgctgcaagttgtcacgggattctcggcgtcgcaaagccaatctccaccactcgtcagaaaacttagcgtaatttgacaagtacgcggatatcttatccgtcctcgatgtactcaaagctgctccattttcacgcagagactcccacataggaatcatgtcagcaaaacgcagttccttctgccttgtctgcttcttgatacccgacttgtgttaaaatgcaccacgtgtcagcttccatgtcttatttttatcgtctgccaaatacgttaccgtagcgatgttgctccgtcctgggtccacacccaggacgacgatacccatatcgggcaatatcgttttaagtgagccgtcgtatttttctgcgatcttgataccttcttctttacgaggcttcttacaggtcttcttcaaatctgagacaaggacctgtactgtcttgctgtactgcatgctcaaagagactccgtcagtacagatgctgcagtcgaaaacccacccattcttgacaggtggttttctgaagaaggaacctgcgactgtttttcgggcgttcacaagcgtgtcatacaaaccctttgcatgtctgtactcgtcagtagccttgatatccttaacatcatcatcgtactgcttcaggaccgacttgtatgcatcccattcaccaggaccacatgattttttcttcttctgtgcaggcctctggggcaacatgaagctttcgggattctttacatgttcccacttggaaagctcaacgatgttctggtcattggggaacatgtgcctgaacaggttcacgagggtcttcaggtcaaggcgaacatgcacccgttggacattgaagatgggcatcaatcggatacgacgtgcatccatatcctccaaccgtgtctgtatccaataattaaaccggaccatggtcggaaagtccatgtctttgccatagttatcataaactcgacttccatctggaacactcagcatctccctaacttcattgacgtactcttgaacagactctggccatccctccatgttttggacttcttgctgaatagcctgcatcacgtcgtatccccgaatgatcttcgatgtgtccagcgtcttcggggcatttaatttattaaagtggtggaagtgagtctggccagacgtggtatcaaaggaacccatgcgttgtttgacacgacagtgctcaatgtgtgacctgcatagttcaatacctgatcgaaatagatcggataagacttgatgtagtcagcgtcgtcattaccaattacatcgccgatggagtccttcacagcttcgtacgatatcttgctttcctcatcagggaagattccgtctaccccgatacggagccaatccttccagtaggtatctttcatgttgtacaggtctggaatatccagacctttctctaatagactcgtgatgtggaaagtcagcacaagactggaccgccgtaacatgcggctcaccacattgacgagctggtccacatgctccctaaacttaccgaattcttcatcgtcaagactcattgccttcttcagggcgcatttcacgacacacatcttttccaccgtcttgtattctggagggggtctggcgatgagaccattgtcttcgcataaacggacaatatcgtccttcttgtcctttgatgagtatgctacttcggccaattttagtagctccttcaatttagcgactgtcggaggtttcgttgccatcttacataatttatacatcacagaactctttatacaaacatcacatacgtgttccatacgtggtcaaaacaacccataatgattttatcagtgaggttgctgaatgctaaggaaatcatatcagacacgtgcgtctttgtatcgattcattcattcgtaaacacagaagttttgaacacacacaagtcagcgaccattcttaacgccaattttctatcgtacatttccatctgatatatgtttcattttactgttccgccaactgtagtattccgtcgagtgtagagagagtcattccggaggatcgtcccgttgaattttattttttttaaatttgaatttgaattttatttttttgtgttcgtgttccactataaaatgtccctagctgtatggacatcattcatgcctgcaacagcgcaaacaggtggtcggaatcgcaatcgaaatcgaaaagaaaaaaaaagtgtacaggtggaggagcagcatcatgatggcgatggtcatcgcattttggatagaaatgataacaacaagaattctttagatagccattacaaaaagaagcagcatcgtcaggatcgatcgcatagtagtagtaagagtaattacgtgaactttgcaagtatacaatgggttaggttcgagaacgtcaaggaggacgcgactgtcttcaactttatcgaaaagggtggtggcaagttcgtgacatgggacatggacgagcacgtcaacgacatggtgggcaggatcacatcgagccctctggaagaattcttcccgagcggtcctttcaaggtattcttcccaatccgaatcaataacggtgaacttagaggcgattttttcatccaacatgcatttgaatacccccccacgtacctcgccatcttcaatgcggtgcgaaccaccattataacagccatatcgttcgtcatagtgagcgaaggagaagacgatggtgtagtagggaacaaacaaaatgcagagcaatacctttcacaagttatcgtgcaaaaccttttggtgcgaatcacaggtggcgcaagacatgtctatgtgcactgggagaagaaacgacttaacgacgatgcactgacccgtcgttcaatgaaacgcctctccatgtctccgattcccatcaagtaaaaaaagattcgtgttttatacagttgttctcaaataattttgggacactcagtataatttgaatgatatcccctgaaaccaggtacagggtccgtggttcactacaaatattttttgaggagtctcaggaaggtttgtaatatatacaacgtgtccaagagctcactacatagatgggtcaatgctgatcaggtgggtaaaagtaagcgtttaaaacgaaaaaggaaagaattgtccatgcttccacgttccacgatatccaataatattgcagagaaccccttcataacatgcaaggattttgtcggtataatttgcaagagttgtaatgtgagattatcgatcagtactgcatcgagacacataaaacaatgtggattttctaggaagaaggcgtttcccacagttctctacggacattcaaaagaaaatgtagaaatgttttgtgacaagtacagataaagctctaacgttgtttgtatcgacgaagcaggattttacgcttgagaacacagcaaatatggatacagcaagatcggttctcgattaactacgaagacaatgagtaacctccgtcgtgtgaagttcactttattactcgctatttcatctcagggaataatagattatcagttattggagcacaattgtaaaaaagaagatttcattaaattctttaaaactttggtcatcccaaagaaaaccacgatcgtcatggataatattcggtttcaccattcttcagaaatcaaggatatatccgaatgcaaagggtggaagcttttgtacacccctccttattgccccagagctaatgcgattggacaaatatttggaagcatgaagagagactacagggcatcatgtccattgacgtcaacctgtaatttcgattacttaatgcaaatatgttgtgttctagaaatgtggaggtataaagacttgtcaaaatatatgattaatacgagagattgggttaggaatgttcgagagagcctgtctgcagatccagattacatcaaaacgttttcggggtacaatttgtgatggagaatgggatcggcgagtcatcatcgttggtacatgaggctgaccaacatgatgacgttgcagaacttgtcgattatgaaggggaggaagacggggagtgtgcacctgggcgagcgatttgtgtggtcaagatgaaattgagtacctttattccccatgattggcttcgtaacaagatagacacactggtactggacatgaacaagttgcttggagagggttatattttcgcaaatttccacattgctcgtctttttgagaatggtatcgctgtccctcccgtaaatcgcaacttcttctaccggtgccttattgcagtcagtaccaacaaatgtaaggggtcgactcttggcgaagacttcgagagtagtcggcttctgttcgacttgttaagagagccggggcaatccaaagttgacattcgggggagcgtgaagaaccagatcattgcagacctgtctattctcatggccacaatggcctctaaccatctttggaccaaccttgagcgacgcataacgacttacttgaagtggaagtacccacagattgcaaagcgcctgcggtcggacatcgtggctgcattgatcaagtgccctacaaagaatctcgacgtcatcttcaagatgagccctcatacaacaaagctgccaaccaagcttccaacatctagacttcgatcggcaaaaagtgcagttgctcttgcgaagaagagggtcggtaggaaggaaccagaaggatcccctttgcgtgttaggttgactaaacttcaagagaggcttgaaaagttgagcgaagcttggctctcctcgaagaaccttagggtggacgcagataacgaaacgcttctttgcacgcgaagtggcattctgtctcaggggggttctacctttaccatccggaaacacttttgcgtctcgggctcacatgaccctgcctctgtaccacaagatattgtcggagaccatcgaagaaaaacgaaaaactaaaaacgaaaaacatcgcacattctcgttgttgccttacaaatctggattcactctgtcgcacattccgatttcgaaaatggcctttttctatatggtcaacgagtgccactttgattcatgcaaggcagacgttgcttccaaaaaccatcaaggaatatgggagcgattcgcaaacctcaagaaagtggagacagtttctcggaagttcggttaccgcattgtgacagacggctttgcagtcagcatcttgatgaataagcctacgtgtctgacatgttcgatgcctgcagacgcgttctctacgcgggcgcatgagtacgtgacaacagacgagggtggcattgtatccttccttgacaatgtggtcgtggctgcggtagacccgggtgttactgatatcgtgactgtaacaggactcaacggaggtaccagatcgtacagctcggcgcaatattatcgcaagggtctgatcttcaagtctcagcgtcaaactgacgtttggaacctcgagacggctgatatcgtcggtggtatcattccggatagagactcttcgagttctgaacagattggtgcgtacgccagattctacatgggtgccgccccaatccttcttgcccatcgtgcttccagggggtaccgaaacctccgctttcgaaggtactgcaagaaacagaaacttattgttgagattgctgacttcgtagctccgagaaagaagagcgctaaggtactcgtcgggtttggtgattggaaaggtctgggggcgacgccaatctctaggcggacttgtggccctctccaagctattcgtttcgagcttcgtagccgagaaaacgtcatcatggaggacatcgatgagttcagaacatctcaacgatgcagctgctgtgagaaccacctttgcaacatggtggcactcactcatcgtaagaagcaagacggtacaggttgggaatgtacagaaggacgcaagcggattcataagattctccactgcaaaagcagtcaaagcggagcgccacgccaacagagcggtggtatgcttcactgcgggaagacttgggaccgcgatgtgaacgcttccagaaacatcctgatgcttacacttcaccaagtctttgggagagagcgtcctctcgcgtttcgccgagacgcgccgagaagttcctcgacaaccccacccccaccccctgatactgatatggggacacagacggttgaacggtttaccaaagaggctactcggaatatcttcgagaacctcttcaaccttctgcaccccccaacgttgcccaaaagcaacgatctgcagtctggatgattataaagtttcccactttatttaagaacaactgtatttaagaacacaacacctgtaaaccatgatcgacgccacaagtaaccgattgagaggggcgaacattatagaattcgcgagcccgaatcttaattcagagcatgtcgtgcaattgttcgatacattcataggggggcctttcacaatcacaacagaggacggagatgaggagattcagcaaagcagcacacgtgtatacgttgctagaacccataaatatgataacatgggtaattgtaacaatggtaattgtaacaagaaatcgatattgcccatccccgttattttggacaatcgagcgtttgcgtccgcttctcccagctcgcgagcgttgtacagtttgttccttgtattcgcctctcttaaacacggcaacgatacagcttccctccgcgaggaaataagaaaacaattcaaaaaggcgttctttgttcatggggcatcatcatccattaaaactaagtcgagcgcgaacgtgcgcaccgtggtccggtgcatgaatggctacctccgaactgcgcccctcgaccaggcaactccctcagatatcgtggtcacattagagcagtgcccctctctcaacgctatccggtaccttccgtccacacatgagtgcatggccgcaaaagcgttggctgtagtcatcgcccatgcatctgtaaacggagaaatagatcatgtgctcccctcacttgacgcagtggcagccatggtgcttcctaacggctcccgtgtcctcctgcccactgccaacaagagcatcgtcatcaaacaaccgggtctgagtacgaaaaaaaatgttatctcttagtattctgtccatcccaactaagtgaatccatactacacatgaatcggcttatatacgacgcatgcgcttactcgacgagtctcggtgagagcacggcccctgtagagtacatgcttgacctctcggcgcacgagcactgcgataagtgccgtgtcgatatcggtatcgtgggcggaacgaacgtttcgcatgtgaacgggacgttggtggacatcgagaacgatctaaaagggatcaaccgccccagcaccaagtgcccaggcttcaacttcctcccgactgccgacggaagcatccagggaaaggaatacatcaagcctgtgtgccaccctcgcatcgacatgtcgtcccagaaccaccttagggtctgtcagttttcaaggtacccagaacgcgtagagtctgctccaccggcgcctgttcaattcacttgtccctcccgaacaaggcattgacatgcaacaactttaagaggaaatttatattttcatgaagtaatcgaaaattatttgagaacaaatgtatgatcatgacaattgtactaatgaaaaatcaaccctccgccacaagtgccaagaccaagaccaagaccaagaccaatacttcattaggaaaggacgaagttgtgtataattcatgggtagttcatgatcacgtcccgaacacacaacctccagaagcgtgtccgttttcgtcgtacgacgaacttaatagcttgttgcttcggtacaataacatagtttgcggttcttgcttgaatcctgcccccctgctcgagataatcgataggaaggattacgacaacctttctgagaagcataggatgttgttgccttatgtcgtgattcaaatgtcatgcggtgattccttggtgcgtggtatcaataggaagaagatcaccgggaacgaaatgattgaaacatctctgaagaagttcatcgagtccaatatgaaatgggtatctaataaggcaaacatccacgtgtccaaggacggtcgcaaaaggatcgatgactacaagggaaaggagtaccagaacgtaattgttgcaaacgcattgcttatgttgttgcttaatgcgttggttacagggaacgaagagattgtcgcgtttgaaaggtttgaggcaatcatgcatgcttgaaaaattcacaccaaaacgtttccacctccacagactgatgttcgtacacacacagaagtttttaacccaattcagcgaccattcttaacgccaattttctaacggagatgtcgtacatttatttatttccatctgatatatgtttcattttacggttccgccaactgtagcatgcaagagcttaaaaatacaacttctatcgcagttccacccttgactaaggcggtattgcaccccgtcctaagggcgttgactgactcgaatcgtctcgactttacgcagcttacggatcgcatgtacttgcaaccgatcgtcacgggtggggtaaaggagctcgatcgagcgatttccaccaagaggtttttttcattatcttcgaacaccgccaataacgtttacttactcattatcggaggcgcattctcattattgcaaaactcctcccctggcgaaatcgttaacaagattcttttcgcaggcgttatgatggcaaccatgcaaatgagcgctattattggaactgagcctaacacaggccgcgacgaagacggattcatctcattcgggacaactaagttttctgaagcgcaatatggtgagtacttaactctaattaataacaccgctgtattgatcattaatgagttccctgtttcggcaaggacactcgaggagtgtgatgaaaaatgcgagaagatcgccatcgacttccactcgagttcatcatctcctctaaaagggtcgcagattaaggcgatgtacttcatagggttgaggccttttgtgagagcattatacgttggtatgttctgcaaagatgacaggcttataaaccagtctacagggcagcctttagtccgtccagactcgactgtgtatgactctcgcacagcagaaatgctcttgatgacagctgccactcaaataatatttattttattgaacgaactcgagaacatagcgagtgatgcgaacatagcggtccaactgtcacccatgcttatgaagacgtttatgaacacgatcgttcatttttacgcgcgccaggacgtcacgacaggtgaccatgccatcatggcgatgtacaaaaaagtcgtcaatatctccaaaaccaatgagaaacttagaagttatgtactgcgcggcaacaatgaactaatggttcgcaaggaggacgcgatgacaatgtaccgcaacatggaattgagcaagaagagaaccagtgcaagtaaatcgtattacatgttttggatcatcactttattggtgtacataatctcagcgttcattgttaatttaaaaggctcgtctatagatgtgtactggatgaatggtatcgtatttgcgttactcgccattggactattctgaactattcaggatttatactcaaaattaagagcctccggaacgactcgatagcctgagatatcagcaccgaggaatcacaattccgctacagaccattttcgcaaccagtaaaaatcgaccgggaggctggaacgcccattacgattgtgtttcatacagctccttcataacgtttcgaaccatgtctggcaacacgggacaagatgcagtgtccctcccatttaatagttctttggagagctcgtccatccacaagtgctcctcatagtccatgtcatctccgcgcatggtctcactcttgtcagggtggatgtgaacgatcacgcgcatgatatctcggtgagtccatgatcgctccctccaattatggcgggcctctggagacaaccagtacttccaccacataatctgcaacggcgtgaccaagccctgggaatcgccatatgataggtaagccgcacatatctcgcttcggttcaacgttgataaggacatcgatggagacattcctagatcggtgtcatggcaccgctcctcccggtcatggtaccgctcctcacggtcatggtaccgctcctcacggtcatggcaccgatcctcccggtcatggcaccgctcctccctgtcatggcaccgctcctccctgtcatggtaccgatcctcccggtcatggcatcgctcctcccagtcatggcaccgatcctccctgtcatggtaccgatcctcccggtcatggcaccgctcctcccggtcatggtaccgctcctcccggtcatggcaccgctcctcccggtcatggcaccaatcctggttatggaaccgctcctcccggtcatggcaccgatcccggtcatggcaccgatcctggtcatggtaccgctcctcctggtcatggaaccgctcctcccggtcatggaaccgatcctggtcatggaaccgatcctggtcatggaaccgatcttttaggtgctcgttctcgcgaactgatgatgagtaatgcgaacgttcactcctcctactagtaccagttgattcttgtcgcctggtgctagtagtgctgcttcggtgaccaccgaatccctgcgcaatacaaacaaatgttgtggtgagagatattacagggattcatccagctcttcggaacaatccagctcttaggtacccacccggtgggttggatagagtttcatagggatgctgcccactctatttacgtcgcgcgctctgtacatgggaccgaatgggagccgagaccccggcttcgaaggactactggttgtgcagttgaatcgcatgttgtaagctcttgattgaggattcgttatctatcttttgcataggttcatgcatttatataatttttgcatgtacttcacattgtagtgctgggaatgcggtgtgtgtacattgtggtcgcgttcatggctcatgtacactcttggaaatgccgttgaattttagtgtacccgttttatgtattgtaagaatctgccttgttgtgctctgacaggttgagttgttccccaattccatctttcatgttggcatacttagtcggttttcctttggagtatactgatgagacatcctcttgattgagagcgcggttgtagtaaatcatgtttccgatgcggttgttcgagataggattcttccctgggaagaggtgtagtcggttcttgttaggtcgcatggcactggcgatcttctttgtcgcatacaacgtgtcgttgatgtatgcacggatgatgatgccctcctcgtgattgctgatagcgacgtggtcttcgaatgtaaacgtcacaagcatccacttgtcctgtcccaatttcatgacgtttctgcggaggctgctgttagacgtgtttgatacggaccggataacgaagcgctcgtctgggtcatgaattgtgttcaactcgacctggaaagaatcgtaggttggtccgaaaagaatacgtggacacttcgtagttaccgtccttttattctctacacgctcattcacaccggtggctacactgaaatctttgtcggtaaagcgaaccattctgtaatcgaagacggtagggtcccccttcaaaataatgtccctgaacttgacgttatgggaatcggtgttgcgcatgttgatccaaaattggtaagtgaactggatgccgcccttgcggttgtaggaaggacgaataggcatgtaattggacgcgtattcgttacttgtcgtgaagaaacggttgtgaagctctgccatcgagatccagccgttaatcatcaacacttctactttgtggtcaacctgcttttgtttcggcatcaacccgtccctgttcgttgcaaacaacgaaatcaggtatattaagtacactacaaatactcctgcgacaatctgtaacgcatctttcaactttttgttcatcttacaaggacgaagttcccatacagttgttttcatatttttttggagatcaccgtgagggaaaaatgttgtgagggacgaacgagtcgatgcacctgaaaggttgttgcgactcgattggacggcgtttgatagacaatatcaaatcgttatctccatgcacaacagatggaatgggacggacatccctcgatgaagtgtctctgaattgtttctgagtagtagacgatggaagattaactgtgtttggtcggatctcgtgccggaaagaggccttcgacttgtcatgtggtagccaactgatgtccattgttttcgtggcgttgacgcgtgacacttcgaaaccgttcatcacgaggtgcctcatagaaaatcggatgcatctctcgatgtcaaacatcgggtaaccaaaaacaacctctggaatttcgaagtgacacgtatacattcctacagatgcgcaccgcttgatccgggaataaacacgttctagaactaccacgaagacttcacgttgtttccgttcacgctccttgctaatggtggtcaaatcccttgcagacacctggttcattacaatgatatcctgcattccgctttaattttatggaacaatacattgaaacacttttttttttatgattaacgaattaacgatgcacagaacgcgtggcttccattgcttgtaaaaaaatcgtgattcattttaaactacttagagccgcagtttaggcagcactcaacaagtccctctatatcatgtctataacatcaactgttggcaccgcgctcaaaaattcaatcctcgctggactatctgtcgtcatcattcactttgtttttaagaacatcgcgacttcccgttcgtcagaacaacaacgcattcctcaacactactaccccgaacgcgacgacaccaattacaatagaagctacatcaccaattacaacagcgacattggagaaaggtcagatgaggaggaggacgtggacatgataaattacatatacggtgacaacaacaaagaacaattcatggaatcgaccccatcatcacatgaaacaacaacacaaataccttccaaaacactgtctgccacaacaaaagcggactcaaaagcatcttcttctccactagggcatgttaatgcgtttgaaggtttcttcgacgatggaatcttggcatcagtgtcttccaccccatgtaaagataacgcgaccgcatcactagacgcattgttcgctcctctgaattaaatcaaatgaagtccttaaacagttgttcaagtacttcatggttgtatcacctgtaacctcgacttcctcgcattcttcttagtttggatgagtgccgcgatgtgacttcttctggcgcataagtacgttttgtcatcgctaatactactaacgttactactattagtagcggtaccggttgtatcattagtagcggtaccggttgtgagaagaatgcggctttcaagggtggctatagaaacgaacgcttggtcttcttgaacgaccggattgcaagaatcacgcgcaatgataatatcccgttgagtaccgatgatgtcctcgcggatgatcttatcaagtgtattggcgatatctccccatgcgaagtctctgacgatgcgttcgcgagcactcgccccgtgcctgcacatgaggtctctgtccccgtagtacctcatgatggcatcggcgaagtcgacaggcgcggagagttcggcctcgccgcccacgccatcgcgagcggtgtccacgtaaatggagatcttgggcttgaccatgagagcgcatgtctcatcgaagaaatgcaggaaaccacccaatgcaggcacgacttgagggattcctatggccgcctgctcaaagttgcagagaccgaatccctccccgtcgcacgtgttgattccgatgtctgcgacgttgtacaggaagttagtctccatgtccgttaacatctgcgggtgcccgggaacgaccaatcgatcgcgaacaacctggggggcgtcttttactccccgcttgagtagctctcgctcgaagagttcgggtatgttccaagcaccggtcagcgccgtaccgactacgagtcggatgggtgcattggggaggcgggcgacgacctcggcgaacgcctggagacatatgtcccaccgcttccgcggctggttgcggttaaggttcaggatgaggaatgagtcccctggcagtccgaaaaaacggcgcgcgaggtctttgggtacgggaaagtatgtattggggttgaagccgtgggggagggagaagcatggaagccgcatcccctgtccgatgatgcagtctcgccatccgggagtgaaagctagcaccgcattcgcattatcattcacgtatgcgaggagatcgcggcgctgtgataggtacacctggtctatatacgcgatcactttgaactcggagcggttgggtgcggcgcacacctctctcaatatggtggtcaggacaatgaggtcgttaaaaatgatgacaacgtccgggcggatgcgtgttacataatcgcgtgcgcaattgaccccgaacccttgcgatcgtgggatttcgtttgctaatgcatcgaacacgatcacgttcgcaggcacgtccttccgatggcctgggtggttgtgcatgttctggaacccgaagatgtgaagctccatatccggagcattccacaccttgctaatctcatagacgaccttgctgtatccgttgaactgattcggatgtgttccgaagatgactaccttcatctttaggtgcgttgttgttgttgtaaatgcccaacaaacaaatatctttgtttcctccgcagtctgtacaacaaacaaaccgaaatacccccctaaacttcagaccaatgt

SEQ ID NO: 240 - DNA, 21560 bp, unidentified
  source 1..21560: mol_type = other DNA
  misc_feature 1..21560: note = Fanzor polypeptide
tgtattccaaatttggttttcttaatcatttgctcgttgggtttgtcactgctcccgattatgatcgggaggactgtgtgtattccgaattctgttttctcaatcattcgctcgttgggtttgacaatgctcccgattatgatcgggaggaccgtgggtattctgagtttggtttttgtcaatcattcgttcgttgggtttgacattgctcccgatcgggaggactatgggtatgccaaatacaagaaaaaaaaaagaaaaaaaaatgccgagtacatgtttcctgaatcattcgctcgttgggtttgtcagtgctcccgattatgatcgggaggactgtgtgtattccgagttttgttttgtcaatcattcgctcgttgggtttgtcaatgctcccgattatgatcgggaggactgtgtgtattccaaatttggttttctcaatcattcgctcgttgggtttgacaatgctcccgattatgatcgggaggactatgggtattctgagtttggtttttctctatatctgaatctgattttgaatctgaatctgaatctcaatcatttgctttaccaacctatttgtcttccgcagggtctacaatgacagtaccgtggaagtaaaactccaatcggacgggaaggatttgggatgcagcgtcatggacgaatagaccaaggagcgccaagtgccaatgaacatcgaagtcgttgttggtggaccagacttctatgttacggctacgcacgctcactggttgaggtttcgcggcgaatgcaggcatatgtgcggagcagatgcattctggtcgacactcacccttgcggaagtcaagacagcccagttgcttgaagtcactagcattcggaggcccatgttaggagccctatcatggacaccagttcacattcaggctcttgggttggtggttgacagtgcgcagcaagcctgtcagggtcggcgagggcgaatttatcgccgacaaagagcttgaggaaactagggcgtgggttgagacatgcgaaggaaagctcatgagcgatttcgaggagtttggtcctagcgacaggaggacgtcacctcgatgtacaccaaaagggccttcacctgacgccggtaagagagcaatcgaacggactgtactgctgcaccgtggctcaggttaaattttcaaatctgacaggtacatttcgaatgttacgtacgcggtgggatgtacaccgttcaaaacaaccattgtgtgctgaccgcacttgccgctttcaatttcaataggatattgcgtaacttctgcactctttacatttcctacagcctccgcgaagaagtcaggaagaggtcagcttcctacaatcaacgaagaggacagatcgccgacaactttgtaaggtcatcgtattcaaattggtatctccttatagcccagctcctgacatgggcctccgaatgctagtgacttcaagcaactgggctgtcttgacttccgcaagggtgagtgtcaaccagaatgctccgcacatatgcctgcattcgccgtgaaacctcaaccagtgagcgtgcgtagccgtaacatagaagtctggtccaccaacaacgacttcgatgttcattggcacttggcgctccttggtccattcgtccatgacgccgcatcccaaatccttcccgtccgattggagtttaacttccactgtactgtcattgtagaccctgcggaagacaaataggttgataaagcaaatgattgagattcagattcagattcaaaatcagattcagatatagagaaaaaccaaactcagaatacccatagtcctcccgatcataatcgggagcagtgtcaaacccaacgagcaaatgattgagaaaaccaaattcggaatacacacagtcctcccgatcataatcgggagcattgacaaacccaacgagcgaatgattgataaaacaaaactcagaatacacacagtcctcccgatcataatcgggagcactgacaaacccatcgagcgaatgattcagaaaacatgtgctcggcatacccatagtcctcccgatcataatcgggagcattgtcaaacccaacgagcgaatgattgagaaaacctaattcggaatacacacagtcctcccgatcataatcgggagcactaacaaacccgacgagcgaatgattcagaaaacatgtactcggcattttttttttttttttttttttgtactcggcataccaatagtcctcccgatcataatcgggagcattgtcaaacccaacgaacgaatgatagagaaaaaccaaactcagaatacccatagtcctcccgatcataatcgggagcagtgtcaaacacaacgagcaaatgattgagaaaaccaaattcggaatacacagagtcctcccgatcataatcgggagcattgtcacacccaacgagcgaatgattgagaaaaccaaatttggaatacacacagtcctcccgatcataatcgggagcactgacaaacccaacgagcgaatgattcagaaaacatgtactcggcattttttttttttttttttttactcggcatacccatagtcctcccgatcataatcgggagcattgtcagacccaacgcacgaatgattgagaatacccaaactcagaatacccacagtcctcccgatcataatcgggagcattgtcaaacccaacgagcgaatgattgagaaaaaacaaactcagaatacccacagtcctcccgatcataatcgggagcattgtcaaacccaacgcgcgaatgattgagaaaaccaaactcggaatacacacagtcctcccgatcatagaaaaatcaatcctaaaacctgtcaaagaaaacttgatccaccgaatgcctagacggaacaggcaaaagggctaaattcttctgggctgtgacatttcatcagtcatgctatgcaagtcaagcaggcctcaactacacatctttgctttacctattgcagtactgggccactaaaacaaacctagtaaataggtaggtggccgaggtgggcaagaacacagtaaaatagaagaactgcaggtgtacatgatccatatgtcagtgtcatgttaagtaccaatcacaacataaacacccaaccacactcccggcaaagattaaccaataaacaaggcaacctgttggcaagcagtaacttggtcaacacaggcacaaggcagctaagtctgggctacaattgcagtctaccactacaatgcaattcataaccaaaccagacgctatggaaatcttggaacggtagctaaggatgcatgccatatgggtatgcagtactgtccgccattactctgacgcaggtgcaagcgggtaaccatcatgcaggtaggcaggcctcaggaaggtgcaggcgggtgcagagctgttcgccagtactccggcgcaggtgctggcccggcgcgtgtcctggtctggtctggcaggtgcaggcgggtaaccgccatgcaggtaggcagacctatccagtgctccgagcgccagtgctcctggctatctgcccagcatccaccagagaaggtgctaatcaggacagtgacagtgaaatgcattgcgcaaagggtgcgagagttagaagcaactcgggggttattcacaaccacccggtgctaatgcagatgcgcagcaaggcgatgcagaaagcgaaaggcaaagcagcagatcatgagaacagagctgaagtgaattcccatagcagtgaaatgcattgcgcaaaaggtgcgagaattaggtgcaactcgggaccatgcagggccatccggtgctaatgcggatgcgcagcaaagcaatgcaggatgcgaaaggcaatttgcgcaaggcatgaaaggaggtgaaagcgcaaggcattaaaagaggtgaaagcgcaaggcatgaagcaaagccttaccgacttatcaaaacagtctttcatgcatgcgcagcaagggggggcccggcaaggggggtcaatcaatgcacatcaaggggtcatgcaaaggggtcaagctgccagagaaggtgctgggcatggcaatcaatgcacagcaaggagtcatgcaaaggggtcaagctgccaatccattgagaaggacaccaaggcagaggctgtgcaatcggatggagactttgtgtattgtgagataaataattatgagcaatgcgttcaagactttgtaaacagctttcaccttcctcttgactgtcctctacaattgattttgtattggaatacttcgaaggaactttttctctctccaaccgagcaaatcaatgttacaattgaaattgaagggaatagtctctttctccggaatgcaacaaaacaatcttacataataaattgtaagatattttcgtaaaatacaccaaaaaagcaaaatcaatcaatttgcgaaaacgatcttacaaaataaattgtaagatattttcgtaaaatacaccaaaaaagcaaaaccaattaatttgcgaaaacgatcttacaatatttatcgtaagatttcagtaaaataaaaaatccgttcggaagcaggaacgcccattaagttgcacgctggccagaagttaagggctagcgtggacgcttctgggggggtgcttgtgcttgccaacgacggtgattcgcgtttcccactgacagtcagtggagatgcaccgtcggacctcgtgcaggcggcgtttggatcctcgatatcgaggccgcctgtagctccgttgccaagttacacgggaatgcgtttggagagcgggggtggggacttggtgattctaggtggcgaggggggtggcgtgatgcaggtgtccgacgttggcgtcgccttggatctgaaccctgcaggcgggcttgtgcgtgtgaacggtgtgccgattcagtcgacgtcggacgggcgccagaagacgaatcgctcggatcttttgggtacatcgtctgcggacattttgcggaggctgcgtccgtgcacgtacacccaccgtggcgtggtggaggcggggttcatagcacaggaggtgttctgcgaggtcccggagatgcgtcacctcatctcactccctagagactttgagatcgatgacgacaacacgcttggcaatgcaccggtcgggtcagtgggtttgaactatgtgggcattatcgcgtacctagtgagcgcgatgcaggagcaagcaaataagatagaggacctccaggcgagaatagccaagtagttcaaggcatgtagagacacatattacgagtattgggactcgtcacggcaggacttgtatcgcagtcaaggttggatactgagaaaaccttacgatcaaaagagaggatgaagataaagatgcagatgattcgcattcggaagagaattttttacctcaagaaagaatttagggaccagacaacaaatttcttggccgctcgctacgatgtgttgttggtacctcaattggatacggcgaagatgacaatcagtgctgaacgggagctgacaaccaaggtttcccgtcagatgctgactttgagccactctgtgctgttcaatcggctgaaggagaagtgtgaagagtacgggattgtgttcttgcatgtgcttcattacacaagtcagacatgccctatgtgggtcatatgtgggattaaaaaaaaaaaactggaaacttggaacaatccagagtacatgacagtcttgtgaacaggccatccgtcaatgaaatcttcaagatcggaatcgtctacgacttttaaagatcatcttggaacaatccagagtaatccaggacagtcttgtgaacaggccatccgtccatgaaatcttcaagatcggaatcgtccacgatgcttcgaaacatccaacatactccgtagctgcgtgagaatcctgaatgctgattccaagccttcacacacaggacaggaggagcgttggccatcgcacagagggaatcgatagcttcgaacgcatggtagccttcggcattgcaatcaatgtagacacaatgcgtcacactatcgtaatccatacacaatgatgcggagttacacacgttttcgatgctcttgcacaaaattaggggcgcaagttgtggagtaaatcctatgtcaaccagcgtctccagcatgtgagagtaatattgatccattgtgaatgaatgtatgtcagttagttctgtcatcataatccaatcaattttttgtacaacaaccaccgaatacaatgcagtacaatacagtacaatacagtacagtacagtacagtacagtacaccgtcctccagagtgtgcagtccgaaaaagaagggcgcatggttcgaggcttgctatggtgcagttccaccatggaagttgtggtaggacgcaaaatattaccattttttttcaaaacaacctataaagagagatgatcacgttttcagaagtatctgttcgttcacttgccacttctaatattgtgaacgccccctaccctcctctgtcgggtatcagagcacagtcaggcacttcaggacttccaaccctatctttcgctaactctcctgacaccgggttgttcaatccaagtgtggggacgctaggtgtggttgccgggggagcagagctggtgcgagtgtcaaacaatgtatctgtgttggcggatatagtggtgtcgtcaaacattatccctgtgaagaacgcgacgcagcacatcgggtcatccaacatgcactggattgacacgttgcacatatcctcgaacacgttgtacgtgggcgacacgctcgtcctcggcattgacgcccagaccttggccatgagcgccggccccggccagggcatctctatcacgaccaccggcgctggcgagacctcgctcgcgtccgaggagggtgtcaacgtgacctcggtcggcggcgtcagcatgcatgtcaccggcatcgacaaggttgtagacatccagtcgactggcgcaggcggcattgtgcagctgggcgcgaccaaagaggtggtcttgaccgcgcccacggtctccacggtctctagcaacttgaccgtcaacggaaccaacttcactgcgggaatccgcgcgaattccggttctgccggagcgccttcgctgtctttctcgaatgcgaccgacaccggtttgttcaatccaagtgtggggacgctaggtgtggttgccgggggagcagagctggtgcgagtttccaacaccgtgagtgtgatgggagatctcgtggtgtcctcgaacattattccttccgcaaacgctacgcagtacatagggtcatcgaccatgcacttcaaggaggcgtggatcgacacgctgcacatatcctcgaacacattgtacatcggggacacagccgtgctcggaacggatgaccagacagtgtccatccgcgcggaccctggtcaaggcatctcgattacgaccacaggcgtgggcgagacctctttggtctccgaaagcggcgtcaacgtggtggccggcggaggagtgaacatgcaggtcaccggactcaataaggttgtggacatccagtcgagcggtgccggcggcaccgtgcaactcggcgcgacaaaggagatggtcattaccacgcccatcaccacggtctcaaacaacctgaccgtgagcggaaacctgaccgtcaacgggtccaatttcacgtgaacacccagaccgtaactgtagaggataacatcatcgtgctcaactccggcgagatcggacccggtgtcacaaagggcgaggcaggtatcaccatagacaggggagacgcgctggactaccagatcctctttagggagtccgacgacaagttcgtcatgggccctcaaggttcccttgtcccaatcgccaccgagaccttcgcggcaaacgctggtaatatatctacaggcgttcttggagtgaccatgggcggcaccggcgtctccgcgagcaccggaaccgggagcaacgtgttgagagataatgctacgatgagcaacttgacgaccataggaggaatgatcagcggtaacggtagcggacttaccgccttgaacacaaacaacatatccagtggaacattaccggttgttagaggaggaacgggggtctccgtcagtaccggaagtggtagaaatgtgctcagtgacaactccacgatgagcaacttgacgaccataggaggaatgatcagcgataacggtagcggacttaccgccttgaacacaaacaacatatccagtggaacattaccggttgttagaggaggaacatgggtctccgtcagtaccggaagtggtagaaatgtgctcagtgacgacgccacgatgagcaacctgaacatcgtaggagggatataccagaacggagtaccatttaaggtgggcggtggctttgatgacggaacggttgggtttccgtccattacattcacgtctgattcaaacaccggtttgtttagacttggtgcggataaaattgggttcagcaccgggggggtgtcgcgtgtaactattttggataacggaaacgttggtttttctacaaacgcacccgtatcaagagtgcatgttgtaggcgatggatatttcaatggcaacgtgatcgctaccagcaacatcatcggtttcagcacaatggagtccgattctaacgtcaagcaccacttcgagcccatcacggacgcgctggacaagatcgacgcgatcggcgcgtacaccttcgagtaccgtggcgacgatagccgcaagaggcacgccggagtcatcgcgcagcaggtgcaacgagtccttccggaagtcgtaagcgtgcacccgcttaaggacactctcacggtcgcttacggcaacttgtcatcgttgctgctggcgggtgtccaggaactgcgcgacgaattgaacaacctaaaagaggaactcaaggaaatccgtgaatcgctcgccccgcacacacaatgaaaggattatagcaatatttaattgtatatcgcttgtaaaaagaacccttatggacgtgggacatactctgtcaatttcttataatgcattggaaaccatacagttgttctcaaataattttgggacactcagtataatttgaatgatatcccctgaaaccaggtacaggtccgtggttcactacaaatattttttgaggagtctcaggaaggtttgtaatatatacaacgtttccaagagctcactacatagatgggtcaatgctgatcaggtgggtaaaagtaagcgtttaaaacgaaaaaggaaagaattgtccatgcttttacgttccacgatatccaataatattgcagagaaccccttcataacatgcaaggatttggtcggtataatttgcaagagttgtaatgtgagattatcgatcagtacggcatcgagacacataaaacaatgtggattttctaggaagaaggcgtttcccacagttctctacggacattcaaaagaaaatgtagaaatgttttgtgacaagtacagagaaagctctaacgttgtttgtatcgacgaagcaggattttacgctggcgaacacagcaaatatggatacagcaagatcggttctagattaactacgaagacaatgagtaacctccgtcgtgtgaagttcactttattactcgctatttcatctcaggcaataatagattatcagttattggagcacaattgtaaaaaagaagatttcattaaattctttaaaactttggtcatcccaaagaacaccacgatcgtcatggataatattcggtttcaccattcttcagaaataaaggatatatccgaatgcaaagggtggaagcttttgtacacccctccttattgccccagagctaatgcgattgaacaaatatttggaagcatgaagagagactacagggcatcatgtccattgacgtcaacctgtaatttcgattacttaatgcaaatatgttgtgttctagaaatgtggaggtataaagacttttcaaaatatatgattaatatgagagattgggttaggaatgttcgagagagcctgtctgcagatccagattacatcaaaacgttttcggggtacaatttgtgatggagaatgggatcggcgagtcatcatcgttggtacatgaggctgaccaacatgatgacattgcagaacttgtcgattatgaaggggaggaagacgaggagtgtgcacctgggcgagcgatttgtgtggtcaagatgaaattgagtacctttattccccatgattggcttcgtaaaaagatagacacactggtactggacatgaacaagttgcttggagagggttatattttcgcaaatttccacattgctcgtctttttgagaatggtatcgctgtccctcctgtaaatcgcaacttcttctaccggtgccttattgcagtcagtaccaacaaatgtaaggggtccactcttggcgaagacttcgagagtagtcggcttctgttcgacttgttaagagagccggggcaatccaaagttgacattcgggggaacgtgaagaaccagatcattgcagacctgtctattctcatggccacaatggcctctaaccatctttggaccaaccttgagcgacgcataacgacttacttgaagtggaagtacccacagattgcaaagcgcctgcggtcggacatcgtggctgcagtgatcaagtgccctacaaagaatctcgacgtcatcttcaagatgagccctcatacaaccaagctgccaaccaagctgccaacagctagacttcgatcggcaaaaagtgcagttgctcttgcgaagaagagggtcggtaggaaagaaccagaaggatcccctttgcgtgttaggttgactaaacttcaagagaggcttgaaaagttgagcgaagcttggctctcctcgaagaaccttagggtggacgcagataacgcgaaacgcttctttgcacgcgacgtggcattctgtctcaggggggttctacctttaccatccggaaacacttttgcgtctcgggctcacatgaccctgcctctgtaccacaagatattgttggagaccatcgaagaaaaacgaaaaacgaaaaacgaaaaacatcgcacattctcgttgttgccttacaaatctggattcactctgtcgcacattccgatttcgaaaatggcctttttctatatggtcaacgagtgccacttcgattcatgcaaggcagacgttgcttccaaaaaccatcaaggaatatgggagcgcttcgcaaacctcaagaaagtggagacagtttctcggaagttcggttaccgcattgtgacaaacggctttgcagtcagcatcttgatgaataagcctacgtgtctgacatgttcgatgcctgcagacgcgttctctacgcgggcgcatgagtatgtgacaacagacgagggtggcattgtatccttccttgacaatgtggtcgtggctgcggtagacccgggtgttactgatatcgtgactgtaacaggactcaacggaggtaccagatcgtacagctcggcgcaatattatcgcaagggtctgatcttcaagtctcagcgtcaaactgacgtttgaaacctcgagacggctgatatcgtcggtggtatcattccggatagagactcttcgagttctgaacagattggtgcgtacgccagattctacatgggtgccgccccaatccttcttgcccatcgtgcttccagggggtaccgaaacctccgctttcgcaggtactgcaagaaacagaaactcattgttgagattgctgactttgtagctccgagagagaagagcgctaaggtactcgtcgggtttggtgattggaaaggtctgggggcgacgccaatctctaggcggacttgtggccctctccaagctattcgtttcgagcttcgtagccgagaaaacgacatcatggaggacatcgatgagttcagaacatctcaacgatgcagctgctgtgagaaccacctttgcaacatggtggcactcactcatcgtaagaagcaagacggtacaagttgggaatgtacagaaggacgcaagcggattcataagattctccactgcaaaagcagtcaaagcggagcgccacgccaacagagcggtggtatgcttcactgcgggaagacttgggaccgcgatgtgaacgcttccaggaacatcctgatgcttacacttcaccaagtctttgggagagagcgtcctctcgcgtttcgccgagacgcgccgagaagttcctcgacaaccccacccccaccccctgatactgacatggggacacagacggttgaacggtttaccaaagaggctactcggaatatctttgagaacctcttcaacctgctgcaccccccaacgttgcccaaaagcaacgatctgcagtctggatgattataaggtgtcccactttatttgagaacaactgtaacaaacattggtgtaaataatacaaacacattatttgtatgcgaagtggtcttaccatcaacatatgctgaagattgtgtactcttcgagaacggaggcacgtcctactgagcttacgtcggtgtgcgggacgtggcgtccggaattcccaaacttcgggttagaggtggatttgtaggaggcacagtaccacatgcaaatatcgtgtacgtcgatgtatacccgatccctgcggacgatttgacgcacgagatagcattcgaattcagaacagatcccacggaaggagtacgtgtctggatagacgggactttgtacggcgaagccacagggtcttttcacagtggtatatggtcgggtagtgggcctggttcattcggaatggttaaagatggtggtcccatgggagagtcgtcgaacccttggccagttaccatcacaaagccgctaaggaggtacgataaccagctcggatggctctctgccatggaggccaatctcggaactcccgactacgtatacagcgggccgtcaacgttcgagtcattgactcttgccacggacaccatgttctcgatggatgttgtcattcccacaaactttgctagcagctgcattttgttcgactacggaggatctgaatacggtctctatataggcgtagtccgatctcaggtggatggaagcacagtaatgcgtgtggttgcaagcaacatttctacagtggacatttcggattttccgagggacggtcgttggcacaatatagcatttagttaacagaagaaggataacgatattgacacgtcacgtgtgtggatagatggggtacttaaggttactagtacagtggaacttggggcctttatatcagggtcagatggaggaggattcggtttgtttaacaacaccgtgaagaatatgcaggacacgacaccatggccttctagtttgcgaacaattcgcatttacctaaacgagaccggctgtctacccttgtttggagctctgagttttgcagacatcgctcacgagtacgggctttcgaccacgcaaccagtcgcgctagacagcttctaccaaaatcgacctgcaatcaccactggaatatgggacacacgaagatccgctcttgcacgtagggcgtttgtaggtcgattggggacaccgaacgttccatcggatggttcattgtccctccttgcattcaggggcggaaggagaaagcctcctgcattggcgcgcgagatagtgaccgtgcctccgcagatgaatgggttcgcggaggacgttgcgacagagctttttgctgcatcatttgcgaataccacacaagcgcagatggaatctgacggatggatattcaatactgataatgtgttgacatttgaaagtacgtttgctcggtctaataggtctggaacaatttcctcgcctccagtgatagatacgctatcgggtgttggatcagtatcgttgacattattcggttcgtctttggaaggagacgagagagtaacgtttcgggtacaagatgtgtcaaacggaaatgtcattgaactcgatagaacaacaatcgagacaacgagtacgacttacaaatacgatctgcgagatctagattccagtgtggtcgatatttacaaccccaagggagttaaactcattgctatcttagccatgggtataaccgacggctatcatcttgaaagttttagtgcgtcgaagattgagaactacgtttgtgccgccagcacaaacagagcagggtggttattagcttggaatgtgttcgaccttaacaatggtaatgtttggcaatcacaggatggcgcatacaacatcagtatccaaccccaggacggttctgctcggttgttacgtaacatgaacggattcaatgacgggattctgggcgaattcatctccttgcgcatcccttggcccatctacttaacctcatacgagatgactggcaactgcagggactgggttgtgtacgggagcgtggatggtaagtcgttcgatgtgctcgacacgcagataggtatcgcgtctgtgtctgtaagtacacagcgtctcatcacacccactgtaagtccaagcgaaaatgcttataacatatttgtagtgaagttcacgaggacggcgagaggtggttggaacagaggagaaatgaatgtcatgaatttcagcggcttccgtgcatgaattgtggaaatgaatgatgcatgcgcaaatcgctgacttggtgtctgcactcgaatacatgtaagtccgatatttctgagaaacaacgtttcggagaaaaaaacatttcggagagcatgacaaataatgaatgggacgcttcgctgaaattgtggagtggtggaggcagggtagcacaggaggtgttcagcgaggtcccggagatgcggcacctcatctcactccctagagactttgagatcgatgacgacaacacgcttggcaatgcgccggtcgggtcagtgggtttgaactatgtgggcattatcgcgtacctagtgagcgcgatgcaggaacaagcaaataagatcgaggacctccaggcgaggatctcacacggcgttgttgtccccggacgtgagtctcgcgagattggaaagcgaggggctcaagcagctgaatgtgggatgaatgctcttgggcgttcattcggggcggaaaaaattgtaatgtaccgttgaaaattatttgagaacaactgtatgtttacttattttcggaaagcaaacgagtcaactgttgcttccttttgtgctttgtgaatgtcgcgtggccacaaagtacatccgatcgtcgtcaaattgaaactgtaccgtcccacgatatttgaatcatgtacctcaccctcctcgtattcggatccggggagaatgactctgcacaatttggggaactcgagatccccgttgggacatgatacacgaggtccgaaccgtaattgtgacacaccctctccccatccatcagtcagctgccccttaacgtaattcaacaacttgacatcgtccacatccatcctcgagggcctccattcgtccggcactttgtttttcccaaaagaaaacagacctcctcctcctcctcgttggtgtttcttccgagtcttcgaaaagctcaagacgatctcgacgaacatgaacccgttcgcaacaggttttaaacgggcgtgcttgaaatcgaccggccacatacccatcgagttcagcagagggacctcttcgatcagatgctcgaaaccgaacgatttccatcgtttttttatggacgcgatcgcttctctcgggacgggggtgggtgtggacaatcccaggttgacgtcgggacggtgacattgcacgtcgtccaacacggcggggaaagtcagcgtaatcattggcgcacacgatcagaatctaaaatacgaagatgttaaaaaatcactgacttgttgtcgcgtttctcttctgcacttgaaggttgcaacaaaatgtccggtccgacttttctgagaaaaatcatttcggagaaaaaaacatttcggagagcatgacaaataatgaatgggacgcttcgctgaaattttcgccgtgttcatcatcgtgatcatcattgtagggtacctccgcggattctacagcgaggtcgtgttcgtgagctcggacgtcgacggtcgcgaatacctgatgcgtcggctgcccgaccgccagaacgcggtgaacctcatggcgcgcatcaactcgaatcttaacaagctcgttcagcatctcgtggccaagtacccgaaaaacccggtcgtgcgccagctgtacaataactacaacccagacgctctctcggagggcggggcggaacttgggtacacatcgtactctgtaaacaagggtgagaagatcgtattgtgtctgcgtcagcgtgaccacgagctagtggaggagaacatcctcatgtatgtcgcgatccacaagctgggtcacctcgcgacggacgaggtgggacacacgcccaagttctggtcgaacttcaagtggatcctgggcgaggcgatgtctatcaggctctacaccaaggtcgactttgacaacgagccacaaaagtattgcgggatcaacatcacctcatccatcgtttgatggtttacagcgttcttgtctacaaaaaatatacaccgaaaaataatgagtcatccggggtacgcgcatgcattgtacacggtcctgtgtgtcgccttcctgatcgcgtggatttccacttacatagtgaggtcgaccaccaccagcacagaagagttgaccttggagaacgtagggatcacgtacgccggtttaaggaatgaccttgggttctcgatggtagagcctctcataatgttagctatcggggcgaccgttctggcagtactgcacgcgtttgtcctcccaacgatcgtaggaaacgataacgaggccatgtttttatgcggtctgaatctcatgtacccgcatttaaagttgtgcctctcgcacttcatccgcaagatctatgatgcttttataatcttggggatggggtgcatgcccataataatgtacacagtcccaatggataagtttgtcatctgcatgctctggagcagcctctacatcgtcattgcatctttcgcgagtagctgatggaccggtcgttgaagagccagttcgcaaaggcgccctggtcgttggggtcggcgacagtgtaaaactgacggaagccggaattacgtttgaacacatcgtgtggctcctgccatttatcgccgtggaagagtttgacaactcgctttcggaccgacggacgcgtgatgtcgcaagggggacgcgtccctcccaccagcactgcgcccatgtcaccgattgcaggattcatgaacgggttctctttcgtgggcgcgcgacagagcctcgccgtctcggggtcacgttcgagaccctcgttgcgcatcatctcgatcgtgttcgttcgctggccaacgtcaaaacggtggaccgcggcggtcagcgcacctgtcaaaacaggaattagcagcgccttgggggagacacagaaaatgcacacggcgatgccgtagtatatggagaatctgaacagtgcgttcagctgctctgtgaggagcatccctggaaggggtacgaaactgtagagtgctttcgtcgtgcccatgaaacttcgtaggtcatcgtgccatatggttgtggttgccgccgcattgccgttcatgttgatatagcaactgaactgctttacatgtacttgacaaaattacttggggaccccatacttgacgggacagctcgggaactgcttggcgatggccacggcgacactggctgtgctattgggtgtatggagatcctcgtcaagtacgacatttagtgtatcggtttcggtttggcttacctcgacggtcgagacgccaggaatggcccttaccatgtccatcttctcctccgtcagcacatttgcgtcgcacaatgtaattgagatagtgatagaggtcattttcacactttttttggcacgcgacaaacagatctccatgcgcactttttgacaaaatattgtggtttgaaggaaagaacacatccgcatggaggctgcgcttctccttatcgtcgcaggcgcagggtacatgctttcaaagcgacgcaaaaaacctggaagggtgccgctagctgttttcccgatgacatcatacacgataaagaagagacccggcacattccacaaatcatcatcattatcaatgcctatctcggttgtcgcgtctgacgcggaggcgcgcgaccgaccatccgttcatgacccgtaccactgcacacgcgtgcaagatgtctacgcacacgaaaaggagctcctcatgcagaacacattcaggtcctcaatgactggcgaccgcatgccagcgacgcacggcaacatggtccctttcttcagagggagcgagcctccaggatcggccacaaaccgaggacacgagatggagaacttcgtgggcgagaaaggctcccaagacttcacatcactaagcggtggaaagcgagaaattcagcaactcttcaggcctacagaggcgagagtggacgtcctgcgtccgcctgtaggcgtcgggggatccgagtaccgcgacgtcgtgcaattgccacgcaatcgcgctaacgaactccctttcgaacaggttcgtgttcaaccgatcccggaggaaaagatgtgcaaaatggggggtctgcgcgcgctaacagtggacgacatgcgtcctctcaagcgtcccaaacagagcttgcctggacagattatccccgggtcgtccacatctactgctacggaccgacctaagcaccaacccatcaacactcagacgcgcccccctcctctcatccgcgagcagaagaccaccgacgactttatgcgcaccggtggcgcggccgggtctcagcccgggtacgacaagattcgcattgtcgaccggcacaccgagcgtgaaacgatgcgttccgcctacctgtgcaagggtgcagctgcccctgtgggcgtgcaccggatggaggaccgaggagggtcccaacgggacctcatctttcgaacccccctgggtgagatgtcgcgagggcctgccacgacgacggtcaagagcgtcactgactacggtcgaagcggtatgtcgtcccctggcaacgcgcgaatggagaccgggtctcgcacgcgccctggaactctcactacggccgtcaaggcgttggtcgcgcctttgcaggatgtgctgcgcacgacgcgtaaggaggagtacctcgattcggcgcctgtggtgaaccttgtaggatctcacggcgttcccaagctcacggtgtacgactcgcaggatgtcacgcgaacgacgctcaaggatgttctcctcgattcggcgcctgtggtgaaccttgtaggatctcacggcgttcccaagctcacggtgtacgactcgcaggatgtcgcgcgaacgacgctcaaggatgttctcctcgattcggcgcctgtggtgaaccttgtaggatctcaaggcgttcccaagctcacggtgtacgactcgcaggatgtcgcgcgaacgacgctcaaggatgttctcctcgattcggcgcctgtggtgaaccttgtaggatctcaaggcgttcccaagctcacggtgtacgactcgcaggatgtcgcgcgaatgacgctcaaggatgttctcctcgattcggcgcctgtggtgaaccttgtaggatctcaaggcgttcccaagctcacggtgtacaactcgcaggatgtcacacgaacgacgcgcaaggaggtgggtatccacgacggacatcagactggcaactttgcgggcggctctgtttcacgccgcggtcctgtggtggatcctgattctggagcgcgccaccgcgccaccgcgctgtcaaccctgacggtcaccaacgtaatttgtatgcgaagaacgttggtggcgttgtttactcggctgatgacgcggcgcccgatgcgactcgtaaggacgttgcggtgggtcaggatcgtggtggtggcttgccaatgatgacatctggacgcggagcttacagtgtttcagtgttggaccctcctcgatcgactatgcgtgagacggccgctgattcgggaacacggttcggtgtgtctcggcttgcagagagttctggtgcgtacgttgtggccaagcccgacagtttagaggcgacgatgcgcagcacgacgactgacgggtctgagtactatggtacttctgagtctgctgtgaccggaccggtttcgcgtgccgacgtcggttcggtggagcccgcgctgtctcgtgaggcgcttgtgatgactgggcgcgaatcctggttgacaggagggggtgtgacgctccagctggggcgcgattcggtgccggcgtagctgagatgggtgttgttggagacgaacgtggcggggtccctgctttgcgtgacggtgttggcagagtaggtacttgaattctagtgtcgctgggggaggtgacatgttgttgccttacaacactgtcgagcctgatcctgagccgcggtacacggtggatcgtttgatgggtgacatagagggcagacgtgcacaacaagaccaccaacaatacaaaatatcgaagtttgtattgtgtttgctgttgttgtagcagttaatgggcgttccagcctccccggtcgttttctactggttgcgaaacatggtctagagcggaattgtgattcctcggtgccaatattacgataaacgcaagaaagagccctgaaccctggcgcaataacttgttataaaaaaattgaatgcttgtggcaaactcattaaagtgcacacaacagctctatctctcacaaatggcacgtattaagcaaatcgctcgtaagtccacgtataacaaggctcccagaaagcagctacccataaaggcgtcgaattatgattcaaacgtacctgccacaggtggcgtgaagaaacctaaccggaaccaccccggcaccgtcgccctgcgcgagatccgcaagtaccagaagtctacggactttctgattagaaagttgcctttccagaggcttgtgcgagagatcgcacaggacttcaagaccgaccttaggttccagtcttcggcggtccttgccctccaggaggcctcagaggcctaccttgttggcctcttcgaggactgcaacttggcggctatccacgctaagagagtgacaataatgcccaaagatattaagctagcaagacgaatccgaggagaacgtgcctaggttaattagttgttgtgtacattttttttgacttcgtagctccgatggagaagagggggcgacatcaatctctacagtcggcggaacagtaaaatgaaagatatatcagatggaaataaatgtacgacatcgccgttagaaaattggcgttaagaatgggcgctgacttatttacgaacatcagtcgtgttctactctgtggaggtggaaacgctttggtgtacatcgaaaacgacgtgaatttgtaagcaaactttttaccaaataggcgactcggatttttttcaacctccccccaaacggaacgatctgcagtctggatgattataaggtg

SEQ ID NO: 241 - DNA, 21296 bp, unidentified
  misc_feature 1..21296: note = Fanzor polypeptide
  source 1..21296: mol_type = other DNA
cagaatgtagtaaaacctcctcacctacacctccaccatccatctcttctacctcctcacctacacctctactatccatctcttctacctcctcacaagcggtagatggatggtagatgaatggtagaggatggatggtagatgatggatggatggatggtagaggatggtagaggtgtaggtgaggaggtagagggtatgggtacagtatgggtactgggtactgggtatgggtactggaaccacccacatataccatgtacaataaatacaaaagtgcataaatcagtgcagtgcagtgcagtgcagtgcatcagcagcagcagcatttgactatcctgtaagctatatccgaccagctcaactcgatatagcatcctgtaagctatatccgaccagctcaactcgacatagcatcctgtaagctatcgaacactcgcgacagtgcaggaaggcagtgcagcagcagcatctaacaactatcctgtaagctagatccgaccatctcaactcgatatagcatcctgtaagctatcgaacactcgcgacagtacaggaaggcagtgcagaagcagcatctaacaactatcctgtaagctagatccgaccagctcaactcgatatagcatcctgtaagctatcgaaaactcgcgacagtgcaggaaggcagtgcagcagcagcatctaacaactatcctgtaagctagatccgaccagctcaactcgatatagcatcctgtaagctatcgaaaactcgcgacagtgcaggaaggcagtgcagcagcagcatctaacaactatcctgtaagctagatccgaccagctcaactcgatatagcatcctgtaagctatcgaaaactcgcgacagtgcaggaaggcagtgcagcagcagcatctaacaactatcctgtaagctagatccgaccagctcaactcgatatagcatcctgtaagctatcgaaaactcgcgacagtgcaggaaggcagtgcagcagcagcatctaacaactatcctgtaagctagatccgaccagctcaactcgacatagcatcctgtaagctatcgaacactcgcgacagtgcaggaaggcagtgcagcagcagcatctaacaactatcctgtaagctagatccgaccagctcaactcgatatagcatcctgtaagctatcgaaaactcgcgacagtgcaggaaggcagtgcagcagcagcatctaacaactatcctgtaagctagatccgaccagctcaactcgacatagcatcctgtaagctatcgaacactcgcgacagtgcaggaaggcagtgcagcagcagcatctaacaactatcctgtaagctagatccgaccaacttcacctggttggttgaacaaacgcgattgatagagctagcaaaagcacttcctgagcaattagcgaacaggcgatgcaactcgtcgcgaaatcctggaagcttccgaatttccaagaattgagtggtaaccagcgaaagatgtggtgcttcctcgctgcaccgagcatataaaccgactaaacccttatcatgtttcagctgaagatcgctacgttccacacattttgcggtatgtctatcctgtgacaggtcacctttcaccgatgcgagcgtttgcggtcagccagctgtaaccaggtcagatccgacacgtgtttctgcgagtcctcagctgaattcccctgccccacaccgtggggtcccgacattattgtcaaggtctgcttgagacgacacgacacgtgtcccccacgatgcgcccatgaaaatacgagtgtaaaccgacatgtcatcagatctgccacgtgtttttcacgcgcctcgaatcttcacacgagtccgcagctgaattccagtgccccactcctcaagaccacgtgtcgtctcaagcaggcttctgcttgacaacactatgggaattatgaagggaggccgcatgcccacggagtggggcagtggaatcttctgcttcccaacagttatagaatttacaggttatattttgggtattcttttatacaatgataatccctattttaaacgtgttcacatgaacacctctgaaaagactctccatcttgggaacaacaattatttcaacaaaaaataagaatcatcaaccaatccctattttaaacgtgttcacatgaacacctctgaaaagactctccatcttgggaacaacaattatttcaacaaaaaataagaatcatcaaccaatcccaaattctgaagcgactgatgttcgtaaacacataagtttttaacacaattcagaaaccattcttaacgccaattttctaacggcgatgtcgtacatttattattacattttttatttatttccatctgatatatgtttcatgtttcattttactgttcagctgactgtagcggttgcaccaattgcgcttttcatatacctccaccgtcgtgacgatgcctatcgtgacgaggcctatcgtgctaaggcccgtgctgacaatgaagctactgcccgtcgtgaggctgaggcccgtgctgacaatgaagctactgcccgtcgtgaggctgaggcccgtgctgacaatgaagctactgcccgtcgtgaggctgaggcccgtgctgacaatgaagctactgcccgtcgtgaggctgaggcccgtgctgatgagtccgaggaccatctcaggcaaaagttgttgtcgttatcgcctgatgacgtcgctgctatgactcctgaacacgtttcggagtatatgacggcgtgtgcctcggttggggtatcagcatttcatttggatcagccggtattaatgggcgttcctgtctcccggccgattttttaaaatttctaatcaggatttagagcctccggaaagactcgctagctttagacatcagcaccgatgaatcacaattccgctccataccatgtttcgcaaccagtcaaaatcggccgggaggcaggaacgctcatttattgtgataaatacatacatgtcacacaatcacccacccccgcagcacatctcctcgcatggtttgtcaaggcagcactgaatcctcggaggagtcctgtgggttactgaatgtgagagggggtgtgggattgcttgaaaatttcacgtttttcagcaaggaactgatgggggacgtggaggttgcaacacgatttgaggagcggcacctccaagatgaagagtccagatagatacatccgcttcttggcactgtttattgcattatgtgctcttgtgtcgggattgtttcagaacgcaacatctcttactggatgggcaacattgggtatttcattgattggttttgcacaagcacttcttgagaagcttccgatatcagaggaagacacaactctacaacaacctttctcgcatacatgaatgatttggacttcataaccaataattttgagaactttccatttccagcaaaaccatgtcacagttaagtcattggtgatggcatctactaggctcaggcttcggacgggtttcgtgtttttttccatcaacacacgtaattctcgttcatattcttcttggaacattttgacctttcaatatcaaggaagatattcctttatattccaactcggaatcatgtctccaccatgaccagcaggaatgatgatgtcaccattaggaatgttatttcagtgatcatcaagaagtgccgccgtgtgagaatggacaaggatgatgctgactgtgtaataatgtaattcgtcactgtttcggcatgacaactctcagattggtttcagaatggggatcgcgggcagattggattgtattggattaatttgatgactcgcttgaatttattcaatatactgtaacattattgaccggtctgactgaaacgcttgggaggggggaagcgaagacacacttttgttgatgcacaattctacagtcggcggaacagtaaaatgaaacatcatcgtccatctgcctccacatgaaaacggcggaaagctgtcgcctcctcctcattgtccatctgactccacatgcaaacggcggaaagctgtcgcctcctcctcgttgtccatctgactccacatgaaaacggcggaaagctgtcgcctcctcctcgttgtccatctgactccaaacacaaacggcggaaacctgtcgcctccttctcgttgtccatctgactccaaacacaaacggcggaaacctgtcgcctccttctcattgtccatctgactccacattcttctgcttgacttgacaaccctgatggatttctgaatggggagcgcgggcaccgcggagcggggcagtggaatcgagctgctgactttatttgagaacaactgtaagcagaagagcgaatgccgcgcggctatttcgctcggcttattctgttccggagtagcaaatgactcaattgatggacagcaacaacttggtcgaaagttcagaccttacaaatgatcaaagtgcaccgcaaatcataaaacttacattattcatgacacctgatcaatggggtcgattatcgaaatggagcgcaccacttgtgatccaataaattgatcaacaaaaaataagaatcatcaaccaatccctattttaaacgtgttcacatgaacacctctgaaaagactctccatctctggaacaacaattatttcaaaaaaaaataagaatcatcaaccaatccctattttaaacgtgttcacatgaacacctctgaaaagactctccatctctggaacaacaattatttcaacaaaaaataagaatcatcaaccaatccctattttaaacgtgttcacatgaacacctctgaaaagactctccatctctggaacaacaattatttcaacaaaaaataagaatcatcaaccaatccctattttaaacgtgttcacatgaacacctctgaaaagactctccatcttggaacaacaattatttgaacaaaaaataagaatcatcaaccaatccctattttaaacgtgttcacatgaacacctctgaaaagactctccatcttgggaacaacaattatttcaacaaaaaataagaatcatcaaccaatccctattttaaacgtttcacatgaacacctctgaaaagactctccatcttgggaacaacaattatttcaacaaaaaataagaatcatcaaccaatccctattttaaacgtgttcacatgaacacctctgaaaagactctccatcttgggaacaacaattatttcaacaaaaaaataagaatcatcaaccaatccctattttaacggtgtcacatgaacacctctgaaaagactctccatcttgggaacacaattatttcaacaaaaaaataagaatcatcaaccaatccctattttaaacgtgttcacatgaacacctctgaaaagacctctccatcttgggaacaacaattatttcaacaaaaaataagaatcatcaaccaatccctattttaaacgtgttcacatgaacacctctgaaaagactctccatcttgggaacaacaattatttcaacaaaaaaataagaatcatcaaccaatccctattttaaacgtgttcacatgaacacctctgaaaagactctccatctctggaacaacaattatttcaaacaaaaaaataagaatcatcaaccaatccctagttaaacgtgttcacaatgaacacctctgaaaagactctccatcttgggaacaacaattatttcaacaaaaaaataagaatcatcaaccaatccctattttaaacgtgttcacatgaacacctctgaaaagactctccatctctggaacaacaattatttcaacaaaaaaataagaatctcattgacacaagccatcattataaatttggatattttaacgtttgccggacggacggtgtgcatgcgacagttttccacagttttgcctgtctccctcgagccatgaaaacaacctctacgccccctcactcatctgccttgccaggcagaacactgctgcctgaaattccctcttctgctcgggtgtcatgttgcgccagacgttggtcaatccatgagggttgatcaacaaaatgctcagggcgttgctggcaaacaccccagacagcccaccgaagtagaacccggatgctggcagcaacaggctggcaataagcttcaacaccgtgggtgcagtatcatccgatatctgcatttcctcttttacactctctattacaacacgggaaaacaccacccacgcatcctccattgatgctgtctgtaacgggggcgtgtgttggcggtcatacgcttcacgcttgtcaggatcactcagcgctccgtaagccgcgcacaacattttgaaacgctcctgagcagcatcccgttggctgtcaggagatgttgcccatttgtccggatgccatttcagagctgcttgtcggtatgctcgccgaatctcctctgtcgttgcagtgtctgctgccacccccaacaattcatagtggctgctgaccatgatggcctgcgttgggcatttattgatgtataataatgcccctccttcaaaccatttttcgaaggattctggagcacgcatgattggtgtgatgtacatgattcactgcatacatctctcccaaaattatttgagaacaattgtatagattggcgcgtctgtctccgctgcatacatctctgtccactcttagaagtgcttaatagctgataatgtataaacaagatgacctcgctgaggtattccagagcattggtgtgtacagcgctgtcattgttgttgtgtctttggctttagcttattggttgcgcaccggtttccgtggcagcaaccaatgtcctactacgaaagcaagcaaagataatcaacatacagtcttcgtgtacggcacaagataataaataatattgcggtgtaacctacagtcggcggaacagtaaaatgaaacatcccaataaacggtataatgcgtcgacagacattatagtgtacgagtggatggtcctacaaaatggcccgtccagcaaagaaacctcctttcatgacgcattgcacatcaacaaaagaccccgtgttcttttgggccacggtaccggggaagagtcgatcgcttaagtgaggctggtctctgaaaggctgaggaaggaaaaagtcccgtatactggtagccagccaatgtgaaacaggccatatgcgttgcatgacatacaaggcatgcggtggcaaccccatgtcttctgtccgctggatacctacctcctgcgcaaaactgtagtagtctgtgtagctgccatgggcacgcggaagttgaaagaactgagacgagccaccacaaacactgttcaaagtcaagaggtcatcatgttccttcatcaacattgccactgcatctttgcaagggtcctgaatttgcttcaacaccacccctccgcgaccttcactgacaaacacggttgcgaagctgcccattcctatgcccttaaaactactgattgttgccagatccatcgcccttgatataatgagcagaggaagaagaacttcatacaaacgctccaatgcttgtgtgtgaaatgattccgccgtttgcatgtggagtcagatggacaatgagaaagaaggcgacagacgccgatgcactgaagctggattggaataaagatcagaggatacctgtaacaaacacttgggtaatcatttttggagacctgctgtaacgtctacctatctatcctatcggacagtataaccagagtgcatctcttgcacataatgcaccggtcaccagatgccaactttgaggaatgacgtgttgcagcacatgacaggcacatgcatgtgttgtcatccatctttcttgcttgatcatgatcccaagtcgtgcgactggtgtgacatcgaggcgagcaaatgggagctgattgcgaatgtagcagcacttcatggtaaattagagtgtctcgtcaatgcatggcatcatggacaatgtttcatcaattcataccgtgtcgcccttcatgcagctgcacgtgggcaaatggcttgtctttcattcttgtttgatcagtgcggagcagcccatgctatgcatattcatgaacatgtggagaatgatgtgcttatggggctgagcaatgttgcagcattggggggaaatgttgaatgtctcatcctggtacatagagaaggatcccctatgcatccttctctgtcaacctgggctttacacatttgtgccaattgcgattgcacatgcaagggtggacatgctgcatgctcacgttatgcatccacatcatgcacatcatgcacatcatgcacatggtagaaatcgaaccctgtctgatgagaatgataccatgtttacatcatgcacatcatgcacatggtagaaatcgaaccctgtctgatgagaatgataccatgtttacatcatgcacatcatccacatcatgcacatggtagaaatcgaaccctgtctgatgagaatgataccatgtttatttttcacaagtataaaaactcaagactatgtctagtatattgctttgcgcaccctatctcttctgtgtaaaacagaaacaatggataacttcaagaagttggatacaagcatgtatgcgtgtttcacagtttcaggcagtacgtggaatggcaaaaaaaatattttacatggaacggtggtattcgataatgaggacgacgccaataaatgtttagaaatactcgacctgtacaaagagacattctacttcaggcgtacatcgaacgtgatgaataagactatgttcacgtttgacggcacgacaatccacctattatctggtgccaaaattgagtacgaccagaatgcttctcgattgaagaagattgtagagatagaaaagacgtacacggcaaacgcgtgggaatacatggatccaatattgattatggacgattacgtaaggctattcgggtatcttccgctcaggaaaagggcattctggagctgcttgctgttatgtttttcgtgcagttgtatacagttgttcttaaataattttgggacactcagtataatttgaatgatatcccctgaaaccaggtacaggtccgtggttcactacaaatattttttgaggagtctcaggaaggtttgtaatatatacaacgtgtccaagagctcactacatagatgggtcaatgctgatcaggtgggtaaaagtaagcgtttaaaacgaaaaaggaaagaattgtccatgcttttacgttccacgatatccaataatattgcagagaaccccttcataacatgcaaggatttggtctgtataatttgcaagagttgtaatgtgagattatcgatcagtactgcatcgagacacataaaacaatgtggattttctaggaagaaggcgtttcccacagttctctacggacattcaaaagaaaatgtagaaatgttttgtgacaagtacagagaaagctctaacgttgtttgtatcgacgaagcaggattttacgctggagaacacagcaaatatggatacagcaagatcggttctcgattaactacgaagacaatgagtaacctccgtcgtgtgaagttcactttattactcgctatttcatctcagggaataatagattatcagttattggagcacaattgtaaaaaagaagatttcattaaattctttaaaactttggtcatcccaaagaaaaccacgatcgtcatggataatattcggtttcaccattcttcagaaatcaaggatatatccgaatgcaaagggtggaagcttttgtacacccctccttattgccccagagctaatgcgattgaacaaatatttggaagcatgaagagagactacagggcatcatgtccattgacgacaacctgtaatttcgattacttaatgcaaatatgttgtgttctagaaatgtggaggtataaagacttgtcaaaatatatgattaatacgagagattgggttaggaatgttcgagatagcctgtctgcagatccagattacatcaaaacgttttcggggtacaatttgtgatggagaatgggatcggcgagtcatcatcgttggtacatgaggctgaccaacatgatgacgttgcagaacttgtcgattatgaaggggaggaagactgtgcacctgggcgagcgatttgtgtggtcaagatgaaattgagtacctttattccccatgattggcttcgtaacaagatagacacactggtactggacatgaacaagttgcttggagagggttatattttcgcaaatttccacattgctcgtctttttgagaatggtatcgctgtccctcctgtaaatcgcaacttcttctaccggtgcattattgcagtcagtaccaacaaatgtaatgggtcgactcttggagaagacttcgagagtagtcggcttctgttcgacttgttaagagagccggggcaatccaaagttgacattcgggggagagtgaagaaccagatcattgcagacctgtctattctcatggccacaatggcctctaaccatctttggaccaaccttgagcgacgcataacgacttacttgaagtggaagtacccacagattgcaaagcgcctgcggtcggacatcgtggctgcattgatcaagtgccctacaaagaatctcgacgacatcttcaagatgagccctcatacaacaaagctgccaaccaagcttccaacatctagacttcgatcggcaaaaagtgcagttgctcttgcgaagaagagggtcggtaggaaggaaccagaaggatcccctttgcgtgttaggttgactaaacttcaagagaggcgtaaaaagttgagcgaagcttggctctcctcgaagaaccttagggtggacgcagataacgcgaaacgcttctttgcacgcgaagtggcattctgtctcaggggggttctacctttaccatccggaaacactttagcgtctcgggctcacatgaccctgcctctgtaccacaagatattgtcggagaccatcgaagaaaaacggaaaactaaaaacgaaaaacatcgcacattctcgttgttgccttacaaatctggattcactctgtcgcacattccgatttcgaaaatggcctttttctatatggtcaacgagtgccactttgattcatgcaaggcagacgttgcttccaaaaaccatcaaggaatatgggagcgcttcgcaaacctcaagaaagtgggagacagtttctcggaagttcggttaccgcattgtgacagacggctttgcagtcagcatcttgatgaataagcctacgtgtctgacatgttcgatgcctgcagacgcgttctctacgcgggcgcatgagtacgtgacaacagacgagggtggcattgtatccttccttgacaatgtggtcgtggctgcggtagacccgggtgttactgatatcgtgactgtaacaggactcaacggaggtaccagatcgtacagctcggcgcaatattatcgcaagggtctgatcttcaagtctcagcgtcaaactgacgtttggaacctcgagacggctgatatcgtcggtggtatcattccggatagagactcttcgagttctgaacagattggtgcgtacgccagattctacatgggtgccgccccaatccttcttgcccatcgtgcttccagggggtaccgaaacctccgctttcgaaggtactgcaagaaacagaaacttattgttgagattgctgacttcgtagctccgagaaagaagagcgctaaggtactcgtcgggtttggtgattggaaaggtctgggggcgacgccaatctctaggcggacttgtggccctctccaagctattcgtttcgagcttcgtagccgagaaaacgtcatcatggaggacatcgatgagttcagaacatctcaacgatgcagctgctgtgagaaccacctttgcaacatggtggcactcactcatcgtaagaagcaagacggtacaggttgggaatgtacagaaggacgcaagcggattcataagattctccactgcaaaagcagtcaaagcggagcgccacgccaacagagcggtggtatgcttcactgcgggaagacttgggaccgcgatgtgaacgcttccagaaacatcctgatgcttacacttcaccaagtctttgggagagagcgtcctctcgcgtttcgccgagacgcgccgagaagttcctcgacaaccccaccccccccccctgatactgatatggggacacagacggttgaacggtttaccaaagaggctactcggaatatcttcgagaacctcttcaaccttctgcaccccccaacgttgcccaaaagcaacgatctgcagtctggatgattataaggtgtcccactttatttgagaacaactgtagtattctgtatcgatccatgctattacgaagctaaatctcatcgcacgtaggtgagctcatgcacccaacgtttttccatttccaagcctgcttatacacacggctttcgtttgaatacatgcggttgcgtaagacccgccgccgtgcgtgtgtgaggatgcggtcgttcgctgccaactttgaggcatgacgtgttgcagcaggagtcagttatcattaaaaaataccgctttgaatacatgacagtcacatgtacattccgtcgactgtaatggtctctcgacatcgttccgccgactgtaatggtctctcggcatcgttccgccgactgtaatggtctctcgacatcgttccgccgactgtaatggtctctctctgtgagtcgactcgacatgttccgacgtgatgcgagaggtcggtcaccatgtgactcgcactcaattctttgacaggaccaccgcatcttattgtgtacctggttcctgacaggtatgcgcaactcttttcatgtcagtactccaccaattggggatatctgtcactgccccacactctgccagtttaatggcaaaacttgaagaccactccccgagcaggaacgtctttttcaaaacacacatgtactgccatggtgtgtagtaaggatgtaagctatcgtcacatttgtgacagggtgtattcagctcctttgtatcagttcggtctagcaagttgtcgagagctttcatggaatcggtcatccccccccatgcatctgaatgttgaaccaggatccccttttgttccgactctttgtatgccctcaccagtgcatcttccacgcacctaattccaatacccatgttgctgtagataagtccatcaagcgtgtgctcttgtgatgcgttgccacttgctatgttcttcaaatagttcttgatttcgcttagctgtaataaagccattttccctcaccacatactattttccacctgaaggaaacgtagtgtggcaagtgcccaagttgagccttacgacccgactgcgacaaccgaagaagaaatccatggcatgtggcatcagagcagagcagttaagagttggcaagatcaaccaacaaaagagggtagggtgtggggagatcatcccattgcatttggtcctgctttggctggactgtatcatgacaccccgttgaacaattttacacatcattccatccattgtacgtcaacgaagcgagtccttccagaggcgatatgtcgtccacgtcggttttcgaaatgtagaggtgaaccaacgaagtgagtcctgccagcggtgatatgtcgtccacgtcggttttcgaaatgtccaggtgcaccaatgaagtgagtcctgccagtggtgatatgtcttccacgtcggtgcccttcatgttcaggtgaatcaacgaagcgagtcctgccagtggtgatatgtcttccacgtcggtgcccttcatgtccaggtgaatcaacaaagcgagtcctgccagtggtgatatgtctttcacacgtgtgcccttcatgttcaggtgaatcaacgaagcgagtcctgccagcggcgatatgtcgagcaccttgctccggcgacaagacgaaatggagccggacatcggtactcggtcttcgaccacacatgtgtacgccatgttcagatgaaccaacgaagtgaggccggacagtactgatatagagggtacacgtgtgccctccatgttcaggtgaagcaacgcagtgataccggacaccggtgagatgtcttcgagcttgtatttgagatgcgaaatgtcgaggtgaatcaacgaattgagggcggacagagatgataggtattccacttcggtgccctccatgttgaggtgaatcaacgaagtgagtcctgccagcggtgataggtcctgttcgcccacccgtgtgtacgccatgttcagatgaaccaactcggtgagtccggaaagcgttgatatgtcttctagtctgtttccgatatgcgaaatgttgaggtgaaccaacgcattgagtcctgaaatcgatgataatgggtgttcgtccacgtacgtgaggtgcgaaatatctaggtgaatcaacgaagtgagaccggacagcgatgatatgtcggtcacaagtgtgtgcgaaatgtctaggtgcgtcaacgaagtgagtccggaaagcggtgataatacactcgacggaatactaaaatgaaaccgttttcttgaggtacggcacaccttacggtgtaaccaaatggtgtagcaacccacggggcagtggaacaccaatacgattttgaatcaacaaattgcaggatgttaacgagaatatcgtggttcttttttagatcacggctctccatcctgcagactccgtatcgttcttttgtcggtactttcgagagtgtccattgaaggaccagccgcacttaagcgatcgactcttccccggtaccgtggcccaaaagaacacggggtctttgttgatgtgcaatgcgtcatgaaaggaggtttctttgctggacgggccattttgtaggaccatccactcgtacactataatgtctgtcgacgccttataccgtttattgggatgtttcattttactgttccgccgactgtaggtcttcgtccacgtaggtgtgcgccatgttcaggtgcgtcaacgaagtgagtccgtacagtggcgatatgtcggtcacgtaggtgttcgatatgtccaggtgaaccaacgaagtgaggccggacagcggcgatatgtcttggatcttgtcttcgatagccgacattgattggtagggtacgtctttcccccgattgataccgattttcaactctttgagcctgcaaatgcgtgataatgcgtattccaaactgttataatgtcttaagtggatccttgtgacacaccggggtgcggcgcatctccactgtttgcaaacgagaggcacttgtttgaggtgggattcgttcgaaatcgcattggctataatgatctccaatacatcttcattgatttcgtcaaaggaactcatttgtttgtgaagtgtgctgtgctgatggttgtttatactgaagaatggttgtttacacttcattcgaggacgagaatccgccaccgcatccgtgtgtcattaatggacggacggtgtggatgcgacagtttgtacgtgtacagtcagagacagaatttgtgtgacacccttaacggtgacccttgaacctaattgattgggtaggtcagctaaaggttttgtatcaaggtcccaatccttcgtgtccttcatcccgtatttcagcatttaagctggcccagaggataacaattgtaagctgctaactgaccaggtgggttttttattgcactcacatttccttatacccataatcaacttttcaaaataaaaggtgtcccacaatcaaatgtccctagctgtatgatgacttgacaggtttctgcaactaaattctcctgacccactccgcgagggcagagatcccccctatcgattacaccatccctctcaaagtttttcgtttaatcaggtgacgttccaggtccgtctcttgctgtaggagaaggaccaggtccgtgtccgtctcttctcttaggtgacgttccaggtccattcccgtggccgggatggccgcagagacgtgctcttcgacgaacatagccaaggcgtcgtcgttcgcgttcaagtacatcgcactggtcttctttaacgaatcgggcatatcgaacttgtaagcgtatgcaaacgcgtgtagaagggtgcgtaggaactccatgcgcatcgctccgtcgtctgccttgaatgcctctacaagccctgcgtctcgtgggaagaggaattttgcggcgtccgcctcatccgcgtccacaaacctactgatgtagtcgagttttcgtatccgtcgttggactcccttgtcagaaccgtcgactatcggcggggagttgcacatgatgtgtatattgtgttgcgggcggaagtgtacgatgtcgctggagtgcaagaggcggtgggtgatgccttccccaccggtcttgtgttgcgagcggatgaagcttacgatgtcgctggagtgaaatgcaccggtggtgatggcttccccaccggtcgtcatatccttgaggactccggaatttaagacttcgtcgtggtttggctctgtgcaatacataatgcggacccccttccacgtcgcaaactctggcatcgggcgacctggatcgttgcgttgcttgcttgtcagaatttccacgccgaattttcggatgtagtcgcccaatgcgatctccatgacttcgaagaacttggtcttcccgttagaggcggacgcgttggcgccggcgtgtatgtgaaagagctcttgtccgctgtctccgtacagctgtctagcaaatgtgtggatgaggtattctcgttggtatatatctgggtgcatcgtgtcccagtatttcctcacgcggtctgctgattccgcgcacactgcgccattgtaatcgaatcccacggacatccggatgcccttgacggaagacgccgtttttgaggtcccacacgccgttgttgaaccctaagaggtttgggtcggcgtcgagtttcttcatgaagtccgggtcgtaaaagcactcgagcatctcttgcagtacgttattcttgaaggtcgcgtcctggaggcgcgcggtgatgtgcgctaggtcggcggagtcgtcctttgtgctctcatcgtttctctgcatgtcgtaatcgctttgggacgctctctccctgttcatagcgataatgaagtgctctagaacaacggtggacagctcgtgcttgacgtggatcgcgtcgacgtccgtcttccatcgcccgtcgaatacgtaccataatagctttccgttcgtgctcttggcggcagcgatgcggtttccaattatttttttcgcgatgcgcgcgatctcgttatgactcccgttgcacgcgaggatcatttgtatgaccatgacttttaataaagctaagaaattggaaaagttataataaactcagttccaacagttctcttctacagtcggcggaacagtaaaatgaaacatatatcagatggaaataaatgtacgacatcgccgttagaaaattggcgttaagaatggtcgctgacttgggagcggaattgtgattccatggtgcttatgtctcaagctagctagtctttccgtacaagtaggtgtaccgtacactccaggaggcggtttcattttagtattccgtcgagtgtattgtttaagtatagtttgtgtttttctggttgtgaagaggataataaggttagttaagaggtgaaaggggctccgccgcttgttgaataatacaatccgttgtttgccgatggactgtctgtacatggacatatcgtgacccgaaagggcagcgctgcggcggtgtgaggtccgtgcgcagaagacgaagttttcaagagctccagcatccggagagctgtacatggacatctcttgtcacgaaagggcagctgcggcgtgaggtcagtgctcagaagacgaagtttcacgagctcgagcatacggcagacactctcagggcacaggaggtagttcctctcctcctaagttctctttcccttgacctgcacccgcttgttcacgctcaccatatccagacccacggcgttcaggatcatcttcacagccttggacacctttcgcaggtcccacccgtcgcgaacgccgcacgatgcatggctgaacagcctagcggtgttgttcacatcatgttgtagccgcagaacatctgtgttcccttgagcttttcgtcgaacaccgtcatcagatttgggatgatggtcgtagtgtcgaatggggaagaagcagctcagggcacataatagatattccttctctcgctcattctcgcgttccttctctcgctcaacaacggcaaagctgggggggtctggaggcacgtcctcggtgccgcaatcaaggctgtcgtattctgagacagacttgatagacatgtcgacgccacctgtccccacgtactgtaatacgacatcggccatctcctgaaagacggcacctgaatcacctgcgtcaagttggtagtactcgtacccaacgtcgcgacggggcttgactctagggtctcctcgaaggtaccggatcaggacagtctcagactccacacaagcaagcggattaagtacgtggatttcgaagatcatctttgagttcttcgggtactgagaaagtcgcttaccaaagggcttcgacgtccagccaaccttgacgacgatctcatttttctgaatgaacttgttctcaaccaacgcgtacacgaccaacttgtgcgccatgatctctgtagagctgctcctgtacaattcgttgtgaagaaaggatctgtgaagaagaaggacttcgttgcatttattgaatcattgagtttgttcaataattcagtagcaataatggacaatgccagtatccataagaaattggtcctcagtcaccccgtcaatatttgttacacacatccttacagtccagaattcaatgctattgagctatgcttcgctaaggtgaagagagactttcgtcgtttgaactacataccgaatgaaacaaagacgcacgtgtctgatatgatttccttagcataaacagcaaaagattaatatcattgaatggataaagcaaaaatgggggaaaaatgtggataaactgttgacgtgtatgctatcacgacatctgtgctactttggtgatgtaccctccgaaagtttcctactttttttttcattttctgcgagatgaaagaaatagatgtttttacctagaatcgcgaaaacgatcttcttgaagcacccttctacctgttcgatctcggcaaacatgatctcggcaacgtgtttaggtggacacccgaacgccccgcatccccaagctcctaatacgatgctgtcatgtccgtacttgtgagctacactcaatacgagtctcaccttttcgcgaaacaattgactgtctttctctgagaacctgttgtccaccagctgtggcatggaaatgcacggacatgccaagaaggatgccgatttagaaaacttcaggaactcgaatccgtctctctcgcactccctgatgatgtcgacgtcgaacgatacaacggcttccctttctccgatcgggtaaaacgacctcgagagatgacgatggtagttcgtcctccggaacaacgactcttcctgcatcccacctccacaagacacgcaccccccaggattatgtatgtccgccatgttcaagacgagcgggtgcataccttgctctataaggtctagggtcgcatctaatgtgtccatgtctatgacacggatatcggtccgcatcgtatatttcgtgcgatcaaactcgaaggaaggatcgtacgaaactttcaaagaagcacgaggagggacatgatcctcgaatatccgaatgttttcgtgccacacacgtactctccttttaaaatcctccatacctgtttgtaagaaagatcttcttatacgaactattcggccgtgttcactcatatcagtatcagggggtggtggggttttcgaggaacttatcggcgaaacgcgagaggtcggtcgctctgtgactcgactcgacaggtgccgccttgatgcggtagtgggtgtgtcccactttatttgagaacaactgtaacaacattacaattttatggtgtaaatggaataatagatctttcagtgagaacaactgtaacaacatgcgagaacacgttcgcccattttcatttgagcgcgtagcattcagcgatacaggaaagataccatcctatatacgcatcagtaaatccaaaatacccggagcagggaggggcctctttgctatccgttcgctacccactggaacaccactcacagagtacccaggacctgtcatcaacgaatcgaatgtgtcctcgcgtacacgatcggaaaagcgaaaaagtaaacgtgtacatgcgtacgcatttgagatcgcgtgcaccccaaacgttctcacgctccaaccagacccattcgatctgagcaagggagtggcacatatcgcaaacgatgccatccatccagaagtgacgggattctcaaacaactgcgaattcatacagaagaagaagggggagacggaagaagtatacctatgcacctcaaggaaagtgaagcggggagaagaattgttcgtggactacttgatgccatactggattaacggaaagcatccgcactctgcaatgtccaaatggctgaaaaaggcccgcagaattcaatacacattgaaagccatgggtgtgcgtctcgagcaatacatgggaggcgatgaatacgaaatagtagaccctgacctacgcgtattctgtggagaatgcgaacctacaaagataagagtgatcaaatgctgtccttcagaatccatgtacacatgctcagaatgcaagaattgcatcatttacatgtaaaaatgaattgtccatgcttttcgtgtcctctacccatttcgtgtaaagagaccctgtcgtaccagtatgtatattcggattttctcatggagacgtcggtggtcctcgtcccgggccgtcgctaccgcatccgtatccacccgaacctgatgtccggcttctcgcccgaggtcctccaccacccgctgctctgggacagggtcatgcggtacgagggcatcgacgacgcgttccccggcaagtcctgtggcaagtcctgtggcaagtcctgtggcaagtcctgcggcaacacgagccgcatcttcaccgacggcttggataccctgtcattcgtgggagtcgacccccactgcgtcgactaccaggcggtcatggc

SEQ ID NO: 242 - DNA, 21224 bp, unidentified
  source 1..21224: mol_type = other DNA
  misc_feature 1..21224: note = Fanzor polypeptide
tttggtcaagattgctatgtgtgtgtccgggagggaggaaatggacgtacacctcctcaaaccagttcatctcaaccagcaaggacaagtatgcgaacatgaaagcgttcttgttgtcctttgccgcgttgtccatttgcaagaagcaatacggtggaagctgcccctcttcttcaaggacccggttgaagaaatgttggaagcatgatatagtcagattgatggactgcgagtagaatggcaaagcccaataaccaatgaagcctcttccctgggagaataatcctgagttaacatagaaggaaacatgaagtcagaatattagcattattttgttaagtaatcatttcaagttttaaatactgtgtatgtaccgattatgatcgggaggacatgtcctacgtgcgctgtatttgtactcacacatgatgcgtgtctttagaagatcacctcctgcagtcttctttgtatgtgagaagtggcgtgactgaggaagattagtcttcttgttgtccattgcatcagcggatacgtgcaagaagagcttcggatactgttcagacagtttttcacagatgtcatacctacgccttgactggttttaggattgctttccccctacttttcttctccacgggaatatttgtctggcttactccttatgacttgtgttgtggaatcccaggaattctgaaatgttatgatacagcagtgtagtaggtgacttcaagcgaatagggtcgttgggtttgtcaatgctcccgattatgattgggagaattgtgtgtattccgagtttggttttctcaatcattcgctcgttgggtttgacaatgctcccgattatgatcggaggactgtgggtattctgagtttggtttttctcaatcattcgctcgttgggtttgacaatgctcccgattatgatcaagaggactgtgggtattctgagtttgttttttctcaatcattcgttcgttgggtttgacaatgctcccgaatatgatagggaggactatgggtatgccgagtacaaaaaaaaaaaaaaaaaaaaaaaatgctgagtacatgttttctgaatcattcgctcgttgggtttgtcactgctcccgattatgatcgggaggaatgtgtgtattccgaatttggttttctcaatcattcgctcgttgggtttgacaatgctcccgattttgatcgggaggactctgtgtattccgaatttggttttctcaatcattcgctcgttgggtttgtcaatgctcctgattatgatcgggaggaccgtgggtattctgagtttgttttttctcaatcattcgttcgttgggtttgacaatgctcccgattatgatcgggaggactatgggtatgccgagtacaaaaaaaaaaaaaaaaaaaaaatgccgagtacatgtttcctgaatcattcgctcgttgggtttgtcagtgctcccgattatgatcgggaggactgtgtgtattccgagttttgttttctcaatcattcgctcattgggtttgtcactgcacccaattaggatcgggaggactctgtgtattccgaatttggttttctcaatcattcgctcgttgggtttgacaatgctcccgattatgatcgggaggactctgtgtattccgaattttgttttctcaatcattcgctcgttgggtttgccaatgctcccgattatgatcgggaggaccgtgggtattctgagtttggttttttttatatctgaatctgattttgaatctgaatctgaactcaatcatattctttaccgacctatttgtctttcgcagggtctacaatgacagtaccgtggaagtaaaactccaatcggacgggaaggatttgggatgcagcgtcatggacgaatagaccaaggagcaccaagtgccaatgaacatcgaagtcgttgttggtggaccagacttctatgttacggctacgcacgctcactggttgaggtttcgcggcgaatgcaggcatatgtgcggagcagatgcattctggttgacactcacccttgcggaagtcaagacagcccagttgcttgaagtcactagcattcggaggcccatgttaggagccttatcatggataacagttcacattcaggctcttgggttggtagttgacaatgcgcagcaagcctgtcagggtcggcgagggcgaatttatcgccgacaaagagcttgaggaaactagggcgtgggttgagacatgcgaaggaaagctcatgagcgatttcgaggagtttggtcctagcgacaggaggacgtcacctcgatgtacaccaaaagggccttcacctgacgccggtaagagagcaatcgaacggactgtactgctgcaccgtggctcaggttaaattttcaaatctgacaggtacatttcgaatgttacgtacgcggtgggatgtacaccgttcgaaacaaccattgtgtgctgaccgcacttgccgctttcaatttcgataggatattgcgtaacttctgcactctttacatttcctacagcctccgcgaagaagtcaggaaaggcgcgacgaggtcagcttcctacaatcaacgaagaggacagatcgccgacaactttgtaaggtcatcgtattcaaattggtatctccttatagcccagctcctgacatgggcctccgaatgctagtgacttcaagcaactgggctgtcttgacttccgcaagggtgagtgtcgaccagaatgctccgcacatatgcctgcattcgccgtgaaacctcaaccagtgagcgtgcgtagccgtaacatagaagtctggtccaccaacaacgacttcgatgttcattggcatttggcgctccttggtccattcgtccatgacgccgcatcccaaatccttcccgtccgattggagtttaacttccactgtactgtcattgtagaccctgcggaagacaaataggttgggaaagcaaatgattgagattcagattcagattcaaaatcagattcagatatagagaaaaaccaaactcagaatacccatagtcctcccgatcataatcgggagcattgtcaaacccaacgagcaaatgattgagaaaaccgaattcggaatacacacagtcctcccgatcataatcgggagcattgacaaacccaacgagcaaatgattgagaaaacaaaactcggaatacacacagtcctcccgatcataatcgggagcactgacaaacccatcgagcgaatgattcagaaaacatgtgctcggcatacccatagtcctcccgatcataatcgggagcattgtaaaacccaacgagtgaatgattgagaaaaccaaattcggaatacacacagtcctcccgatcataatcgggagcactgacaaacccaacgtgcgaatgattcagaaaacatgtactcggcatttttttttttttttttttactcggcatacccatagtcctcccgatcataatcgggagcattgtcagacccaacgaacgaatgattgagaataaccaaactcagaatacccacagtcctcccgatcataatcgggagcattgtcaaacccaacgagcaaatgattgagaaaaccaaattcggaatatacacagtcatcccgatcataatcgggagcactgacaaacccaatgagcgaatgattcagaaaacatgtactcggcatttttttttattttttttgtactcggcatacccatagtcctccctatcataatcgggagcattgtcattcctaacgagcgaatgattgagaaaaatcaaactcagaataaccacagtcctcccgatcataatcgggaacaatgacaaacccaacgatcgaatgattgagaaaaccaaattcggaatacacagagtcctcccgatcataatcgggagcattgtcaaacccaacgagcgaatgattgagaaaaccaaattcggaatacacacagtcctcccgatcataatcaggagcacttacaaacctaacgagcgaatgattcagaaaacatgtactcggcatttttttttttttttttttggctcggcatacccaaagtcttccctatcgtaatcaagagcattgtcaaacccaacgaacgaatgattgagaaaaaccaaactcagaatacccacagtcctcccgatcataatcgggagcattgtcaaacccaacgagcgaatgattgagaaaactaaattcggaatacacatagtcctcccgatcataatcgggagcattgtcaaacccaacgagcaaatgattgagaaaaccaaattcggaatatacacagtccccccgatcataattgggagcactgacaaacccatcgagcgaatgattcagaaaacatgtgctcggcatacccatagtcctcccgatcataatcgggagcattgtcaaacccaacgagcgaatgattgagaaaaccaaattcggaatacacacagtcctcccgatcataatcgggagcacttacaaacctaacgagcgaatgattcagaaaacatgtactcggcatttttttttttttttttttgactcggcatacccaaagtcttcccaatcgtaatcgggagcattgtcaaacccaacgaacgaatgattgagaaaaccaaactcagaatacccacagtcctcccgatcataatcgggagcattgacaaacccaacgagcgaatgattgagaaaccaaattcggaatacacagtcctcccgatcataattgggagcattgtcaaacccaacgagcgaatgattgagaaaactaaattcggaatacacccagtcctcccgatcataatcgggagcactgacaaacctaacgagcgaatgattcagaaaacatgtactcggcattttttttttttttttttttgtactcggcatacccataatcctctctatcataatcgggagcattgtcaaacccaacgagcgaatgattgagaaaaaccaaactcagaatacccacagtcctcttgatcataatcggaagcattgtcaaacccaacgcgcgaatgattgagaaaaccaaactcggaatacacacagtcctcccgatcataaaaaaatcaatcctaaaacctgtcaaagaaaatttgatccaccgaatgcctagacggaacaggcaaaagggctaaattcttctgggctgtgacatttcatcagtcatgctatgcaagtcaagcaggcctcaactacacatctttgctttacctattgcagtactgggccactaaaacaaacctagtaaataggtaggttgccgaggtgggcaagaacacagtaaaatagaagaactgcaggtgtacatgatccatatgtcagtgtcatgtaaagtaccaatcacaacataaacacccaaccacactcccggcaaagattaaccaataaacaaggcaacctgttggcaagcagtaacttggtcaacacaggcacaaggcagctaagtctgggctacaattgcagtctaccactacaatgcaattcataaccaaaccagacgctatggaaatcttggaacggtagctaaggatgcatgccatatgggtatgcagtactgtccgccattactctgacgcaggtgcaagcgggtaaccatcatgcaggtaggcaggcctcaggaaggtgcaggcgggtgcagagctgttcgccagtactccggcgcaggtgctggcccggcgcgtgtcctggtctggtctggcaggtgcaggcgggtaaccgccatgcaggtaggcagacctatccagtgctccgagcgccagtgctcctggctatctgcccagcatccaccagagaaggtgctaggcaggacagtgacagtgaaatgcattgcgcaaagggtgcgagaattagaagcaactcgggggttattcacaaccacccggtgctaatgcagatgcgcagcaaggcgatgcagaaagcaaaaggcaaagcagcagatcatgagaacagagctgaagtgaattcccatggcagtgaaatgcattgcgcaaaaggtgcgagaattaggtgcaactcgggaccatgcagggccacccggtgctaatgcggatgcgcagcaaagcaatgcaggatgcgaaaggcaatttgcgcaaggcatgaaaggaggtgaaagcgcaaggcatgaaaagaggtgaaagcgcaaggcatgaagcaaagccttaccgacttatcaaaacagtctttcatgcatgcgcagcaagggggggcccggcaaggggggtcaatcaatgcacatcaaggggtcatgcaaaggggtcaagctgccaggtcatgcaaaggggtcaagctgccagagaaggtgctgggcatggcaatcaatgcacagcaatgagtcatgcaaaggggtcaagctgccaatccattgagaaggacaccaaggcagaggctgtgcaatcggatggagacaatgtagacattgctaaggaggaggagatggaggagaaggaagatggggatgggggcatggaggaggagattctagtgcagcgattgtacaggcgctgttgttacccaacaagttagcattggccctctttctacaacgtgatagcctgtcataagtactaagttgtactttcgaactgttgagttgtgagttgtgagaaaaataattatgagcaatgcgttcaagactttgtaaacagctttcaccttcctcttgactgtcctctacaattgattttgtattggaatacttcgaaggaactttctctctctccaaacgagcaaatcaatgttacaattgaaattgaagggaatagtctttttctccggaatgcaacaaaacaatcttacataataaattgtaagatattttcgtaaaatacaccaaaaagcaaaatcaatcaatttgcgaaaacgatcttacaaaataaattgtaagatatattcgtaaaatacaccaaaaaagcaaaaccaattaatttgcgaaaacgatcttacaatatttatcgtaagatttcagtaaaataaaaaaaacgttcggaagcaggaacgcccattaattgggacttatggtcccggacagctcctagggttgcattcgtgttagatacattggttagtacgtaagaaatgcagagaattggtcttggcgtccatgtacacgatggaggacgcacttccatagctcatgtcaaatccacgtgtgaagatcagctttggcaatgatgttatgtcgaatgagcttgtgtacagccagaaactgtatgtgaacttgatgccgttctttgatgaagggatcttggtcgagctgtacacgaacggctttgacaaactcccacccgcgtacaacttgaacgtttttttgagtatttcttggctgatgaggtccttgcgtgtgatgcggcgagcgatgtagatcaacaggagagtgcttagtataatgatcaaaataccgaatagtatcatctggttcgcttgggttccgtagagaccggtcttcaacttggacatcaaaagcccaaggctccatgccataggatcggccttgctaaccataggatcggccttgctaaccttcggtctctgttgagaatttgacattcggtgtatttattaacagaataataacatgaaacatttttcttaaacgatgaatcttggggcttttctcggaacacgacaatacacgataattccaaaacgttgcccgagcacaacacagttcatattaaaaaaatgtcccagtttatttaagaacaaatctgtcgcagtagcatgtcctcctcgtcgtatagcgagatatcatcttttgatagtcacacaggttacctactgttgccttttactcaggcgtctccgtgtcacaattccacacggtggaacttcgcaagtgacaacgcattcgaaacccctgcccccttcaccaagcaatttggtggtccggtctatgaagcattctcagaacgacgtcgtgatgtccgatgggcgccagttcaccgactaccgtccccacgacgtcactcaactacaggggcgtaagacgatgtcctccacgcaagagttcggacagatgcggcctcgcgaaggtgaggccattcgcgagaaggagcgcttatcggcgcatagaaacgttcaggccacctgcaagttcggtcctaatgatatcgggactatggtccctgagcaagacgttttcgtatgcaacaagatcggttgcgagcgcgtggacacgccttactcatgtttgggtatcgggacggggcgtcgaggaggctaagattttttaaatttttatttgaaggactgctacatccttgttgaatgcgcgacacgtccttgcacgttcgccagtgcatcgtgggtatggggttcacgaaattattggggtcgtactctgcatcccctgagcaccttggggtctgccatttgggcgcgctttgttcggggctctcgttttttctaggaggcaggaacaccgtctggtcgagtgggaccgatactagaggttggtgattgtcctttgtgaggatagtggtatcgatgccagactcgaactcttggatggcgtgttcttgagggttgcggcacagccactgccacctgttccaactggttcccctaagggtgcttgcggggttattcaaacgtgtgtcttgcacgtcgagaacgactgacgagcagtcgggggatgtgcgatactcggcacattccggtgtacctttctggaattgccatgcgggcgacctggatgccttccttgtgatgccaaggagttcggagtcgatgtccaccatgagccggttcccgcattctgtgtgcccggacgtgcccatgaccatgcgagcgtccctcgcgaagcagggggtgcagtgcgtcgccggagtctcaagttggtatgatccgggtcctcgggactgtcctaggtctacgcggtaggctccttcgtcgtacttgagatggttgaatgacgacagtagcggatgctgtctgcgttgtgccttgtcaaaaaagtcggacgaagggcatactgaggcagccatgatgatatgtttagaagaacaaaatatttttttttgcatgttcacgctccatgttcttcttgcaattaatgggcgttcctgcctcccggaggattttttgaaatttctactcagaatttagagcctacggaacgactcgctagcctgagatatcagcaacgaggaatcacaattccgctccagaccatgttttgaaaccagtcaaaatccgccgtgaggcaggaacgcccattaattgtacacgtgttccatggacaataaatacatgggcggtcttaaaaatatacacaaattgcagcacaaacaattataaaaaaaacaatatattctttgttattgaacaataaagggaagctttaagcggatgtaggcaaagaagagtcaacatcagacaacaaacaatggacgttgtacgcagaacaattatcaacataccatcgtctttcttccgctgaaaaattatctgcatccgcaacagtaatagactgcaaaatacgcttcaacatcttagtcagggtagcgttattcgccttcaacactgcaagcttttttgtatatttaatatgagatgataagatactgatagtctcgcgttgagattctgcaatactatctctagattctgcaatatccttgctagattctacaatcgccttgatagattcatagtatacactcggacaagggaattatgttacataatagtggttccgataccgacataagagtgtatacagttgttctcaaatatttttgggaaaatcggtatcaaataaaggatatatctgaatgcaaagggtggaagcttttgtacacacctccttattgcccaagagctaatgcgattgaacaaatatttggaagcatgaagagagactacagggtatcatgtccattgacgtcaacctgtaatttcgattacttcatgcaaatatgttgcgttctagaaatgtggaggtataaagacttgtcaaaatatatgattaatacgagagattgggttaggaatgttcgagagagcctgtctgcagatccagattacatcaaaacgttttcggggtacaatttgtgatggagaatgaggtctgcgagtcatcatcgttggtacatgaggctgaccaacatgatgacgttgcagaacttgtcgattatgatggggaggaagacgaggagtgtgcacctgggcgagcgatttgtgtggtcaagatgaaattgagtacctttattccccatgattggctccgtagaaagatagacacactggtactggacatgaacaagttgcttggagagggttatattttcgcaaatttccacattgctcgtctttttgagaatggtatagctgtccctcctgtaaatcgcaacttcttctaccggtgccttcttgcagtcagtaccaacaaatgtatgggatcgaatcttggcgaagacttcgagaatagtcgtcttctgttcgacctgttaagagagcaggggcaatccaaagttgacattcgggggagagtgaataaccagatcgttgcagacctgtctattctcatggccaccatggcctctaaccacctctggaccaaccttgagcggcgaataacgacgtacttgaagtggaagtacccaaagattgccaagcgcctgcggtcggacatcgtggctgcagtgatcaagtgccctacaaagaatctcgacgtcatcttcaagatgagccctcatacaaccaagctgccaaccaagctcccaacagctcgacttcgctcggcaaagagcgcagttgctcttgcgaaggagagggtcggtaggaaggaaccagaaggatcccctttgcgagttaggttgactaaacttcaagcgaggcttgaaaagttgagcgaagcttggctctcctccaagaaccttagggtggacgaagataacgcgaaacgcttctctgcacgcgaagtggccttctgtctcaggggggttctccctttaccatccggaaagacttttgcttctcgggctcacatgacccttcctctgtaccacaatatattgtcggagaccattgcatctgagaacgataaacttcgcacattctcgttgttgccttacaaatctggattcactctgtcgcacattccaatttcgaaaatggcctttttctatatggtcaatgagtgccacttcgattcatgcaaggcagacgttgcttccaaaaaccatcaagtaaaatggagcgattcgcaaatctgaagatagtggagacagtttctaggaagttcggctaccgcattgtgacagacggctttgcagtcagtatcttgatgaataagcctacatgtctaacatgttcgatgcctggagacgcgttgtctacgcgggcgcatgagtatatgacaacagatgagggtggcattttatccttccgtgataatgtggtcgtggctgcagtagaccctggtgtgactgatatcgtgacggtaacaggactcgacggaagtaccaattcgtatagctcggcgcaatattatcgcaagggtctgatcttcaaatctcagcgtcaaactgacgtttggaacctcaaaacggctgatatcttcggtgatgtcattccggatatagactctccgatgtctcaacatattggggcgtacgcaagattctacatgggtgccgccccaattcttcttgcccatcgtgcttcgagggggtaccgaaacctccgctttcgcaggtactgcaagaaacagaaactcattgttgagattgctgacttcgtagctccgagggagaagagcacgaaggtactcgtcggttttggtgattggaaaggtctgggggcgacaccaatctctaggcggacttgtggccctctccaagctattcgtttcgagcttcgtagccgcgaaaacgttatcatggaggacgtcgatgagttcagaacatctcaacgatgcagctgctgtgagacccgactttgcaacatggttgcactcactcatcgtaagaagcaagacggtacttgggaatgtacggaaggacgcaagcggattcacaagattctccactgcaaaagcagtcaaagcggagcgccacgccaacagagcggcggtaggctccactgcgggaagacttgggaccgcgacgtgatcgcttccaagaacatcctgatgcttacactccaccaagtctttgggagagagagacctctcgcgtttcgccgagacgcgccgagaggttccccgaaaaaaaccccaatacctgatactgatatggggacacagacggttgaacggtttaccacagaggcgactcggaatatcttcgagaacctcttcaacctgctgcaccccccaacgttgcccaaacgcaacgatctgcagtttggatgattataaggtatgtcccccttttttttgagaacaactgtacccatctctgcttaaaactaataaaaatatataaaggattccgacgcgggttacacgggtttagggaaatttctatggaactggaacgtaaaagcatggacaattctttcctttttcgttttaaacgcttacttttaccagcctgatcagcattgacccatctgtgtagtgagcccttggacactttgtatatattacaaaccttcctcagactcctcaaaaaaaaaattgtagtgaaccacggacctgtatctggtttcaggggatatcattcaaattatacagagtgtcccaaaattatttgagaacaactgtatacaattctgtatttattctttccgctcgaccaggagtgtgtccaggtccctcttctctctggggtccacaaacgttgtctggggaaccgtgtaagcggcatggtaatcgaacatttcgtgaggggcatccacgctgaaatccacattgccatcacttgaaatattcgaaagttgcaacatgagatctctaacgatgaacggacgaaattcggaaatgtctccagtcccaatgtcaccttgatcatcgttatcaccttgatcatcgttatcaccttgatcatcgttataaccttgatcatcgttatcaccttgatcatctccataccctcccgggagtgcaagcgacgtagtcagtgtttgttcttgcctccacgttaaaggcttcgttgtcgaatgggatgtccatttgttgatgttgacaattatttgagacgaagcattctttgataatatcctcaaatttcactatggattccattcgtgtttctgaaagggcgacgttccgcatacctgcgcggacaacatcgtacgatcgttgaagagtgatcatgtcttcggtattcccccccttgtccgggtggcatagcaagctaagttcgaaatatcgcttgcgtatttccgccaacgaatcggagccgccgctgcataactgttccttagggataccaaaaagggcgtatgggtccacgatggaagttgtcggttccaatgacatgttgaaagaatgaatgaataaagagtgtaaataaatggaacaataaagtttcaatgaaagagacgttagggaagaaactatcggtgcacttactaacatctatctggtttcatggacggatttctcaaacaagtggctgatctcagtgccacagagcacatcgaagtcttcaatattctgaagcactgccccacgacgcgatacatgcagaatgcgaacggaactttcgtggatatggccagtattccccaggacgttatgggatccattacacgtttcgtcgagcactgtcatcagaataagggtatgatggacgactacaacaaccgccttgcggaatgccgcctgaaccaagacttcgatcgccttcctaaatacgaggcaattgttaacctgcctatgcgttcgaattcagacacacatatcgacgcaatcaaggaatccaataagaacgaacgcaagggtgacggtgacgatgatgttgaagacgactctgaagatgtcgacgactctaaagacgtagatgaagctgatgatctcaacgacgatgtcgatgtcgatgtcgatgtcgatgtcgatgtcgatgatgttgatgttgatgtcgatgtcgatgtcgatgttgatgtcgatgtcgatgtcgatgtcgatgtcgatgtcgatgttgacgttgatgtcgaggaagatgataatgatgatgctgttgatgttgatgtcgatgtcgatgttgatgttgatgtcgaggaagatgtcgatgtcgaggaagatgatgatggtgtagttgattcaaagtctgtcgatactccgtccattgttgtggataaagatgtgtctaatgattcacgcttggatgaggcacctcaagttgcatcgatgttgcagaccgtcactcgaaggatgaccacaagcaagtttcaccttgccaagaagaggctcacgcgtaagaagaccggtcgtgtggagatgtcggaatttctcgaacccgaggagtacgacatgtcttcatgatcgtacttttaagaacgtctacggtgtcgtgtgatttaatgcgtctgttgcgttcacaaagagtctggtccaagtgtaacaatcatgattgatcttactcaagttcgatgtctcacattcgggggcgtcgggttcttaggagggttgcaaatcggatgcatcaagtattttgaagaggcgggaatcataaatcagatagacaccttcgtagggtcttcttcaggatccattgtgtctctcggtgtaatattggggttgtctagccatgacatgatttgtgtgttcaaaaacatgcagttaccagaacttaattgtatagaccaagtattcgaggcgaggggatttgacgatggttctttcctattttccatggtacaagacattctctcctacaggtcatttccttgtaacactacattcgccgaattgcgtacgcgtactgggaaagaccttgttgtaaatgtggtcaacttgacatacaacattatggattctttctcatttgattctcaccccgacagggaggtccgcttggcgattcgcatgtcgtgcgctttgcccatcattttcacaccagtgacatttgagggaaagatttacattgacgggtgttgctaccagggagtgcacgttcctaagcatgtagaggagaaactgaggcggggtgattccggtaagaacctcatactacgtatcaataatatcatgaatataccggatgagaaatacggtgacgacttcatctccttcatcattcgagtggccaactcgttcgcgcttttcgcataccgtgaaatggacaacttactctcacatgaggtatccgcatctaccacaattattgtcgatctcaacatggaacccggatttttcttagaggatatcgtcacgtttgacaggaacgatgtagaatcccttgtcgctagaggttatgatactatccgtagaaacattgcccccctcacgacgattgaagattcagaaggcaaggtggaaaacgacgaatgtgacagctagacttatcattatgataccgacatatatctttcgttcccctcctatgaacgagtgaacgatcgccctgctataagcagggataccttttgttcctgatatcgacactttgtgagaggaagagacaatatcctcgattatgaatcgaatagtctctaccaactttactagaatcacatgcaagggttgttgtacaaaagaacgcttcgacagatctgtaaatcttgcattattgacgactctgtttacattgtcaatcactcgttcctccttcagcatcaactcgctgaaaacgtcacctcccggaacggaaaatttggaaggtgaatcatttgcattcaaaagactagagaaggaatacggacctgccactggcccatctacaatcaatgatcctacagtcttactgttcctattagtagtagagttattcgacggaggagcaccttctgaattcctttgtttagattggtttgatgtttttgaagcatcatcagtatcaccgacaagcacccttacgccatcatattcctttttagcgttcatatcggttgaataaacaaagaagatgaccggtttgtcacttgtacttctttacacataagtaatttttttgagtttttacaaccaaatcacctccacatttaatgtccgttgtattcttccacgtctactactcctccgtcttcttccacgtctactactccttcgtcttcttcaggtactactactccttcgtcttcttcaggtactactactccttcgtcttcttcaggtacaggtactccttcgtcttcttcaggtactactactttttcaggtactccttcttcttcttcttcaacttcttcttcgtcttcttcttcttcttcaacaccgtccgactctggatttgatatttctccttcatttgtttcttctcccacgttcattccatctgagggatcatctgtttgatattgttctgtctctgcaagaagtctctggaacgcacctagtatctggacattggtttcgttagctgtcttcagttcagttataatcgatgctaacagttcgagttgttgcgatgaatcactttccatattattccacttttctttttatgcattttttttattctcgaattgggacggaaaccgcgataaatggggtttcctgcctcggcggacttttttttatcagaataaacgactcgcgagctacagatatcagcgccttttttctgaatcaaccattccgctccaggaccatgtttccggaaccccacaaaatgacatgacaaaaacaatgacaagacttcacccccccccccatgacatggcccaacaatgacatgacagacccgaaccaatcacgacgcaacaagacataacatgacacacacccaattcttacaccccaacgacaattttctaaaaggcgatgtcgtacatttattcaatactgtacacaggggttgttttttcagtgtagtgtattctatgggagggcagaacacttgcagggaacttacagtcaacggaatactaaaatgaaaccgcttcgtgtacggccaccaccttacggtttgtaaccttaattggtaggtagaccaggcagtggaaacacaatacgattttgacgcaccaaaattgaaggatgttaacgagaatatcgtggttcttttttagatcgcggctctccatcctgcagactccgtatcgttcttttgtcggtactttcgagagtgtccattgaaggaccagccgcacttaagcgatcgcctcttccccggtaccgtggcccaaaagaacacggggtctttgttgatgtgcaatgcgtcatgaaaggaggtttctttgctggacgggccattttgtaggaccatccactcgtacactataacgtctgtcgacgccttataccgtttattgggatgtttcattttactgttccgccgactgtagggtttccttgcggattgcggattaaaatgaaacataagtaaattgggagtaaattggggcattgagttcttctgtcgtgaagctttttcggatctgtgacagttggatggtcgcgtccgatatagtcatgatatcgtcggtgttttttgaggcatgtaataccggagtttctttgtgggggtcgaatgaccccatcggcatttgtccgatagtgacgagatttctgacgaaccccgatagcttgtttatgacttttttgctggtgattgtcgagtgatccgaattgcggcgatggacaagtttcctaggctgtagagtcgctgttggagagcggaaaaagtccacgcaggtagactgttgagtagggtaagccgcaagcccatccaagtttgtttctgcttgtggcgtttgttgcgtgtgttttggtttccctttgagagggcttttcccatgatttgcggtatagtgcggcgtgagtcttgggggagagttcatgcttatggggctttggaagtaggaaaaaaaaacgaagctatcgaaggtttgtgctgaaaacgaaaatggtagggacggtaagattggttaccacagacaggtctaaacgagttcagcgcgacgtgattcagcgaaatttggcaccatggtaatcgtagggtctgccaagcgccacaatgatagatccgtctggcagcgttcattccataggatgttgttcaacttgacatcctccgtggtggacgaatcccgtacaatgaaaacaagtatagagtgtgtctagaaaaggttatcgctacatcgaggaaattcgccacctaggcgtgagcttctttatgaactctgtttgaccctaaattcacctgtgaaccgcctcagaacggatagatttcttatgtaggggtatgatactgttatatgtaggtgtcctccacgtgcatggacataaatgcgtctacaggttttgttggtctagccatgactccggtttgaagtttaatatgttccaagatgttccattccggctattgctctttttggatgagtgtaaggcaggatttcgtgtactttgttttctcttgacggacggtcttcgatcccacaaggtttagtgaggggataggactgagacaatcgcgtcgaggttctaaggcgcaggtctattaaggaggtttttgaagttccttttgacgacttctttggatagggtacgcatgtgtcagtgcttctgaggggaatgttgtacctaaaccgacaacagttcatctgtgtgtagttgaacgtggccacgaaacgaatacggtctccctccggatgatgcaacaatcattttttaaggcgttcgatctcgcaaatgcccgttggaaaaatcccttcgctaattaatatattcctttgctatttatttggatgtttcattcgtaagatttaaaaaaaaatcatgaaatcaatgagaacagacggaccagtggttaaagggaggggaagatcaaatctgttgatcgctttcgctatatgttgatatctttcaaacctccttacagttttgagacgatcatgcgaagcgtaaaggatatcgcctaattactacgggattgccgggagatcttgaaagaagcaagatggcaaaaaactgagggaggggggggggggataggggggcgaagccgatgaattcaaggaaaagaccggggacatcttcaaaaaggtggttccaaacaagttcagtaagtgggaccccatttgctgtgagacacgccttgccggacatgttgcactccaaccatcgtatagaggcaagcggtactagttttgggaatgtccggaaggacgcaagcggattccacagattctccactgccaaaaaagcagttcaaagcggaggagcccatgcccacccaagagcggcggtaggtccaactgcggaaggactttggggaccgcgatgtgaacgcttccatgaacattccttgaatgcttacacttccacaagtctttgggagggagaaacgtactctcgcgtttcgccggagcgctccgagaagctctcgaaaatacacctgaatactgatttgggggcacagacggttgaaatgtttccaaagagaggcgactcggaatattttcgagaaaacctcttcaacttgctgccccccccccccccctacgtttcttaaagcaaacgatcagcaggtcgatgatataaggtggtgtaccacttttttgagaacaaatgaaattataaggggtggtgtcccattattttgaggaacaagaagtgtaaaaagacacagggtcatctcattttgggtttaacattgggtttgtatgaatggggatcccgtacatgtttttctcactgcggaggcattatccttcttgtgttcgcgatgggtttgcgctccctgaccgagacgatcacgtgtaatcgatttaacgcggtagtccacgacgctcttttagttttcccaaaaaccacacccgagcaggtcgtccaacattcgatggatcgacttggaatatctgtatgtagtaccagtccaagcaaacgttcgttgttagtctctgtagatggcacagctctctaggaagatggcagcagatgcacaaccagcggaaaatcgtaggtttgtggcacggaattgacacgcgacgggaggacactgggatggagatacgaacaaccatccccagaaccgagatgaaacggacattgacgtgccacatatctctggccacccctcatgcaccacctcgccgggtctccaaggggttcttggcgcggtttgcgggcaaacatgcccttctgtcgaggtggttctgttccaccggaacctgcgatttcaggggagggtgagcagaagatcttagggaatatcaacgccttcgtactgggattcgccattcggctatacgtgttgtgcacggttggacgcggacctcatcctaatgtcggtgcttctcctcattggaacgcgatggagttgtaccgtgagactcccggtggtgtggaggtgactgcattccttaacttgcgatcgctccgcactcggtggagcgcaaaaaacattaaacgtccctgacttcgtcgtaatctgtctattgctggaaacgagtcaggcagggcattcggttgagtgctttagctcgtttgttaacagtatagggagaagaagacgagcaccagcacgagcgagcgaggggggatgcttggtacaatgagcagtgcagcgagaacgtacacgcactgtcgaagaagaaccggttactagtagcagtgtagttactaatggttccggtttgtatgctgggattgatatgcaggagggggggggagaaaggtaccctttggagaatcctcagggagcggccatagtcgcttcgtgcaccaacgccgcaatgcgatgtttcttggagtcgacgtactacagcttattttgtggggcctgtgcagtgcagtggtacgatgcgcgtattcacgatggtgttctgcgtgggacttggtggaaacggcgtaccttggtgaccaaaaagctgtctagtgtgggtgggacgtaccgtatgattacgcggccctctcgacttggacatccaaacactttctgagcgagtcgacccggcattataatcaggaactcgatgaccacttctctacacttggaccgcacactaagaggtttcgtcatcccgtgtacaaggcggctctaacaatgggggattgacgcggttgataggatcaactattctcttctcattctaccgcgtctcgccccttggcgccgcgggggacgtataaggtgttcggcgcccgtccacccgatccg

SEQ ID NO: 243 - DNA, 9125 bp, unidentified
  variation 5232: note = n is any nucleotide
  variation 5863: note = n is any nucleotide
  misc_feature 1..9125: note = Fanzor polypeptide
  variation 3740: note = n is any nucleotide
  variation 4814: note = n is any nucleotide
  variation 5528: note = n is any nucleotide
  variation 5283..5284: note = n is any nucleotide
  variation 2355: note = n is any nucleotide
  variation 5564: note = n is any nucleotide
  variation 6247: note = n is any nucleotide
  variation 5663: note = n is any nucleotide
  variation 3764: note = n is any nucleotide
  variation 5959: note = n is any nucleotide
  variation 3676: note = n is any nucleotide
  source 1..9125: mol_type = other DNA
  variation 7011: note = n is any nucleotide
  variation 5469..5470: note = n is any nucleotide
  variation 3586..3587: note = n is any nucleotide
  variation 5482..5483: note = n is any nucleotide
  variation 6631: note = n is any nucleotide
  variation 5784: note = n is any nucleotide
  variation 5924: note = n is any nucleotide
  variation 5360: note = n is any nucleotide
  variation 3701: note = n is any nucleotide
  variation 2507: note = n is any nucleotide
  variation 3584: note = n is any nucleotide
  variation 5323: note = n is any nucleotide
  variation 5554: note = n is any nucleotide
  variation 5921: note = n is any nucleotide
  variation 5415: note = n is any nucleotide
  variation 5872: note = n is any nucleotide
  variation 5632: note = n is any nucleotide
  variation 6102: note = n is any nucleotide
  variation 6993: note = n is any nucleotide
  variation 5886: note = n is any nucleotide
  variation 5766: note = n is any nucleotide
  variation 6645: note = n is any nucleotide
  variation 6978: note = n is any nucleotide
  variation 5076: note = n is any nucleotide
  variation 6032: note = n is any nucleotide
  variation 4824: note = n is any nucleotide
  variation 6141: note = n is any nucleotide
  variation 3738: note = n is any nucleotide
  variation 5290: note = n is any nucleotide
  variation 3743: note = n is any nucleotide
  variation 3755: note = n is any nucleotide
  variation 5069: note = n is any nucleotide
  variation 3573: note = n is any nucleotide
  variation 6077: note = n is any nucleotide
  variation 5974: note = n is any nucleotide
  variation 3731: note = n is any nucleotide
  variation 5343: note = n is any nucleotide
  variation 5397: note = n is any nucleotide
  variation 5869: note = n is any nucleotide
  variation 5120: note = n is any nucleotide
  variation 5230: note = n is any nucleotide
  variation 5387: note = n is any nucleotide
  variation 6131..6132: note = n is any nucleotide
aggtctttagcagaaccgacaaaaggcaaattgtgtgaactgcagctggttttggagcctaacctccatctccaacccacgatttcaactgtgtaggatgccaggaacccaccaaagcgaggcaaataaactgttcaggttgaaaacatgtgagctgttcctctgctactaaatcacagctataccgttgataaaacggagtcacgtcgttcatttcgggttcaagtccagctacgcaactcatggaggcatcaagtgaggcggtttctgaatgggatgacgctcgaggccacttaattcgacaacagcaggccttcgccgataccaaaagaacgcgtacttgatgcgtgtttggagcgaagcctctcagacaaatcaagttgtgttggctgctacgattgctcagtatttctacgccgagttacctcctcaacatcacttccgcgttccgttcaacttcaacgcactatccagcgctgattgtgtatctaagtttcgttttggcaaagctcaaatcgagtccctcgtgagcctcttcgcgctagatgcgataaggactcgtgaacgcacggcagcgaatggagttgaaggcttgtgtattgtcctgtacaagttggcaatcccgttgcgctggaaagatctcgaatcgttttttgggcgaactgaaagcggtctttcaaacttgtttcttcatgtgttggatcacctggagtccaagtttgcagaccttttatacttcaatcatgaatacgcagcaaaccatgtacaaacgtacgcggatgctgtgttcgatgctggtgggtcaatgcaaaacatgtgggcgtttgtagatggaaccgtacgaggaatttgcaggcctaaagctcgcaacagtcaacgtgatggaaaatatcgaagccagaaatccgtttacaacgggcacaaacgcaaacatgctctaagataccagacactatcaactcctgacgggctcattacccatgtgtatggaccttttcctgggcgaaaccatgatattaagttgttcaaggactcgcgaattgctaacgtcattcgcggtgatgctcggttcaagccctatcgcatctacggtgaccaagcgtatgggaacgattctgtgctttcgagcccattcacaggggctgtggcgaacctttcgcgagaacaaaagttagtcaacaagagcatgagtaaggtgcgcgtgtctgttgaatggggatacggacaagttgtcaattattggactgcactggacttgaaacgacaagcccgctcgggtacccagcctgttggatcgatgtaccgcgtggcgattttgctaactaattgtttgacttgcgccaatggaggcaatacgatcagtgactacttcaggcttccaccaccaagtcttgaggagtacttgaaaggcagttaaattcattgataaacttatgtcttttataggagtttcctacttcttgtcactactattgagtgacttgctgaaaatcgtgacgcattgcaatatcagctgtctgtttcgctcctcagcttcttcacgtgccctgttaaggcgttcctcggtgcgctcacgagatctttctcgctctcgctcaaatgctaggcgattttcgtgttgctctctttcgaatgctagtcgttctgcatgctgctgctgctgctgcaattgcatttgtcgatcaaactgctcgcagcgcatctcagcgtcgagccgaatacgtttctcttgcctgtcaacttccaactgaaaaacactttttcggcgtcctgctggaactttgcctggagttgatattgagctaactgacggagtagacgccaccgaagcagtgccatcgtcgctatctgaagaagcatcgcttgatagtatgttttccccccgacgagctcggcgcgtaatagcgtctgacacaatttgagaagcgcagagattagtttgagcttcttcagcttgcttcttttccttgttcgactgtttttgggccttgaaatccttttctagagacacatactgccctactaggccaggtaaggagtcatagtgactctgttcgttggtagcatttcttgcctcctcgataccactgcctaaagctgcacgaagctcacccgccgaccagtttttcttcaacagtcgcacgcgatcctgtacctgtttatcgactagactaaccttgacagcagcactcacacacttcgcgacttgaacccatactgcagcagcctctccgtatttggcggtgtatggtttctgcttgatagcctcgcgcatgagctccttgtcaatgtcctcagagaaacgaaataccatcgcgcttctttcactaattcgttgaagtaacaatcctaaantgaacccctgccagatggccacaaatgcttcactcctcggttgtgctaaagataaattcaaacctggtgaagctcaccatctgctgcggttgtgatgcaaacccactaggttctgctaagaacctctaatgaggcctgctaataatagaacncagctctgattacgggtgtgctcgtttcgagttagacaatttgtcgttcttgtcgccgaaccgatcgaagcgaaaacaagattaacgcgtcctgctgtaggggggaagggctacaatgtgaaatagtagaaatattatacaaagtcgtgctgcgcccgaagaaccactgacatttggtcaatcttgctgtataaaaagatgaaagtagatttttttatagtcctgtctaaaacgaagttgtcttgccggcagaatacaaatgccttcttataaccttcgaatgatgatgtaagttcccggaggatagattatctaactgtctgtcgtccaggtcgactcctattgtattacataatgcgggagaacttgactaggtaaaaaaatacagttgcactcaaataaccaaagcgaatgcttagaggttgtagtgctcgttgttgctattaagcggcacaagagtgctaactcaaacgcatgctgcgtgggctttcgacttctttattttaccctttcgaatacgataacaatagtgctagcaacgctacaatcacggacgcactgagaaaaaaacgattactttttctcagtggcgcatcgacgccaactacgaactactaatgatcctatgtggagggaggctatcgaccgcgggtccactgaggtcgaagtcctctacaatgcggtcgtgacgacaatacattttatttcacacaagctgcagtttcggctaatcattcgaaaattcatatctgttaacacacgaaataacataatgatatttctccatgcagtaacaaggcttacttcatcaagtgctgctgcggtaagtgtaagtaatctccgtttttatttatgtattcttgggcgaccgtttacgtgtttctattatcgcttttgcctcaactcgcctccttttgtagatcttataaaagagcagacaacaccgtatccatactagtcgttggtgaacgaagcgcttgaatgcggtattgatgtagtatatgccattttttcttcacacgacaccaggggtcataagagctcttggaactagaatacatttggntgccgcgacgntnntataattccacatttttatgtgattaccgggtattctgttcgtagtaatcggatttcttgctttgatttgcgtgtggtgtgtgacaagncctcttctactgaaagggtgtgtgnggggggaggggggcaaaaaagatattactnactggcncnttntgcgtgaggacncgagcagantacgaacatcagtgattaggtgcacatttataggaatataactagggctgtgcgagggctgggatagccaacagttattaaagaggctaaaggtcgcgaacagctcataccggtaaaggtatatgaaacggcggttaccagcttcagtttttcggcttcagttaccgtcgagcgaattaacctgatttgggctgtcccagcagcacagagttactgctatcccagaatgaatactggtaagcaagaagagccggtccagagtaaattatgggccggtctactatttcatttgatatgacttaatcttttctccgacggtcttcattggttgcgactaggttttggcacaatgatttttcgcacgaagcgtgcacagtgagtggataggcataaattttacaataagtcgtcaagcacgtgatcgaaggtcgagcccaatcacacgctttctacgtgacgcacagtaggagaatatttgcaaaaataagtctaatctcagttccaactgctacagttaaggacgacgaagctgttggtcagcggtttggcgaatctgacgaatggtttggtccagtcgaaattgaaatccggcgggtcaaaacggcgaacctgctgaacaggctcaagagatcgtgcttaaatacgcgttctcaaaacttgctaatcgtgttgggtttctggggttgcaaccccagtgtcgtgacctaaagtgtcggatttgacctattttattggttaccgaaaacgtaaatgatctattccaaaataataactgacatggagaagttcttgtaacttaagacggagatcctccagcgaatggtgaccgagattcgaatctaccaccccaatgccggcatcagcgcagcaacgaaagcttctacaagaggagcacagccaaacggagtaattagtaagaaggcgaagcaaggctgagaaacactagcaagtactgataaaatattgtctatcatttctaaagtatctgaactcatgttgaagtctcccatgttcaaccggagtcatggaagacttggcacttcgtcacantatagctcgnagcgccctacgaaagatctatcacttgtcatttggcgagatgcctcgcaagcgcaaaaaaaaaaaaaacaaaaaaccacagcaacaactacacagtatgtgtaccagtgcctcagtcgcaagttgaatcaagtctgtggtctggatttcctgcgcaaagagctctagcgaacgaccatcgttctccgccaggtggggctcattggatggaaggtcgggggaatgtatatcctccgcagccttgancagggcnaaccgcttcccgaactcaacgcaatgtttttctaccgatgctgngctgcttccctgggctcgactgagaaacgagatcggtacaagacgaaccccaaataccccgacctccacaagactttcttaatgtactgggaacttcgacaacagcttcnancccacgtggcaccgtcgctggggtattgcggtgccatgataaacgaaatgnncacganaatggcggttaatactgccaacatgttggctcnacacttccgtcggcgactgnaccaatacgttagattncggtacgcgaaagaaggaaagattcanctgagcttcnacaaaaccaagaaacttnttgatagctgctatcgtgtccaagaagttcaggagtttgacacaaatggcaatnnaacagctactannaaaatgtggggtgcttgggataaatggcgaacttcagaagagcgngagttacgtgagtggctcggtatggngccttggcantggacaattcgtgagaatctaggttactttgtgacgaaggtgtacgacatgctttcgtggatggaggnttttgtggagaaacacccaaagacaagaggngctcatctctactcgttactaccacaatcgagctctttcataccatctcacgttacactgaacgcgacgactttgtacgagctcttttgtcgcatttacgatnatccggtggcgaaaaaangtcgtgaatggcgatctgggactggaatgcagaactaaggcagctcgtgctacctggacactaaatcgcgaagttattntccgcnagnttttcaacgtaacngagttggagaccagaacccgcaagttcggtaaccnagncacgacggatggctatgcagcttcggtactactcnagcgcgaaatgcctnccacagaacccacagacaccaatacggctccaaggaaaaggaggaagactagcaaaantcgattaacgaatgttgtggagaaagatgccttggatttggcacntgacaagttaccggaaggctacacnccagacattttcattgggatcgatcctgnngttagaatnctggtcacggctgcgtcgactggatatcttccacagcaacggcaaggccgacagtgcaaacaccgccacagacgtcgtcgctttcgcaaaaaagattcgaggaagngcattgcgaagaaccaacacggacacggtcagcgagttatcggcgtcagcacagctgagtactatcacctggccaagctcaataagaagcgcgtatgggacctcaacttgaggaagacagaacctgcgtacgttttgatattgaaggaaatgccaagttttaatacttctcagctgacaacattcatggatcgactccagtactttgtgaagcacgtgggctttctcgtctcgtattcgaccaaaacttcgtttcgaaagtggagattcttaaccacaagttcgaagatgcgggcgttgactgcgattaccaagcgacttgttccgatccggagtgcgcaggtctgcatcgcatttggtgattggagctgccaggacggtctcngtggaaaccctagngctccagtacaggcactcaagaaagaactggaacagcgagcgacagtttgcccatggacgagtttcgcacctgtaagctgtgctccggctgccacaagcacctcctttcagctcggctattgacaaaggtgaaagaccgatagaccgagaagatctcgattgtcttggagacgtcttgtgcttcaagaacagtcgatgcaaggcacacttctggaatcgagacgttaatgcagcgagaaatatactagagttactcaagtgcaggctttcaggcctggggagactggcagctttcgagcggtgactgcgagaccaagatcgtgattggaaagnccatttcttagaaanatgctgcactcgaagggngtgggctttttgtctggggacatgggggagcatccactcacacggtgtggaggcgcacaactgcttcgacacaagaatccgatacaagatagcgattacgtaccacgagttgtatgtagccagcttgtaacttaatggttaaatcatagaccccgaatgtctgcgaattcgacacacctgcactgtaatttgcaaagctgatgtaaaacagcatttaaatggcccagaggcttcctgctgtagtttatgtgcaaatacaagcacattcttcaagggccggatcatggtgatcccgtagaatccgggtagcagccaaacgtgaccctcatgttctccacaaccgatagccttgtcattacaacagtcggtcatctagataaaaacggtaaatatcagccatccctcctgtataaatggttgattgagacctctcgatatatcaagtatactcgatactaatctccctggttctcgaagatctcggaggagcttgagaacgtttggtatatcggtgaaagcatctacagaagacgacaattttgaagacagggcgtttggttcggcacagattaatgaggtacttaagacagggacaaagaatctaaagaaggtcgcggctagcgcaaggctcatgtttacaaaggcatgtgatgaagcagaggaagcttagtacttagaagtaaaattgaaaagtgaattgttttcttgttaactactctattgtagctaagcgtcacacgcaggcacggagagtattgctacgaggcttgaagaggctcagcatacgtattggttgcttcataaaaacagcgcggatgacgttatcaagctgcttaatctgaataaggaaggcgacaacgtgctctgaatctctttgtggagcattggctgcatacataaagaaggtaaacgaccagaacccagacgaagcgatattctctgtgttgaagacacactatgacagtgacgaaatactagcaaagactctcgttggggctaagatggactacagaatggttacaaccgctgcgaaattggagaacatgcaactctcgagatggcggaatgatgatagaaccacggaaactgtcttcaacctgctgcggttaaaccaggaaggaggcgggttattgataagcaggttgctagacacgtagatatcttacgcaactttgatgaaggaagacccgaacaaaatcttgctggtaaaattggcgactcgctaccaagacgagaaatcgctaacgcagatgctaacttccaacgcagaaggatatcaatactcgatcaactgcctataatttattgcaagcacagatggatcagtggaaaatcagtcgcaagacagctgaggaagttgttacgctcctaaaactgactaaagatggcagcaacttcctgaacagccccgtcttgaaagcttgggtatctttggtagagaagttgaaggaggacccgtacgagttaatgttttccaagctgatgaagttttataatgctcataaactggccctacttctacgctggtcatcggtgcttgacataacgggaacaacgagtaagctcgaggagtttcaatgtaaattttggaaggaaagcggcaaaagcgctgatgatattttcgaacgtttgcggctgaatcagaaatctgacggctttttaaacaacccagtgtcgcgtatttgggagatctacgtgagaagattagatgtggaaaccaaataaagaattgttcttgaaattgaaagaaagctacagtgatgaaggactggcaaagatgctcatagctgctaagaaagattccagtacgacctacatcgctgaacgtttggaggacgtacacctccagtactttcaggaaaatggcaagacaacagaagatgttcataaatttcttcgattggacgaggaaggtaaaaacgctcgtgaatccgccgtcttcagcacgtgggcatcttacgtggctaaatccagacaaggcaatgttcttgatcctacagaagaaatacggcaacaaacgtttggcggaaatggctagtcaggcagaggatggcagtactacaaacagcggagtcaggaagagatttggagaagtcaacagatgatagcggatg

SEQ ID NO: 244 - DNA, 16174 bp, Phytophthora sp.
  source 1..16174: mol_type = other DNA
gatgcgataaggactcgtgaacgcacggcagcgaatggagttgaaggcttgtgtattgtcctgtacaagttggcaatccgttgcgctggaaagatctcgaatcgttttttgggcgaactgaaagcgtctttcaaacttgtttcttcatgtgttggatcacctggagtccaagtttgcagaccttttatacttcaatcatgaatacgcagcaaaccatgtacaaacgtacgcggatgctgtgttcgatgctggtgggtcaatgcaaaacatgtggcgtttgtagatggaaccgtacgaggaatttgcaggcctaaagctcgcaacagtcaacgtgatggaaaatatcgaagccagaaatccgtttacaacggcacaacgcaaacatgctctaagataccagacactatcaactcctgacgggctcattacccatgtgtatggaccttttcctgggcgaaaccatgatattaagttgttcaaggactcgcgaattgctaacgtcattcgcggtgatgctcggttcaagccctatcgcatctacggtgaccaagcgtatgggaacgattctgtgctttcgagcccattcacaggggctgtggcgaacctttcgcgagaacaaaagttagtcaacaagagcatgagtaaggtgcgcgtgtctgttgaatggggatacggacaagttgtcaattattggactgcactggacttgaaacgacaagcccgctcgggtacccagcctgttggatcgatgtaccgcgtggcgattttgctaactaattgtttgacttgcgccaatggaggcaatacgatcagtgactacttcaggcttccaccaccaagtcttgaggagtacttgaaaggcagttaaattcattgataaacttatgtcttttataggagtttcctacttcttgtcactactattgagtgacttgctgaaaatcgtgacgcattgcaatatcagctgtctgtttcgctcctcagcttcttcacgtgccctgttaaggcgttcctcggtgcgctcacgagatctttctcgctctcgctcaaatgctaggcgattttcgtgttgctctctttcgaatgctagtcgttctgcatgctgctgctgctgctgcaattgcatttgtcgatcaaactgctcgcagcgcatctcagcgtcgagccgaatacgtttctcttgcctgtcaacttccaactgaaaaacactttttcggcgtcctgctggaactttgcctggagttgatattgagctaactgacggagtagacgccaccgaagcagtgccatcgtcgctatctgaagaagcatcgcttgatagtatgttttcccccgacgagctcggcgcgtaatagcgtctgacacaatttgagaagcgcagagattagtttgagcttcttcagcttgcttcttttccttgttcgactgtttttgggccttgaaatccttttctagagacacatactgccctactaggccaggtaaggagtcatagtgactctgttcgttggtagcatttcttgcctcctcgataccactgcctaaagctgcacgaagctcacccgccgaccagtttttcttcaacagtcgcacgcgatcctgtacctgtttatcgactagactaaccttgacagcagcactcacacacttcgcgacttgaacccatactgcagcagcctctccgtatttggcggtgtatggtttctgcttgatagcctcgcgcatgagctccttgtcaatgtcctcagagaaacgaaataccatcgcgcttctttcactaattcgttgaagtaacaatcctaaactgaacccctgccagatggccacaaatgcttcactcctcggttgtgctaaagataaattcaaacctggtgaagctcaccatctgctgcggttgtgatgcaaacccactaggttctgctaagaacctctaatgaggcctgctaataatagaacccagctctgattacgggtgtgctcgtttcgagttagacaatttgtcgttcttgtcgccgaaccgatcgaagcgaaaacaagattaacgcgtcctgctgtagggggaagggctacaatgtgaaatagtagaaatattatacaaagtcgtgctgcgcccgaagaaccactgacatttggtcaatcttgctgtataaaaagatgaaagtagatttttttatagtcctgtctaaaacgaagttgtcttgccggcagaatacaaatgccttcttataaccttcgaatgatgatgtaagttcccggaggatagattatctaactgtctgtcgtccaggtcgactcctattgtattacataatgcgggagaacttgactaggtaaaaaaatacagttgcactcaaataaccaaagcgaatgcttagaggttgtagtgctcgttgttgctattaagcggcacaagagtgctaactcaaacgcatgctgcgtgggctttcgacttctttattttaccctttcgaatacgataacaatagtgctagcaacgctacaatcacggacgcactgagaaaaaaacgattactttttctcagtggcgcatcgacgccaactacgaactactaatgatcctatgtggagggaggctatcgaccgcgggtccactgaggtcgaagtcctctacaatgcggtcgtgacgacaatacattttatttcacacaagctgcagtttcggctaatcattcgaaaattcatatctgttaacacacgaaataacataatgatatttctccatgcagtaacaaggcttacttcatcaagtgctgctgcggtaagtgtaagtaatctccgtttttatttatgtattcttgggcgaccgtttacgtgtttctattatcgcttttgcctcaactcgcctccttttgtagatcttataaaagagcagacaacaccgtatccatactagtcgttggtgaacgaagcgcttgaatgcggtattgatgtagtatatgccattttttcttcacacgacacaggggtcataagagctcttggaactagaatactttggttgccgcgacgttgttaaattccatttttatgtgattacggtatctgttcgtagtaatcgatttcttgctgatttgcgtgtgtgtgtgaagactcttcactgaaggggggggggggggggcaaaagatatacttactgcgctttgtgcgtgagactcgagcagattacgaacatcgtgatagtgcacatttataggaataactagggctgtgcgagggctgggatagccaacagttattaaagaggctaaaggtcgcgaacagctcataccggtaaaggtatatgaaacggcggttaccagcttcagtttttcggcttcagttaccgtcgagcgaattaacctgatttgggctgtccagcagcacagagttactgctatcccagaatgaatactggtaagcaagaagagccggtccagagtaaattatgggccggtctactatttcatttgatatgacttaatcttttctccgacggtcttcattggttgcgactaggttttggcacaatgatttttcgcacgaagcgtgcacagtgagtggataggcataaattttacaataagtcgtcaagcacgtgatcgaaggtcgagcccaatcacacgctttctacgtgacgcacagtaggagaatatttgcaaaaataagtctaatctcagttccaactgctacagttaaggacgacgaagctgttggtcagcggtttggcgaatctgacgaatggtttggtccagtcgaaattgaaatccggcgggtcaaaacggcgaacctgctgaacaggctcaagagatcgtgcttaaatacgcgttctcaaaacttgctaatcgtgttgggtttctggggttgcaaccccagtgtcgtgacctaaagtgtcggatttgacctattttattggttaccgaaaacgtaaatgatctattccaaaataataactgacatggagaagttcttgtaacttaagacggagatcctccagcgaatggtgaccgagattcgaatctaccaccccaatgccggcatcagcgcagcaacgaaagcttctacaagaggagcacagccaaacggagtaattagtaagaaggcgaagcaaggctgagaaacactagcaagtactgataaaatattgtctatcatttctaaagtatctgaactcatgttgaagtctcccatgttcaaccggagtcatggaagacttggcacttcgtcacagtatagctcgtagcgccctacgaaagatctatcacttgtcatttggcgagatgcctcgcaagcgcaaaaaaaaaaacaaaaaaccacagcaacaactacacagtatgtgtaccagtgcctcagtcgcaagttgaatcaagtctgtggtctggatttcctgcgcaaagagctctagcgaacgaccatcgttctccgccaggtggggctcattggatggaaggtcgggggaatgtatatcctccgcagccttgaccagggcaaaccgcttcccgaactcaacgcaatgtttttctaccgatgctgtgctgcttccctgggctcgactgagaaacgagatcggtacaagacgaaccccaaataccccgacctccacaagactttcttaatgtactgggaacttcgacaacagcttcgagcccacgtggcaccgtcgctggggtattgcggtgccatgataaacgaaatgatcacgaaaatggcggttaatactgccaacatgttggctcgacacttccgtcggcgactgtaccaatacgttagattacggtacgcgaaagaaggaaagattcagctgagcttctacaaaaccaagaaacttattgatagctgctatcgtgtccaagaagttcaggagtttgacacaaatggcaatttaacagctactatgaaaatgtggggtgcttgggataaatggcgaacttcagaagagcgcgagttacgtgagtggctcggtatggcgccttggcattggacaattcgtgagaatctggttactttgtgacgaaggtgtacgacatgctttcgtggatggaggatttgtggagaaacacccaaagacaagaggggctcatctctactcgttactaccacaatcgagctctttcataccatctcacgttacactgaacgcgacgactttgtacgagctcttttgtcgcatttacgataatccggtggcgaaaaaaagtcgtgaatggcgatctgggactggaatgcagaactaaggcagctcgtgctacctggacactaaatcgcgaagttattatccgctagcttttcaacgtaacggagttggagaccagaacccgcaagttcggtaaccgagacacgacggatggctatgcagcttcggtactactcgagcgcgaaatgcctaccacagaacccacagacaccaatacggctccaaggaaaaggaggaagactagcaaaaatcgattaacgaatgttgtggagaaagatgccttggatttggcacgtgacaagttaccggaaggctacacaccagacattttcattgggatcgatcctgacgttagaatactggtcacggctgcgtcgactggatatcttccacagcaacggcaaggccgacagtgcaaacaccgccacagacgtcgtcgctttcgcaaaaaagattcgaggaagtgcattgcgaagaaccaacacggacacggtcagcgagttatcggcgtcagcacagctgagtactatcacctggccaagctcaataagaagcgcgtatgggacctcaacttgaggaagacagaacctgcgtacgttttgatattgaaggaaatgccaagttttaatacttctcagctgacaacattcatggatcgactccagtactttgtgaagcacgtgggctttctcgtctcgtattcgaccaaaacttcgtttcgaaagtggagattcttaaccacaagttcgaagatgcgggcgttgactgcgattaccaagcgacttgttccgatccggagtgcgcaggtctgcatcgcatttggtgattggagctgccaggacggtctctgtggaaaccctagcgctccagtacaggcactcaagaaagaactggaacagcgagcgacagtttgcccatggacgagtttcgcacctgtaagctgtgctccggctgccacaagcacctcctttcagctcggctattgacaaaggtgaaagaccgatagaccgagaagatctcgattgtcttggagacgtcttgtgcttcaagaacagtcgatgcaaggcacacttctggaatcgagacgttaatgcagcgagaaatatactagagttactcaagtgcaggctttcaggcctggggagactggcagctttcgagcggtgactgcgagaccaagatcgtgattggaaagtccatttcttagaaacatgctgcactcgaagggtgtgggctttttgtctggggacatggggagcatccactcacacggtgtggaggcgcacaactgcttcgacacaagaatccgatacaagatagcgattacgtaccacgagttgtatgtagccagcttgtaacttaatggttaaatcatagaccccgaatgtctgcgaattcgacacacctgcactgtaatttgcaaagctgatgtaaaacagcatttaaatggcccagaggcttcctgctgtagtttatgtgcaaatacaagcacattcttcaagggccggatcatggtgatcccgtagaatccgggtagcagccaaacgtgaccctcatgttctccacaaccgatagccttgtcattacaacagtcggtcatctagataaaaacggtaaatatcagccatccctcctgtataaatggttgattgagacctctcgatatatcaagtatactcgatactaatctccctggttctcgaagatctcggaggagcttgagaacgtttggtatatcggtgaaagcatctacagaagacgacaattttgaagacagggcgtttggttcggcacagattaatgaggtacttaagacagggacaaagaatctaaagaaggtcgcggctagcgcaaggctcatgtttacaaaggcatgtgatgaagcagaggaagcttagtacttagaagtaaaattgaaaagtgaattgttttcttgttaactactctattgtagctaagcgtcacacgcaggcacggagagtattgctacgaggcttgaagaggctcagcatacgtattggttgcttcataaaaacagcgcggatgacgttatcaagctgcttaatctgaataaggaaggcgacaacgtgctctgaatctctttgtggagcattggctgcatacataaagaaggtaaacgaccagaacccagacgaagcgatattctctgtgttgaagacacactatgacagtgacgaaatactagcaaagactctcgttggggctaagatggactacagaatggttacaaccgctgcgaaattggagaacatgcaactctcgagatggcggaatgatgatagaaccacggaaactgtcttcaacctgctgcggttaaaccaggaaggaggcgggttattgataagcaggttgctagacacgtagatatcttacgcaactttgatgaaggaagacccgaacaaaatcttgctggtaaaattggcgactcgctaccaagacgagaaatcgctaacgcagatgctaacttccaacgcagaaggatatcaatactcgatcaactgcctataatttattgcaagcacagatggatcagtggaaaatcagtcgcaagacagctgaggaagttgttacgctcctaaaactgactaaagatggcagcaacttcctgaacagccccgtcttgaaagcttgggtatctttggtagagaagttgaaggaggacccgtacgagttaatgttttccaagctgatgaagttttataatgctcataaactggccctacttctacgctggtcatcggtgcttgacataacgggaacaacgagtaagctcgaggagtttcaatgtaaattttggaaggaaagcggcaaaagcgctgatgatattttcgaacgtttgcggctgaatcagaaatctgacggctttttaaacaacccagtgtcgcgtatttgggagatctacgtgagaagattagatgtggaaaccaaataaagaattgttcttgaaattgaaagaaagctacagtgatgaaggactggcaaagatgctcatagctgctaagaaagattccagtacgacctacatcgctgaacgtttggaggacgtacacctccagtactttcaggaaaatggcaagacaacagaagatgttcataaatttcttcgattggacgaggaaggtaaaaacgctcgtgaatccgccgtcttcagcacgtgggcatcttacgtggctaaatccagacaaggcaatgttcttgatcctacagaagaaatacggcaacaaacgtttggcggaaatggctagtcaggcagaggatggcagtactacaaacagcggagtcaggaagagatttggagaagtcaacagatgatagcggatggcgtcttcaatctcctaaagttgaaagaagaaaggaacctacttgtctctccagcttttagcacctggagcccctacgtgacaaaactgaacaactcgaaggaggaaccgaatgacttggcgattatcgtttatttggaaagacccttggcggctttggtctggcgcggatgcttgatagatcgcagcagagccctaaccgacaagtacaagaggatgccgagaagttgcagacgctgcagctcaagcattggatgaatcatcactcggacacgattcgaatgctaaattacggcaacatgttggatgaaacggacacgaggatctctatcgtttataaaaaaaatttccaggctaaaaacaagaagtagcacactcctgttacttggattctacgacgcgaagagcgtcacgatgtacagtcaggagtaagatcacgagattatgcagataccgatcaatataaaaaacgttacatgtacatgatatatttgagacctgacacaaaagctgctaagaggttccgtggcaaacaatacttacaatgtctttcaaatctcagttttgtcctttataccaaaattcactggcgtactgcctaaagagaacacgagttggcagcgcattgacactacaccaactcgcattcgcggcttcatccctttctgaacgtgacattcaagtttaaacttttaaaagtaggatcgcagtgttcattggccattttcgtgtaatagcaacaacaactgacggttgactgacagcaagtagtatgccatcgtcctcaagcgtgacacaattggtccgttttaatattaggtcggctgactagttggtttgcaccaagttaaatatcagatcttcaccgatcaacaaagttttcacagctgtcggcgctatggcccatgcggatttgcatctttgccgagagagcagcatttttggggaaagtgacgcttttcccgtgaacatcaatcttttaatatcaaacgcaacaactagctaaatgcaaaacgactcgctatttcgagcctctccgggccgcccaatcagaactccgcgctatgctgtgtcagggcatcttcacctgcgtccgcttccccgcctagatcggatagcgtagaagccttttcttggatcggtacgtctcttgagcaagcttacgcttctttttagcttcaagccaagctcgatcaaccttttttgagctcgtctgtaccattcaccattctgcagttgtagagggcaatgcgagatatgggcgttcgtaaggcctacgcacaaagatatcgtcataaagccctcgagacaaacgatatttgtcggcgtatttcgccaaagctcattgagccgcccaaagtagttctcaacaatcacacgatcatgcgcagtccggtcattgtttgcttggtctgctcgtctcagatactttccttttttcggtatgataccgcgcaagaagggagcaatgtcttgatatcgtttgtctgctaacagaacccgttcatctggaaatgcttctagaaggggaccgtcgtctggaagactctcattgcctgcaactttctcattttgctgtgatggaatgccgtgttgctcttgaagatcgtgatgtcgtgtgttgccgcaggcacatgctcgccgcaattaattgcgaagccacgaccgatacctccacctttagcccatacagaagatgcttcccgctgcagtgctgccgcctggtcgccagctctgttgaaacgtgacatcttctgcatacatggcactcggaaaatgctcaaatgtgttacccctgttcgtgcgttgcgcattgttgcctcgtcgcaacgatcctgaacttggtcgacgtaaatcttaggagctagaattttgatgaacttcgtaactacgtccatgaaggtagtggtagtcaatcgaaagcgattggcgttggagtcccatgttctcccctctttgagcatcacgagcgtcctgaagaaggcgtcctttggcttaatttcggagtgcttgcctcgaccaacgttgtaattcattcgtacatggtcacgaacagtgagccacagtgcgttgaactctcgtagcgaaaagttagtcatagcgtggatcgcgccagaaccaccaatctcacgaaacgggtccattagaggcgtgtcggtttcatcggtgtcgacttcatgcagtggtgcgttggggaaatgactgaggtcttcctctcggtcaatgcgacgttcttctagctctgaaagtatagattcaacacgatcccgggcagattggcgcgtaccgcgtggttgtgctggcattgctggcttttgactttgttttgtatgtggactcgggaaagactgagaaactcgggaaatgtgctaccttctcgccgggaatctttcgcttacgggagagactagtcaaatcaaaggtgggcttctcttccggacatgatgaatcacaacatgattaagtagggttccccaaacaacaaagtgcatcgccagccattgtgattaccagcgggaccacatgtgttcccgccgggttatcccagttatgccaatttttcagtcaactcgccaagtggcctattgcttctgagttatctggtggctgaagctgcgaccgacaaagcagacttcatacgtaagctttttaacagtaaaataaacaatcggatctccgagcaggaataaaggccatggctgacgccacgcaccggaagttgtgagccgcttacactgtctttgtgttgaatggtactaggcatccaatcaatatattagtgacgactataagcctttcaatacttcaggcatccaaacaatccttgaaggttgctactgtattctcaaaagaagagagcacaagtggagcggctgagcgcaattgacagaagtgtcctgttcataatgtactactgaagctattattaataatactacgtactattgaaacaacagcaataatatacggtaatggcgcatgaatactattattcttcatctcctcaatagcagtaaattagcggttcccgttgaccagtcacttacaaacccaagatattactccctctcacccgccccgccccccccccccccccaatcgtaaaatggaatacatttgcagtcaaatattcctattctggggttcttaactatgaaaaagtcataactgcacagtacatccgaagaaatctagcaaagacttttggtgcatgtggccttgctttcttccaagttcttcgcggagcgtgcgctgcatttctcgcaatccgctcaccgatctatccgatacgccagtcgcacctccacaaactagaagcttcgcgcgacccacatgagatgctctttaatttcttctggctcaaggtcctcctcatttcacgtacgacgctccatatcgtcctcgtccagattttctgcgccgttctcagtgccatctacagccaattcttggtcactaactccaccgaagtcttcatgtgtgggatcttctgcagctgtgttctcgtctggcgggttcagcagctcgtccacggacattgggtccttaacgtgcagacgaggtaacatcgtcgcaagcacagcggacattgcatcgtcttcgtctggatcatcgaagacgcaattgtagtactttaaatgcccggtgtgcttccagcatcttgcgaagagggaaggtgaaaaaaacaaattgtttccactactggatgcggtgcactgttccaaaccaaatgtactcggaatgtgacggggtcacacagcaccttgcgctgaggaagtaggcttccaagagtatacaaacgctaagtgaacgaccgttcatgtgtccctggcctgaggggacgaagtactcacttaagggtacgattaagactgaatgtatttataggtaagcttagcttggtttctaatagaaactataagtcacctatagtaaagctatgtagatatgcaatgattggctcctagagcccctggtaccatgtaccaggcattacaagagtgactggtcactcttcatgtaacttgggtacacttggggtttgtacccagttacatatttccccacttaggttcggtttaccgaccaatcacaaaagggagacagagtcacagactctcattcccgagtcgaaaggggttcgacaagctgcggggacgaggctgtggcccatttcacagttggagcctttgagcaaaaacgcccgtcttctcggttaccacatcatgctcgcgatactgcgaagagcggtgcgaaatcacccgccaaggctgctgcccgaaaggcgcacgccaagagctctaagcgtcatagcaagagctcggcactcaaggaggctactaaggtagcctccgaggcggttgatgcctcgggtgactcgactgcgagcaagcggcaaagctcacgccggagtcggtcgccctcaatgtccccagacgaccgtccgaacccacggttcgcgtgccgtgagcacagtcctggttctgaggacgaggccaaggcccggagcttccgcagtgtgtctgggagctccgtgggatggcacactccagtgcccagcgataacagctttgacagcttgcacttgctcgctagtgatcacgatgatcacgactcaaagacgcctgagcgctctgagagccctgccgacgaggctaagagctcgcccaatgctggcggcgacgagggaggcaaacctccgaagaacctctcgctcaccgagagccttgagcgtgctcaggctactaaagctgcagccactgaggccaagcactctaagaagcgcatggcttctaggtctccactccgcgaggggaaggagaccgatccgtactacacgatcttcgactcctcggacgaagaggaggagggtgccatcaacgagccccgggagatcacaaatgatctcgaccggcagcaggagttgttccaagctgcccggcaaaagcctgggggttcggaggcgacgcctgtcggccagggagcttctatcaacttgagaggttattggcctcccgaggagagctttggagccgacctcttcttggcggagctcaaggctcctcgtgggcttattggtggccacacttctaagggcgcttacgagcgtgccctggtccagaaggaacagttgttcgcggacaacgtggaggcggcccggtgcctgcttctcgcgcagcaccagatacctctgaaggacttcacgacttgtcattagtagcccgagaaccggggtggtctttacccctgggttctacccgagaactgtccgagctggagctcgtgcgaggacatgttctgggcgtgggttgagactctcaagtgctcacccgcggagttacaggaactccgagaagatcggctgctgtccaaaatcctggaccagcgcgatcttcgcattcgatttttccacttggtcagcaagcgacagctgccaagggacaccgagaagcgcgcggcttctagcgctcatgatgagcgcgggtacggagtgtcatcaacgttcataccccgttcgggcaagaagcccggactacttacgaagctgccgccgcttctgttcccagatcgcgacagccttcgggcagtctgcctggagccgttcaatcggctccatgagttctcggagtgggcacaacccctccacttcacacatccacttcgcaaggagctagctcttacctcgaagccgccgctcctggagtacccgctccacgtggtagtggacctctccgttccggggagccactctcgtccgagtgctcaacctgcgggtccgtcgcagggccctgaggttgaccgcctccgtcaacgtgttctcgtgcttgagattgcactaggccttgggactggcggtgatgctgccgcctaggccgggaatcagggcgttctcgctcgacttgcggaacgcctgggtcggttgcagcgagaggtccctgacgtgcatgggcgggtggaccttctcgtccgatcttgacgaggccttccgccagattcgacgtgttgagagtctgcaaccacgtccggagccgcccttggcgcgctcccagccgtacgcctatggtgcgtacccggcgtactcggcgtatgcccctggggtccgttcgtacggggcccctccggcgtacgatcttgattgtggccttgatgtccagcgcgagccttggacgcacgcctctgcgacgacgtctgaggccgctcctcgcttcgaggagctggaccaaggtgggtctgcgagtcagcaaccccctgcggatcatggtaccgcttaagacgtccgacatagaacgtcgggtgcgtcgtcattgactttggtaggtcgatggtgtacgacgcaccatgtctggcaaggactgtaaacggtccgatgaagcgatgcttcaacttgttactgccgacagagctgacagtgtcaagcggtaggtttctagtgtctagtaacacaaattcaccaactttaaacacatttaagtttcctcttccatgtttgtctgagtactccttttgtctgtcctgggccgctgccatggcatcgcggaccctgctgatcacatcagcttggtgtccataaaggactccacttgtttccgcagagaaaccggtctcacatctgagacctgggaggaaaggctttccgagcctctccccacttaaaatagaggacgtggtgtctcctcgaagagtgagggcactctggggtggcggaagccgttcaggtagaacggtaaaccccgtagacgcgtgtaccgcgttgttgagcgcaaactcaacaactgggagctgtgtcgaccacgtatgtggggctccagcgcatacactgcgcagagtgtcttcgagcactcgattgacgcgctccgtctggccgtccgtctgcggatggtcggcagtggacatctgcagacgagttccaagcaatgggaacagcgtcttccagaacgcagcggtgaaccgcgggtctcgatccgagacaatggtctcaggcagacgtgatagcggaacacgccatcgacgaacagccgtgctgtctgttcgcctgtgaccgtaacgggcaccggagcaagatgcaccatcttgctcagccgacacacgaacaccacaatcccggtgttgccgtgtctcggcgggaagtccaaagatgaagtcaagactcatcgacttccaacagtcagcaggtacgggcaggctctgtaagagtgccctgcggtttcacccgctgacacgtttcatgtcttcacatactggcgacccacttgtacatgtggtccaccagaaggcctgagaaaccgacaaaaaggtcttctcacggcccaagtggccactggagggcgcatcgtgcgcctccgcgaggatatcaaactttagatcctcattgttgggtacgaccacccgtgaaggatcactaggctccacccggaaatagaggaggccatccctcaactcatatcggtggagccgggaacgctgccgaggcgaaagccagtcggactttgcgttcgttcctgctgctaggaacctgacgataggcgcaatagcctcatcgtcccgatacgcctcgcgtatccgatcataaagatccgttgtcacccgtgtgatgtgggccaactcatagtccggacgccgcgacagggcgtcggcaagcacg

SEQ ID NO: 245 - DNA, 20894 bp, Phytophthora sp.
  variation 17468..17529: note = n is a, c, g, or t
  source 1..20894: mol_type = other DNA
  variation 18364..18943: note = n is a, c, g, or t
gaaacactgctaccttggaggttaaagggagagtaaaactgtttggttaggggaggtctttgattggctaaaactcgaacaaaacgtgctgcctatgggccgattgcacagccaatcaagtcgcaaagtggttgttaagcacgcatgcgtccgaaaaacgcttcggttgagaacgggccttagacacgacgtctatcttcatcagactcgaacattatggatgatcaaccctaataatccagatattcttgagctcgaacaaaaaaaactatagaaagttagtatatgctcgttccatactccggagtaagtgcacggttttgtctcttacaacccactcaccagccagtttccaagcagcctcggagatcggaactagatgatactgtcggcatgactgctactgactagcgagactaacggcgaatcataacacatacacttgcaataacaaacgaacactcatgctacgttcattttgctttaggatagatccgaccttacgtaccttctcgtttctgccacaatagccgctggtcataggtcgaaacaaagcggtgatagctcaccacttcgtttcttagatctcccactggtatatgcactctgtttacccaagcgacgtcgtcctcatcacacaccatcgttcgtaacacagaaaacggcggaaaagcgactcataaaatgaaatgcgcggcggatactcttgaaaattcaaaaccgtccacgctggcgattgccgtcaacggcaatgaaccaacaccgtcgcacgtttacacgaagtacatctcgcccttcatggattggtgcaagtcgtacatacgcgtgtccgtttccggtgcagtctcactgaagcccgagacagttgaggcagtgtcactaccttccgccaggaagaaccgcgcacggaacgccacgagatgcgaatagtaggccgacggcaccatggagacggagcgagtgcatcgcgcaaacgtgtaacacagtttgtaagtgagcgtctgcaattcatccgccgtaaagccgatctcattcagcagcacgtggtagtgcgtggggcgactggtgccttgcagtccagcgtggctcatcaagtaaaaatcgttctcaatcgggtgacagatagcagtgtcgacaacagttcccgccttgacattgccactgcgatcagcatctctcggagtgtcagggaacagacgggtattgtggcgcttctggacaataacgaacgtgatcgggggtagataaccgacctccagcgtctggcaagcttcacggatggccgtgacttcgtaattcagcaccatgtggaactgtccttcactcactccatcgcgatagaagacaatgcggtccggtttgccacgcgtctggcggtagaactgcttcatcagttccactaccatatctttaaggttcataatctgctcgacacggtggccttgtgcacggatcgccgatgcatgtcggatgaaattcgggtccatagacgccgtaacagcagcgacagaggggcgactcttgtccatgggacttgggtgcgtgacatcggcaccaaagataatggtacgcgacgccgatacacgcggcaatgggccactgataatgccatttttcccacccaacttggtgttcaccttcatcagaatattggcgatatactgagggttgcacttctggatatgcttcgacagcatgcactgtgacagaatacccataccagcttcactgtcggacatcagcttcaactctccataagcgtgtgcatccattctcggattgatcatccagatgatctgcgccggggtcttgaacgtctggttggcagcattcactgcggcctggaacattccacgcactgagtcctctcggcgctgcttcaacaggatcggaggcaatttaggcggacatcgcatgcccaactgacccatctgtgtcatcacagccttgaagaatttctcaatactggcctggttacagtatctcgcgtctgccatactgataacagcccacgacttgagttgagccggcgtattaaactttttgccgcgcatgttccacgctccgtcacgtggagtttcagtagctcgtccactgtactcgatcgtaggcggtggcaactgacgaccggtagtctccaccatacgaggctccacatccagtccaaaggctctgagcgtcgggtccgtgctgaatcctgcctcacggaacttctgctcgatcgagcgcttgcgctgatccggcggcgtgcacgtaaacttgatcatattggccacctggttgtccgtgaccttacgaggacatttctgtcccgccatgatgtggcaaacctccatgggcagataattcttgttctgtggggcgccaacatggagacacggcagcttcggatggcgcagacgcaggttgtacgtcttttggaagtactgcacaatagacatgcgttgtccctcgtcgttctcaaagaacgtttgctctgcgctgttcttggtgagcccgttaacgcggtagctgcgtcgcactcctgggcgatgagtgatgttcactttgactccacgaatggctttactgaacgcagagtgttggtgtttagccagtgaaggtggcaggtttctcaaggacagagactcacagaggaaatccagtacgtccatctcctttacgaaggcggtggctgccaagtccaagttgaccacaagtcgattctgcgtggctctcaagctctggaagtagccgaaccagagctcagctccttctccgagagatttggcgccattgccactgaacaagtttcgtccaactacagtgaatctctgcgatgctgagtgacgcagagccacgtccagcgcttgcagtgcgtcgtacggcgtgtagttcaagcgtccagcaaagagctcgtccagttgctgcatgcggatagccacagggtcggcttccctcacagtggccgagaactccctggctctgcctccatcatcaggtagtgtaagaccactgaactcctggagctggaacggcagccgacgaggagcgtatatgttcttacgggcgtcagagacaaccataaagtctgggaattggcgcttgagctcggctaagagcgcggccatgatcttgttggctagcgtcttaggtgggccgtcgttgccgaagctccggccgctctcggccatcataacgtcgtagtgaaacacgtcgccagccaacttgaagttgaccttgaagtggttagcgtgcagttttacagctcttccagccgtgccgaagcccgggcgaggggggaaatgcgtgtttacgagtggctgcaacaggcgaggctcatccggaatgcgcgctttctcctccagctccagagcgagcgacgagacgctgggggttgcagccgacgctgcagctggcgccggtggcggcgcgacggcgcgtgaggttggcggaggaccaggagcggggacagcagtagcggggccgccgcatccgcggcctctggcgccgccctggccacggcttcgacgcggacggccgataacgggctcggaatcttgctgcttgttgcgccgtcccagcattttgaagaatgagatgcggagcgacagggagggattttccctctcaaaaacggattcgcgctacttcacaagattgcagcttaaaagcttagaactattatactaaattgctgaaggctctgcattatatttcccccctgcaagatactttgggttgacggtgggaaagatctgaaagacaaacgagccgctggtcagaacgcggctgtttgcttttttgttttcagccaggctaatcacttgtagctgatttggcacgactgaagagcttttgtggtgccctggctgcatctttcccaacactgcgtcgggtctgtctgatttttcaatcatcggctgggaacgggataatatctccaatctctaaccggtttctccctagaagaatttctacaagcgaagcagttccgacaagtgtcgacactaagtagttaaaaaagactagattgtctatggtaatatggatacattcatttatacttacttatattaaactaaagacaatcatcatccctccattgacttgcctcctgctccctctaataagcaaatatagggggaaacggacaaaaatcctcagttaatagaggtctttagcagaaccgacaaaaggcaaattgtgtgaactgcagctggttttggagcctaacctccatctccaacccacgatttcaactgtgtaggatgccaggaacccaccaaagcgaggcaaataaactgttcaggttgaaaacatgtgagctgttcctctgctactaaatcacagctataccgttgataaaacggagtcacgtcgttcatttcgggttcaagtccagctacgcaactcatggaggcatcaagtgaggcggtttctgaatgggatgacgctcgaggccacttaattcgacaacagcaggccttcgccgataccaaaagaacgcgtacttgatgcgtgtttggagcgaagcctctcagacaaatcaagttgtgttggctgctacgattgctcagtatttctacgccgagttacctcctcaacatcacttccgcgttccgttcaacttcaacgcactatccagcgctgattgtgtatctaagtttcgttttggcaaagctcaaatcgagtccctcgtgagcctcttcgcgctagatgcgataaggactcgtgaacgcacggcagcgaatggagttgaaggcttgtgtattgtcctgtacaagttggcaatcccgttgcgctggaaagatctcgaatcgttttttgggcgaactgaaagcggtctttcaaacttgtttcttcatgtgttggatcacctggagtccaagtttgcagaccttttatacttcaatcatgaatacgcagcaaaccatgtacaaacgtacgcggatgctgtgttcgatgctggtgggtcaatgcaaaacatgtgggcgtttgtagatggaaccgtacgaggaatttgcaggcctaaagctcgcaacagtcaacgtgatggaaaatatcgaagccagaaatccgtttacaacgggcacaaacgcaaacatgctctaagataccagacactatcaactcctgacgggctcattacccatgtgtatggaccttttcctgggcgaaaccatgatattaagttgttcaaggactcgcgaattgctaacgtcattcgcggtgatgctcggttcaagccctatcgcatctacggtgaccaagcgtatgggaacgattctgtgctttcgagcccattcacaggggctgtggcgaacctttcgcgagaacaaaagttagtcaacaagagcatgagtaaggtgcgcgtgtctgttgaatggggatacggacaagttgtcaattattggactgcactggacttgaaacgacaagcccgctcgggtacccagcctgttggatcgatgtaccgcgtggcgattttgctaactaattgtttgacttgcgccaatggaggcaatacgatcagtgactacttcaggcttccaccaccaagtcttgaggagtacttgaaaggcagttaaattcattgataaacttatgtcttttataggagtttcctacttcttgtcactactattgagtgacttgctgaaaatcgtgacgcattgcaatatcagctgtctgtttcgctcctcagcttcttcacgtgccctgttaaggcgttcctcggtgcgctcacgagatctttctcgctctcgctcaaatgctaggcgattttcgtgttgctctctttcgaatgctagtcgttctgcatgctgctgctgctgctgcaattgcatttgtcgatcaaactgctcgcagcgcatctcagcgtcgagccgaatacgtttctcttgcctgtcaacttccaactgaaaaacactttttcggcgtcctgctggaactttgcctggagttgatattgagctaactgacggagtagacgccaccgaagcagtgccatcgtcgctatctgaagaagcatcgcttgatagtatgttttccccccgacgagctcggcgcgtaatagcgtctgacacaatttgagaagcgcagagattagtttgagcttcttcagcttgcttcttttccttgttcgactgtttttgggccttgaaatccttttctagagacacatactgccctactaggccaggtaaggagtcatagtgactctgttcgttggtagcatttcttgcctcctcgataccactgcctaaagctgcacgaagctcacccgccgaccagtttttcttcaacagtcgcacgcgatcctgtacctgtttatcgactagactaaccttgacagcagcactcacacacttcgcgacttgaacccatactgcagcagcctctccgtatttggcggtgtatggtttctgcttgatagcctcgcgcatgagctccttgtcaatgtcctcagagaaacgaaataccatcgcgcttctttcactaattcgttgaagtaacaatcctaaaatgaacccctgccagatggccacaaatgcttcactcctcggttgtgctaaagataaattcaaacctggtgaagctcaccatctgctgcggttgtgatgcaaacccactaggttctgctaagaacctctaatgaggcctgctaataatagaacgcagctctgattacgggtgtgctcgtttcgagttagacaatttgtcgttcttgtcgccgaaccgatcgaagcgaaaacaagattaacgcgtcctgctgtaggggggaagggctacaatgtgaaatagtagaaatattatacaaagtcgtgctgcgcccgaagaaccactgacatttggtcaatcttgctgtataaaaagatgaaagtagatttttttatagtcctgtctaaaacgaagttgtcttgccggcagaatacaaatgccttcttataaccttcgaatgatgatgtaagttcccggaggatagattatctaactgtctgtcgtccaggtcgactcctattgtattacataatgcgggagaacttgactaggtaaaaaaatacagttgcactcaaataaccaaagcgaatgcttagaggttgtagtgctcgttgttgctattaagcggcacaagagtgctaactcaaacgcatgctgcgtgggctttcgacttctttattttaccctttcgaatacgataacaatagtgctagcaacgctacaatcacggacgcactgagaaaaaaacgattactttttctcagtggcgcatcgacgccaactacgaactactaatgatcctatgtggagggaggctatcgaccgcgggtccactgaggtcgaagtcctctacaatgcggtcgtgacgacaatacattttatttcacacaagctgcagtttcggctaatcattcgaaaattcatatctgttaacacacgaaataacataatgatatttctccatgcagtaacaaggcttacttcatcaagtgctgctgcggtaagtgtaagtaatctccgtttttatttatgtattcttgggcgaccgtttacgtgtttctattatcgcttttgcctcaactcgcctccttttgtagatcttataaaagagcagacaacaccgtatccatactagtcgttggtgaacgaagcgcttgaatgcggtattgatgtagtatatgccattttttcttcacacgacacaggggtcataagagctcttggaactagaatactttggttgccgcgacgttgttaaattccatttttatgtgattacggtatctgttcgtagtaatcgatttcttgctgatttgcgtgtgtgtgtgaagactcttcactgaagggggggggggggcaaaagatattctttgctctgtgcgcgagactcgagcagattacgaacatacgaacatcgtgatagtgcacatttataggaataactagggctgtgcgagggctgggatagccaacagttattaaagaggctaaaggtcgcgaacagctcataccggtaaaggtatatgaaacggcggttaccagcttcagtttttcggcttcagttaccgtcgagcgaattaacctgatttgggctgtcccaagcagcacagagttactgctatcccagaaaatgaatactggtaagcaagaagagccggtccagagtaaattatgggccggtctactatttcatttgatatgacttaatcttttctccgacggtcttcattggttgcgactaggttttggcacaatgatttttcgcacgaagcgtgcacagtgagtggataggcataaattttacaataagtcgtcaagcacgtgatcgaaggtcgagcccaatcacacgctttctacgtgacgcacagtaggagaatatttgcaaaaataagtctaatctcagttccaactgctacagttaaggacgacgaagctgttggtcagcggtttggcgaatctgacgaatggtttggtccagtcgaaattgaaatccggcgggtcaaaacggcgaacctgctgaacaggctcaagagatcgtgcttaaatacgcgttctcaaaacttgctaatcgtgttgggtttctggggttgcaaccccagtgtcgtgacctaaagtgtcggatttgacctattttattggttaccgaaaacgtaaatgatctattccaaaataataactgacatggagaagttcttgtaacttaagacggagatcctccagcgaatggtgaccgagattcgaatctaccaccccaatgccggcatcagcgcagcaacgaaagcttctacaagaggagcacagccaaacggagtaattagtaagaaggcgaagcaaggctgagaaacactagcaagtactgataaaatattgtctatcatttctaaagtatctgaactcatgttgaagtctcccatgttcaaccggagtcatggaagacttggcacttcgtcacagtatagctcgtagcgccctacgaaagatctatcacttgtcatttggcgagatgcctcgcaagcgcaaaaaaaaaaacaaaaaaccacagcaacaactacacagtatgtgtaccagtgcctcagtcgcaagttgaatcaagtctgtggtctggatttcctgcgcaaagagctctagcgaacgaccatcgttctccgccaggtggggctcattggatggaaggtcgggggaatgtatatcctccgcagccttgaccagggcaaaccgcttcccgaactcaacgcaatgtttttctaccgatgctgtgctgcttccctgggctcgactgagaaacgagatcggtacaagacgaaccccaaataccccgacctccacaagactttcttaatgtactgggaacttcgacaacagcttcgagcccacgtggcaccgtcgctggggtattgcggtgccatgataaacgaaatgatcacgaaaatggcggttaatactgccaacatgttggctcgacacttccgtcggcgactgtaccaatacgttagattacggtacgcgaaagaaggaaagattcagctgagcttctacaaaaccaagaaacttattgatagctgctatcgtgtccaagaagttcaggagtttgacacaaatggcaatttaacagctactatgaaaatgtggggtgcttgggataaatggcgaacttcagaagagcgcgagttacgtgagtggctcggtatggcgccttggcattggacaattcgtgagaatctggttactttgtgacgaaggtgtacgacatgctttcgtggatggaggatttgtggagaaacacccaaagacaagaggggctcatctctactcgttactaccacaatcgagctctttcataccatctcacgttacactgaacgcgacgacgacgactttgtacgagccgagctcttttgtcgcatttacgataatccggtggcgaaaaaaagtcgtgaatggcgatctgggactggaatgcagaactaaggcagctcgtgctacctggacactaaatcgcgaagttattatccgctagcttttcaacgtaacggagttggagaccagaacccgcaagttcggtaaccgagacacgacggatggctatgcagcttcggtactactcgagcgcgaaatgcctaccacagaacccacagacaccaatacggctccaaggaaaaggaggaagactagcaaaaatcgattaacgaatgttgtggagaaagatgccttggatttggcacgtgacaagttaccggaaggctacacaccagacattttcattgggatcgatcctgacgttagaatactggtcacggctgcgtcgactggatatcttccacagcaacggcaaggccgacagtgcaaacaccgccacagacgtcgtcgctttcgcaaaaaagattcgaggaagtgcattgcgaagaaccaacacggacacggtcagcgagttatcggcgtcagcacagctgagtactatcacctggccaagctcaataagaagcgcgtatgggacctcaacttgaggaagacagaacctgcgtacgttttgatattgaaggaaatgccaagttttaatacttctcagctgacaacattcatggatcgactccagtactttgtgaagcacgtgggctttctcgtctcgtattcgaccaaaacttcgtttcgaaagtggagattcttaaccacaagttcgaagatgcgggcgttgactgcgattaccaagcgacttgttccgatccggagtgcgcaggtctgcatcgcatttggtgattggagctgccaggacggtctctgtggaaaccctagcgctccagtacaggcactcaagaaagaactggaacagcgagcgacagtttgcccatggacgagtttcgcacctgtaagctgtgctccggctgccacaagcacctcctttcagctcggctattgacaaaggtgaaagaccgatagaccgagaagatctcgattgtcttggagacgtcttgtgcttcaagaacagtcgatgcaaggcacacttctggaatcgagacgttaatgcagcgagaaatatactagagttactcaagtgcaggctttcaggcctggggagactggcagctttcgagcggtgactgcgagaccaagatcgtgattggaaagtccatttcttagaaacatgctgcactcgaagggtgtgggctttttgtctggggacatgggggagcatccactcacacggtgtggaggcgcacaactgcttcgacacaagaatccgatacaagatagcgattacgtaccacgagttgtatgtagccagcttgtaacttaatggttaaatcatagaccccgaatgtctgcgaattcgacacacctgcactgtaatttgcaaagctgatgtaaaacagcatttaaatggcccagaggcttcctgctgtagtttatgtgcaaatacaagcacattcttcaagggccggatcatggtgatcccgtagaatccgggtagcagccaaacgtgaccctcatgttctccacaaccgatagccttgtcattacaacagtcggtcatctagataaaaacggtaaatatcagccatccctcctgtataaatggttgattgagacctctcgatatatcaagtatactcgatactaatctccctggttctcgaagatctcggaggagcttgagaacgtttggtatatcggtgaaagcatctacagaagacgacaattttgaagacagggcgtttggttcggcacagattaatgaggtacttaagacagggacaaagaatctaaagaaggtcgcggctagcgcaaggctcatgtttacaaaggcatgtgatgaagcagaggaagcttagtacttagaagtaaaattgaaaagtgaattgttttcttgttaactactctattgtagctaagcgtcacacggatgaccttgtcgtggtcgtaaacatgtacgtgaacatgtatgacctcgacaagtccgttaacgtaaaagtaaacctcgaggtcaaactaacggagtaatccgttacaggacaaccaaccggcgacagacaagctgttcacgaggtttaaagttaatacggcacaagagaatctctttgcgactaaaagagttcgggaagtggtcgaccggagtggtcaaaaacttcaaaaagaactaagaagcggcggatgttgccgtgatatcaacgctgatgagtcgtttggatgatgatgtgttgttggcaaataatctgatgctggcgaggcgaacgcaggcacggagagtattgctacgaggcttgaagaggctcagcatacgtattggttgcttcataaaaacagcgcggatgacgttatcaagctgcttaatctgaataaggaaggcgacaacgtgctctgaatctctttgtggagcattggctgcatacataaagaaggtaaacgaccagaacccagacgaagcgatattctctgtgttgaagacacactatgacagtgacgaaatactagcaaagactctcgttggggctaagatggactacagaatggttacaaccgctgcgaaattggagaacatgcaactctcgagatggcggaatgatgatagaaccacggaaactgtcttcaacctgctgcggttaaaccaggaaggaggcgggttattgataagcaggttgctagacacgtagatatcttacgcaactttgatgaaggaagacccgaacaaaatcttgctggtaaaattggcgactcgctaccaagacgagaaatcgctaacgcagatgctaacttccaacgcagaaggatatcaatactcgatcaactgcctataatttattgcaagcacagatggatcagtggaaaatcagtcgcaagacagctgaggaagttgttacgctcctaaaactgactaaagatggcagcaacttcctgaacagccccgtcttgaaagcttgggtatctttggtagagaagttgaaggaggacccgtacgagttaatgttttccaagctgatgaagttttataatgctcataaactggccctacttctacgctggtcatcggtgcttgacataacgggaacaacgagtaagctcgaggagtttcaatgtaaattttggaaggaaagcggcaaaagcgctgatgatattttcgaacgtttgcggctgaatcagaaatctgacggctttttaaacaacccagtgtcgcgtatttgggagatctacgtgagaagattagatgtggaaaccaaataaagaattgttcttgaaattgaaagaaagctacagtgatgaaggactggcaaagatgctcatagctgctaagaaagattccagtacgacctacatcgctgaacgtttggaggacgtacacctccagtactttcaggaaaatggcaagacaacagaagatgttcataaatttcttcgattggacgaggaaggtaaaaacgctcgtgaatccgccgtcttcagcacgtgggcatcttacgtggctaaatccagacaaggcaatgttcttgatcctacagaagaaatacggcaacaaacgtttggcggaaatggctagtcaggcagaggatggcagtactacaaacagcggagtcaggaagagatttggagaagtcaacagatgatagcggatggcgtcttcaatctcctaaagttgaaagaagaaaggaacctacttgtctctccagcttttagcacctggagcccctacgtgacaaaactgaacaactcgaaggaggaaccgaatgacttggcgattatcgtttatttggaaagacccttggcggctttggtctggcgcggatgcttgatagatcgcagcagagccctaaccgacaagtacaagaggatgccgagaagttgcagacgctgcagctcaagcattggatgaatcatcactcggacacgattcgaatgctaaattacggcaacatgttggatgaaacggacacgaggatctctatcgtttataaaaaaaatttccaggctaaaaacaagaagtagcacactcctgttacttggattctacgacgcgaagagcgtcacgatgtacagtcaggagtaagatcacgagattatgcagataccgatcaatataaaaaacgttacatgtacatgatatatttgagacctgacacaaaagctgctaagaggttccgtggcaaacaatacttacaatgtctttcaaatctcagttttgtcctttataccaaaattcactggcgtactgcctaaagagaacacgagttggcagcgcattgacactacaccaactcgcattcgcggcttcatccctttctgaacgtgacattcaagtttaaacttttaaaagtaggatcgcagtgttcattggccattttcgtgtaatagcaacaacaactgacggttgactgacagcaagtagtatgccatcgtcctcaagcgtgacacaattggtccgttttaatattaggtcggctgactagttggtttgcaccaagttaaatatcagatcttcaccgatcaacaaagttttcacagctgtcggcgctatggcccatgcggatttgcatctttgccgagagagcagcatttttgggggaaagtgacgcttttcccgtgaacatcaatcttttaatatcaaacgcaacaactagctaaatgcaaaacgactcgctatttcgagcctctccgggccgcccaatcagaactccgcgctatgctgtgtcagggcatcttcacctgcgtccgcttccccgcctagatcggatagcgtagaagccttttcttggatcggtacgtctcttgagcaagcttacgcttcttttttagcttcaagccaagctcgatcaaccttttttgagctcgtctgtaccattcaccattctgcagttgtagagggcaatgcgagatatgggcgttcgtaaggcctacgcacaaagatatcgtcataaagccctcgagacaaacgatatttgtcggcgtatttcgccaaagctcattgagccgcccaaagtagttctcaacaatcacacgatcatgcgcagtccggtcattgtttgcttggtctgctcgtctcagatactttccttttttcggtatgataccgcgcaagaagggagcaatgtcttgatatcgtttgtctgctaacagaacccgttcatctggaaatgcttctagaaggggaccgtcgtctggaagactctcattgcctgcaactttctcattttgctgtgatggaatgccgtgttgctcttgaagatcgtgatgtcgtgtgttgccgcaggcacatgctcgccgcaattaattgcgaagccacgaccgatacctccacctttagcccatacagaagatgcttcccgctgcagtgctgccgcctggtcgccagctctgttgaaacgtgacatcttctgcatacatggcactcggaaaatgctcaaatgtgttaccccctgttcgtgcgttgcgcattgttgcctcgtcgcaacgatcctgaacttggtcgacgtaaatcttaggagctagaattttgatgaacttcgtaactacgtccatgaaggtagtggtagtcaatcgaaagcgattggcgttggagtcccatgttctcccctctttgagcatcacgagcgtcctgaagaaggcgtcctttggcttaatttcggagtgcttgcctcgaccaacgttgtaattcattcgtacatggtcacgaacagtgagccacagtgcgttgaactctcgtagcgaaaagttagtcatagcgtggatcgcgccagaaccaccaatctcacgaaacgggtccattagaggcgtgtcggtttcatcggtgtcgacttcatgcagtggtgcgttggggaaatgactgaggtcttcctctcggtcaatgcgacgttcttctagctctgaaagtatagattcaacacgatcccgggcagattggcgcgtaccgcgtggttgtgctggcattgctggcttttgactttgttttgtatgtggactcgggaaagactgagaaactcgggaaatgtgctaccttctcgccgggaatctttcgcttacgggagagactagtcaaatcaaaggtgggcttctcttccggacatgatgaatcacaacatgattaagtagggttcccccaaacaacaaagtgcatcgccagccattgtgattaccagcgggaccacatgtgttcccgccgggttatcccagttatgccaatttttcagtcaactcgccaagtggcctattgcttctgagttatctggtggctgaagctgcgaccgacaaagcagacttcatacgtaagctttttaacagtaaaataaacaatcggatctccgagcaggaataaaggcccatggctgacgccacgcaccggaagttgtgagccgcttacactgtctttgtgttgaatggtactaggcatccaatcaatatattagtgacgactataagcctttcaatacttcaggcatccaaacaatccttgaaggttgctactgtattctcaaaagaagagagcacaagtggagcggctgagcgcaattgacagaagtgtcctgttcataatgtactactgaagctattattaataatactacgtactattgaaacaacagcaataatatacggtaatggcgcatgaatactattattcttcatctcctcaatagcagtaaattagcggttcccgttgaccagtcacttacaaacccaagatattactccctctcacccgccccccgccggttcttaactatgaaaaagtcataactgcacagtacatccgaagaaatctagcaaagacttttggtgcatgtggccttgctttcttccaagttcttcgcggagcgtgcgctgcatttctcgcaatccgctcaccgatctatccgatacgccagtcgcacctccacaaactagaagcttcgcgcgacccacatgagatgctctttaatttcttctggctcaaggtcctcctcatttcacgtacgacgctccatatcgtcctcgtccagattttctgcgccgttctcagtgccatctacagccaattcttggtcactaactccaccgaagtcttcatgtgtgggatcttctgcagctgtgttctcgtctggcgggttcagcagctcgtccacggacattgggtccttaacgtgcagacgaggtaacatcgtcgcaagcacagcggacattgcatcgtcttcgtctggatcatcgaagacgcaattgtagtactttaaatgcccggtgtgcttcccagcatcttgcgaagaggggaaggtgaaaaaaacaaattgtttccactactggatgcggtgcactgttccaaaccaaatgtactcggaatgtgacggggtcacacagcaccttgcgctgaggaagtaggcttccaagagtatacaaacgctaagtgaacgaccgttcatgtgtccctggcctgaggggacgaagtactcacttaagggtacgattaagactgaatgtatttataggtaagcttagcttggtttctaatagaaactataagtcacctatannnnnnnnnnnnnnnnnnnnnnnnnnnnnnnnnnnnnnnnnnnnnnnnnnnnnnnnnnnnnncattacaagagtgactggtcactccttcatgtaacttgggtacacttggggtttgtacccagttacatatttccccacttaggttcggtttaccgaccaatcacaaaagggagacagagtcacagactctcattccccgagtcgaaaggggttcgacaagctgcggggacgaggctgtggcccatttcacagttggagccttttgagcgaaaacgcccgtcttctcggttaccacatcatgcctcgcgatactgccaagagcggtgcgaaatcacccgccaaggctgctgcccgaaaggcgcacgccaagagctctaagcgtcatagcaagagctcggcactcaaggaggctactaaggtagcctccgaggcggttgagttgatgtgactcgactgcgagcaagcggcaaagctcacgccggagtcggtcgccctcaatgtccccagacgaccgtccgaacccacggttcgcgtgccgtgagcacagtcctggttctgaggacgaggccaaggcccggagcttccgcagctgggaggggatggcacactccagtgcccagcgataacagctttgacagcttgcacttgctcgctagtgatcacgatgatcacgactcaaagacgcctgagcgctctgagagccctgccgacgaggctaagagctcgcccaatgctggcggcgacgagggaggcaaacctccgaagaacctctcgctcaccgagagccttgagcgtgctcaggctactaaagctgcagccactgaggccaagcactctaagaagcgcatggcttctaggtctccactccgcgaggggaaggagaccgatccgtacnnnnnnnnnnnnnnnnnnnnnnnnnnnnnnnnnnnnnnnnnnnnnnnnnnnnnnnnnnnnnnnnnnnnnnnnnnnnnnnnnnnnnnnnnnnnnnnnnnnnnnnnnnnnnnnnnnnnnnnnnnnnnnnnnnnnnnnnnnnnnnnnnnnnnnnnnnnnnnnnnnnnnnnnnnnnnnnnnnnnnnnnnnnnnnnnnnnnnnnnnnnnnnnnnnnnnnnnnnnnnnnnnnnnnnnnnnnnnnnnnnnnnnnnnnnnnnnnnnnnnnnnnnnnnnnnnnnnnnnnnnnnnnnnnnnnnnnnnnnnnnnnnnnnnnnnnnnnnnnnnnnnnnnnnnnnnnnnnnnnnnnnnnnnnnnnnnnnnnnnnnnnnnnnnnnnnnnnnnnnnnnnnnnnnnnnnnnnnnnnnnnnnnnnnnnnnnnnnnnnnnnnnnnnnnnnnnnnnnnnnnnnnnnnnnnnnnnnnnnnnnnnnnnnnnnnnnnnnnnnnnnnnnnnnnnnnnnnnnnnnnnnnnnnnnnnnnnnnnnnnnnnnnnnnnnnnnnnnnnnnnnnnnnnnnnnnnnnnnnnnnnnnnnnnnnnnnnnnnnncgaggacatgttctgggcgtgggttgagactctcaagtactcacccacggagttacaggaactccgagaagatcggctgctgtccaaaatcctggaccagcgcgatcttcgcattcgatttttccacttggtcagcaagcgacagctgccaagggacaccgagaagcgcgcggcttctagcgctcatgatgagcgcgggtacggagtgtcatcaacgttcataccccgttcgggcaagaagccccggactacttacgaagctgccgccgcttctgttcccagatcgcgacagccttcgggcagtctgcctggagccgttcaatcggctcccacgagttctcggagtgggaataacccctccacaaggagctagctcttacctcgaagccgccgctcctggagtacccgctccacgtggtagtggacctctccgttccggggagccactctcgtccgagtgctcaacctgcgggtccgtcgcagggccctgaggttgaccgcctccgtcaacgtgttctcgtgcttgagattgcactaggccttgggactggcggtgatgctgccgcctaggccgggaatcagggcgttctcgctcgacttgcggaacgcctgggtcggttgcagcgagaggtccctgacgtgcatgggcgggtggaccttctcgtccgatcttgacgaggccttccgccagattcgacgtgttgagagtcttcaaccacgtccggagccgcccttggcgcgctcccagccgtacgcgtatggtgcgtacccggcttactcggcgtatacgcctggggttcgttcgtacggggccccttcggcgtacgattttgatcgcggccatgctgtccagcgcgaggcttggacacacgcctctgtgccgacgtctgaggccgctcctcgcttcgaggagctggaccaaggtgggtctgcgagtcagcaaccccctgcggatcatggtaccgctaacgacgtccgacataaaacgtcgggtgcgtcgtcattgactttggtaggtcgatggtgtacgacgcaccatgtctggcaaggactgtaaacggtccgatgaagcgatgcttcaacttgttactgccgacagagctgacagtgtcaagcggtaggtttctagtgtctagtaacacaaattcaccaactttaaacacatttaagtttcctcttccatgtttgtctgagtactccttttgtctgtcctgggccgctgccatggcatcgcggaccctgctgatcacaatcagcttggtgtccataaaggactccacttgtttccgcagtgaaaccggtctcacatctgagacctgggaggaaaggactttccgagcctctcccccacttaaaatagaggacgtggagtctcctcgaagagtgagcggcactctggggtgcgtccgtctgcggatggtcggcagtggacatctgcagacgagttccaagcaatgggaacagcgtcttccagaacgcagcggtgaaccgcgggtctcgatccgagacaatggtctcaggcagaccgtgatagcggaacacgccatcgacgaacagccgtgctgtctgttcgcctgtgaccgtaacgggcaccggagcaagatgcaccatcttgctcagccgacacacgaacaccacaatcccggtgttgccgtgtctgtcggcgggaagtccaaagatgaagtcaagactcatcgacttccaacagtcagcaggtacgggcaggctctgtaacggagccgaagcgtgccctgcgggtttcacccgctgacatgtttcgcatgtcttcacatacttggcgacccacttgtacatgtgggtccaccagaaggcctgagaaaccgacaaaaaggtcttctcacggcccaagtggccactggagggcgcatcgtgcgcctccgcgaggatatcaaactttagatcctcgttgttgggtacgaccacccgtgaa

SEQ ID NO: 246 - DNA, 11963 bp, unidentified
  misc_feature 1..11963: note = Fanzor polypeptide
  source 1..11963: mol_type = other DNA
acaaagtcgtgctgcgcccgaagaaccactgaaatttggtcaatcttgctgtataaaaagatgaaagtagatttttttatagtcctgtctaaaacgaagttgtcttgccggcagaacacaaatgccttcttataaccttcgaatgatgatgtaagttcccggaggatagattatctaactgtctgtcgtccaggtcgagtcctattgtattacataatgcgggagaacttgactaggtaaaaaaaatacagttgcactcaaataaccaaagcgaatgcttagaggttgtagtgctcgttgttgctattaagcggcacaagagtgctaactcaaacgcatgctgcgtgagctttcgacttctttattttaccctttcgaatacgataacaatagtgctagcaacgctacgatcacggacgcactgagaaaaaacgattactttttctcagtggcgcatcgacgccaactacgaactactaatgatcctatgtggagggaggctatcgaccgcgggtccactgaggtcgaagtcctctacgatgcggtcgtgacgacaatacattttatttcacacaagctgcagtttcggctaatcattcgaaaattcatatctgttaacacacgaaataacataatgatatttctccatgcagtaacaaggcttacttcatcaagtgctgctgcggtaagtgtaagtaatctccgtttttatttatgtattcttgggcgaccgtttacgtgtttctattatcgcttttgcctcaactcgcctccttttgtagatcttataaaagagcagacaacaccgtatccatactagtcgttggtgaacgaagcgcttgaatgcggtattgatgtagtatatgccattttttcttcacacgacacaggggtcataagagctcttggaactagaatactttggttgccgcgacgttgttaaattccatttttatgtgattacggtatctgttcgtagtaatcgatttcttcactgaagggggggggcaaaagatatacttactgcgctttgtgcgtgagactcgagcagattacgaacatcgtgatagtgcacatttataggaataactagggctgtgcgagggctgggatagccaacagttattaaagaggctaaaggtcgcgaacagctcataccggtaaaggtatatgaaacggcggttaccggcttcagtttttcggcttcagttaccgtcgagcgaattaacctgatttgggctgtcccagcagcacagagttactgctatcccagaatgaatactggtaagcaagaagagccggtccagagtaaattatgggccggtctactatttcatttgatatgacttaatcttttctccgacggtcttcattggttgcgactaggttttggcacaatgatttttcgcacgaagcgtgcacagtgagtggataggcataaattttacaataagtcgtcaagcacgtgatcgaaggtcgagcccaatcacacgctttctacgtgacgcacagtaggagaatatttgcaaaaataagtctaatctcagttccaactgctacagttaaggacgacgaagctgttggtcagcggtttggcgaatctgacgaatggtttggtcctgtcgaaattgaaatccggcgggtcaaaacggcgaacctgctgaacaggctcaagagatcgtgcttaaatacgcgttctcaaaacttgctaatcgtgttgggtttctggggttgcaaccccagtgtcgtgacctaaagtgtcggatttgacctattttattggttaccgaaaacgtaaatgatctattccaaaataataactgacatggagaagttcttgtaacttaagacggagatcctccagcgaatggtgaccgagattcgaatctaccaccccaatgctggcatcagcgcagcaacgaaagcttctacaagaggagcacagccaaacggagtaattagtaagaaggcgaagcaaggctgagaaacactagcaagtactgataaaatattgtctatcatttctaaagtatctgaactcatgttgaagtctcccatgttcaaccggagtcatggaagacttggcacttcgtcacagtatagctcgtagcgccctacgaaagatctatcacttgtcatttggcgagatgcctcgcaagcgcaaaaaaaaaacaaaaaaccacagcaacaactacacagtatgtgtaccagtgcctcagtcgcaagttgaatcaagtctgtggtctggatttcctgcgcaaagagctctagcgaacgaccatcgttctccgccaggtggggctcattggatggaaggtcgggggaatgtatatcctccgcagccttgatcagggcaaaccgcttcccgaactcaacgcaatgtttttctaccgatgctgcgctgcttccctgggctcgactgagaaacgagatcggtacaagacgaaccccaaataccccgacctcaacaagactttcttaatgtactgggaacttcgacaacagcttcgagcccacgtggcaccgtcgctggggtattgcggtgccatgataaacgaaatgatcacgaaaatggcggttaatactgccaacatgttggctcgacacttccgtcggcgactgtaccaatacgttagattacggtacgcgaaagaaggaaagattcagctgagcttcaacaaaaccaagaaacttattgatagctgctatcgtgtccaagaagttcaggagtttgacacaaatggcaatttaacagctactatgaaaatgtggggtgcttgggataaatggcgaacttcagaagagcgcgagttacgtgagtggctcggtatggcgccttggcattggacaattcgtgagaatctaggttactttgtgacgaaggtgtacgacatgctttcgtggatggaggatttgtggagaaacacccaaagacaagaggggctcatctctactcgttactaccacaatcgagctctttcataccatctcacgttacattgaacgcgacgactttgtacgagctcttttgtcgcatttacgataatccggtggcgaaaaaaagtcgtgaatggcgatctgggactggaatgcagaactaaggcagctcgtgctacctggacactaaatcgcgaagttattatccgctagcttttcaacgtaacggagttggagaccagaacccgcaagttcggtaaccgagacacgacggatggctatgcagcttcggtactactcgagcgcgaaatgcctaccacagaacccacagacaccaatacggctccaaggaaaaggaggaagactagcaaaaatcgattaacgaatgttgtggagaaagatgccttggatttggcacgtgacaagttaccggaaggctacacaccagacattttcattgggatcgatcctgacgttagaatactggtcacggctgcgtcgactggatatcttccacagcaacggcaaggccgacagtgcaaacaccgccacagacgtcgtcgctttcgcaaaaaagattcgaggaagtgcattgcgaagaaccaacacggacacggtcagcgagttatcggcgtcagcacagctgagtactatcacctggccaagctcaataagaagcgcgtatgggacctcaacttgaggaagacagaacctgcgtacgttttgatattgaaggaaatgccaagttttaatacttctcagctgacaacattcatggatcgactccagtactttgtgaagcacgtgggctttctcgtctcgtattcgaccaaaacttcgtttcgaaagtggagattcttaaccacaagttcgaagatgcgggcgttgactgcgattaccaagcgacttgttccgatccggagtgcgcaggtctgcatcgcatttggtgattggagctgccaggacggtctctgtggaaaccctagcgctccagtacaggcactcaagaaagaactggaacagcgagcgacagtttgcccatggacgagtttcgcacctgtaagctgtgctccggctgccacaagcacctcctttcagctcggctattgacaaaggtgaaagaccgatagaccgagaagacctcgattgtcttggagacgtcttgtgctgcaagaacagtcgatgcaaggcacacttctggaatcgagacgttaatgcagcgagaaatatactagagttactcaagtgcaggctttcaggcctggggagactggcagctttcgagcggtgactgcgagaccaagatcgtgattggaaagtccatttcttagaaacatgctgcacttgaagggtgtgggctttttgtctggggacatgggggagcatccactcacacggtgtggaggcgcacaactgcttcgacacaagaatccgatacaagatagcgattacgtaccacgagtagtatgtagccagcttgtaacttaatggttaaatcatagaccccgaatgtctgcgaattcgacacacctgcactgtaatttgcaaagctgatgtaaaacagcatttaaatggcccagaggcttcctgctgtagtttatgtgcaaatacaagcacattcctcaagggccggatcatggtgatcccgtagaatccgggtagcagccaaacgtgaccctcatgttctccacaaccgatagccttgtcattacaacagtcggtcatctagataaaaacggtaaatatcagccatccctcctgtataaatggttgattgagacctctcgatatatcaagtatactcgatactaatctccctggttctcgaagatctcggaggagcttgagaacgtttggtatatcggtgaaagcaactacagaagacgacaattttgaagacagggcgtttggttcggcacagattaatgaggtacttaagacagggacaaagaatctaaagaaggtcgcggctagcgcaaggctcatgtttacaaaggcatgtgatgaagcagaggaagcttagtacttagaagtaaaattgaaaagtgaattgttttcttgttaactactctattgtagctaagcgtcacacggatgaccttgtcgtggtcgtaaacatgtacgtgaacatgtatgacctcgacaagtccgttaacgtaaaagtaaacctcgaggtcaaactaacggagtaatccgttacaggacaaccaaccggcgacagacaagctgttcacgaggtttaaagttaatacggcacaagagaatctctttgcgactaaaagagttcgggaagtggtcgaccggagtggtcaaaaacttcaaaaagaactaagaagcggcggatgttgccgtgatatcaacgctgatgagtcgtttggatgatgatgtgttgttggcaaataatctgatgctggcgaggcgaacgcaggcacggagagtattgctacgaggcttgaagaggctcagcatacgtattggttgcttcataaaaacagcgcggatgacgttatcaagctccttaatctgaataaggaaggcgacaacgtgctctgaatctctttgtggagcattggctgcatacataaagaaggtaaatgaccagaacccagacgaagcgatattctctgtgttgaagacacactatgacagtgacgaaatactagcaaagactctcgttggggctaagatggactacagaatggttacaaccgctgcgaaattggagaacatgcaactctcgagatggcggtatgatgatagaaccacggaaactgtcttcaacctgctgcggttaaaccaggaaggaggcgggttattgataagcaggttgctagacacgtagatatcttacgcaactttgatgaaggaagacccgaacaaaatcttgctggtaaaattggcgactcgctaccaagacgagaaatcgctaacgcagatgctaacttccaacgcagaaggatatcaatactcgatcaactgcctataatttattgcaagcacagatggagcagtggaaaatcagtcgcaagacagctgaggaagttgttacgctcctaaaactgactgaagatggcagcaacttcctgaacagccccgtcttgaaagcttgggtatctttggtagagaagttgaaggaggacccgtacgagttaatgttttccaagctgatgaagttttataatgctcataaactggccctacttctacgctggtcatcggtgcttgacataacgggaacaacgagtaagctcgaggagtttcaatgtaaattttggaaggaaagcggcaaaagcgctgatgatattttcgaacgtttgcggctgaatcagaaatctgacggctttttaaacaacccagtgtcgcgtatttgggagatctacgtgagaagattagatgtggaaaccaaataaagaattgttcttgaaattgaaagaaagctacagtgatgaaggactggcaaagatgctcatagctgctaagaaagattccagtacgacctacatcgctgaacgtttggaggacgtacacctccagtactttcaggaaaatggcaagacaacagaagatgttcataaatttcttcgattggacgaggaaggtaaaaacgctcgtgaatccgccgtcttcagcacgtgggcatcttacgtggctaaatccagacaaggcaatgttcttgatcctacagaagaaatacggcaacaaacgtttggcggaaatggctagtcaggcagaggatggcagtactacaaacagcggagtcaggaagagatttggagaagtcaacagatgatagcggatggcgtcttcaatctcctaaagttgaaagaagaaaggaacctacttgtctctccagcttttagcacctggagctcctacgtgacaaaactgaacagctcgaaggaggaaccgaatgacttggcgattatcgtttatttggaaagaccctttggcggctttggtctggcgcggatgcttgatagatcgcagcagagccctaaccgacaagtacaagaggatgccgagaagttgcagacgctgcagctcaagcattggatgaatcatcactcggacacgattcgaatgctaaattacggcaacatgttggatgaaacggacacgaggatctctatcgtttataaaaaattcttccaggctaaaaacaagaagtagcacactcctgttacttggattctacgacgcgaagagcgtcacgatgtacagtcaggagtaagatcacgagattatgcagataccgatcaatataaaaaacgttacatgcacatgatatatttgagacctgacacaaaagctgctaagaggttccgtggcaaacaatacttacaatgtctttcaaatctcagttttgtcctttataccaaaattcactggcgtactgcctaaagagaacacgagttggcagcgcattgacactacaccaactcgcattcgcggcttcatccctttctgaacgtgacattcaagtttaaacttttaaaagtaggatcgcagtgttcattgcgccattttcgtgtaatagcaacaacaactgacggttgattgacagcaagtagtatgccatcgtcctcaagcgtgacacaattggtccgttttaatattaggtcggctgactagttggtttgcaccaagttaaatatcatatcttcaccgatcaacaaagttttcacagctgtcggcgctatggcccatgcggatttgcatctttgccgagagagcagcatttttgggggaaagtgacgcttttcccgtgaacatcaatcttttaatatcaaacgcaacaactagctaaatgcaaaacgactcgctatttcgagcctctccgggccgcccaatcagaactccgcgctatgctgtgtcagggcatcttcacctgcgtccgcttccccgcctagatcggatagcgtagaagccttttcttggatcggtacgtctcttgagcaagcttacgcttcttttttagcttcaagccaagctcgatcaaccttttttgagctcgtctgtaccattcaccattctgcagttgtagagggcaatgcgagatatgggcgttcgtaaggcctacgcacaaagatatcgtcataaagccctcgagacaaacgatatttgtcggcgtatttcgccaaagctcattgagccgcccaaagtagttctcaacaatcacacgatcatgcgcagtccggtcattgtttgcttggtctgctcgtctcagatactttccttttttcggtatgataccgcgcaagaagggagcaatgtcttgatatcgtttgtctgctaacagaacccgttcatctggaaatgcttctagaaggggaccgtcgtctggaagactctcattgcctgcaactttctcattttgctgtgatggaatgccgtgttgctcttgaagatcgtgatgtcgtgtgttgccgcaggcacatgctcgccgcaattaattgcgaagccacgaccgatacctccacctttagcccatacagaagatgcttcccgctgcagtgctgccgcctggtcgccagctctgttgaaacgtgacatcttctgcatacatggcactcggaaaatgctcaaatgtgttaccccctgttcgtgcgttgcgcattgttgcctcgtcgcaacgatcctgaacttggtcgacgtaaatcttaggagctagaattttgatgaacttcgtaactacgtccatgaaggtagtggtagtcaatcgaaagcgattggcgttggagtcccatgttctcccctctttgagcatcacgagcgtcctgaagaaggcgtcctttggcttaatttcggagtgcttgcctcgaccaacgttgtaattcattcgtacatggtcacgaacagtgagccacagtgcgttgaactctcgtagcgaaaagttagtcatagcgtggatcgcgccagaaccaccaatctcacgaaacgggtccattagaggcgtgtcggtttcatcggtgtcgacttcatgcagtggtgcgttggggaaatgactgaggtcttcctctcggtcaatgcgacgttcttctagctctgaaagtatagattcaacacgatcccgggcagattggcgcgtaccgcgtggttgcgctggcattgctggcttttgactttgttttgtatgtggactcgggaaagactgagaaactcgggaaatgtgctaccttctcgccgggaatctttcgcttacgggagagactagtcaaatcaaaggtgggcttctcttccgtacaagatgaatcacaacatgattaagtagggttcccccaaacaacaaagtgcatcgccagccattgtgattaccagcgggaccacatgtgttcccgccgggttatcccagttatgccaatttttcagtcaactcgccaagtggcctattgcttctgagttatctggtggctgaagctgcgaccgacaaagcagacttcatacgtaagctttttaacagtaaaataaacaatcggatctccgagcaggaataaaggcccatggctgacgccacgcaccggaagttgtgagccgcttacactgtctttgtgttgaatggtactaggcatccaatcaatatattagtgacgactataagcctttcaatacttcaggcatccaaacaatccttgaaggttgctactgtattctcaaaagaagagagcacaagtggagcggctgagcgcaattgacagaagtgtcctgttcataatgtactactgaagctattattaataatactacgtactattgaaacaacagcaataatatacggtaatggcgcatgaatactattattcttcatctcctcaatagcagtaaattagcggttcccgttgaccagtcacttacaaacccaagatattactccctctcacccctcaatcgtaaaatggaatacatttgcagtcaaatattcctattctggggttcttaactatgaaaaagtcataactgcacagtacatccgaagaaatctagcaaagacttttggtgcatgtggccttgctttcttccaagttcttcgcggagcgtgcgctgcatttctcgcaatccgctcaccgatctatccgatacgccagacgcacctccacaaactagaagcttcgcgacccacatgagatgctctttaattgcttctggctcaaggtcctcctcatttcacgtacgacgctccatatcgtcctcgtccagattttctgcgccgttctcagtgccatctacagccaattcttggtcactaactccaccgaagtcttcatgtgtgggatcttctgcagctgtgttctcgtctggtgggttcagcagctcgtccacggacattgggtccttaacgtgcagacgaggtaacatcgtcgcaagcacagcggacattgcatcgtcttcgtctggatcatcgaagacgcaattgtagtactttaaatgcccggtgtgcttccagcatcttgcgaagagggaaggtgaaaaaaaccaattgtttccactactggatgcggtgcactgttccaaaccaaatgtactcggaatgtgacggggtcacacagcaccttgcgctgaggaagtaggcttccaagagtatacaaacgctaagtgaacgaccgttcatgtgtccctggcctgaggggacgaagtactcacttaagggtacgattaagactgaatgtatttataggtaagcttagcttggtttctaatagaaactataagtcacctatagtaaagctatgtagatatgcaatgattggctcctagagcccctggtaccatgtaccaggtattacaagagtgactggtcactcttcatgtaacttgggtacacctggggtttgtacccagttacatatttccccacttaggttcggtttaccgaccaatcacaaaagggagacagagtcacagactctcattccccgagtcgaaaggggttcgacaagctgcggggacgaggctgtggcccatttcacagttggagccttttgagcgaaaacgcccgtcttctcggtttccacttcgaccacatcatgcctcgcgatactgccaagagcggtgcgaaatcacccgccaaggctgctgcccgaaaggcgcacgccaagagctctaagcgtcatagcaaaagctcggcactcaaggaggctactaaggtagcctccgaggcggttgatgcctcgggtgactcgactgcgagcaagcggcaaagctcacgccgcagtcggtcgccctcaatgtccccagacgaccgtccgaacccacggttcgcgtgccgtgagcacagtcctggttctgaggacgaggccaaggcccacagcttccgcagtgtgtctgggagctccgtgggatggcacactccagtgcccagcgataacagctttgacagcttgcacttgctcgctagtgatcacgatgatcacgactcaaagacgcctgagcgctctgagagccctgccgacgaggctaagagctcgcccaatgctggcggcgacgagggaggcaaacctccgaagaacctctcgctcaccgagagccttgagcgtgctcaggctactaaagctgcagccactgaggccaagcactctaagaagcgcatggcttctaggtctccactccgcgaggggaaggagaccgatccgtactacacgatcttcgactcctcggacgaagaggaggagggtgccatcaacgagccccgggagatcacaaatgatctcgaccggcagcaggaattgttccaagctgcccggcaaaagcctgggggttcggaggcgacgcctgtcggccagggagcttctatcaacttgagaggttattggcctcccgaggagagctttggagccgacctcttcttggcggagctcaaggctcctcgtgggcttattggtggccacacttctaagggcgcttacgagcgtgccctggtccagaaggaacagttgttcgcggacaacgtggaggcggcccggtgcctgcttctcgcgcagcaccagatacctctgaaggacttcacgacttgtcattagtagcccgagaac

SEQ ID NO: 247 - DNA, 20627 bp, Phytophthora sp.
  source 1..20627: mol_type = other DNA
catccacgttcagcttcagcaatttgaaaacatcatcactggtttggccactattcagccaattaaccagctgaagatcttgccatttcacagcatactgtctgaacttgtaatcgcttcttgccgctactattagcttagccagaacttcgtcgctgtaatgagtcttcaatgacttgaacatcaattcagacgccttatctttgttgagttttgttacgtacagtatccaagtgctcacgagcgagtcttcgaatagtttttctcctttctcatgaagtctcagtagcttgaaaacgtcgtctgcactttgttctttgatgtgccaattcgtaagctgagcgttgataaacgtcgttgccgtagcatgcgaaattttcttcgcctcagttagcatcttcgcaacagcgacgtctccgtagtgagccgccagtgacgacaccattgccacttccgccacttcaggcttcttcttcgcagattttgatagagaggttgaccacgctatgaagtggtcggtttgaagaagtgctgcctctgcactggtacctttgatctgctcgaggaatttcttggtggcttttgcgctgctcgatttcaattgcgtaaccagttccgcgattgtagaggaactagtgccaagtcctcggtcgtctgtcgtgacagttctcagacgtcgaatagcttgaaagctcttgttcgggttcgaattcggagagccaatatcggcgttcactgtcgcgttgacagatactgcaaggacattgacttgtgcaacgacagcgacaacactcagcagtacgatgccgtacagacacttgtttgaggtggtcttgatacccatgaaggactgcgaatttggtggagaaatgggaagtgatagaaaacaccagtaagattttgggactctatctccagtaattaccatataaccatcacgtgatcaagatgtacttcacatcacgagatttggatttgcagtcaaatcctactacagtagttgatggcatcaacttgatcaaataaagcatccttccgtggaagccacccagacgtccttgtgatggcctacttagctttccttgcgaattctgtccggaaacattgtgaatgatctacgacgaagtatgcaatggtgctgcttccttacttttaagcacagcgacttcgaaaagaaaaatagttcccactcgtgctgctgtaaggctgctaggaagccttgccatctattaggaagatgatttcgggtacacatatagtttcacctgctacatattatcgaaaattgctccaagcataccaacttcgccaatttaccatcgttttctgtgagattgataagaacacttaaaagttattctttagattcaaaatcgtagcatcgagcatgccgcctcgataatagacagaagagggtagttaattcacattaatagaggatttctgaacaaaccaaatactgtagctagaaaagggtcatatatacagtttttattaagcaattgaccagtcgaaagccagtgggcaatcttcccggttatatgtcttctgacagtctgagcttgtttcccgtgaccaggctcttcgctgcgtgtcttaggcccgttctcaaccgaggcgtcagagggacgcatgcgttgcatgcgtaccctaaacatcgcaattcaaaatacttgactatcattggcagaataatagctagtcatgttgtgttctagcagttctagcctggcgctaaaccgctaccaaactactggtaattaacgagcgcggcgatggaaaaccaggatcccctcctaggagagaagaatattcccatcgtctcaggagcctcctcagcagatgcatgcacttccccaggttcagcaaactgtcgctccctcggtgggttctgattctttgcattggaagttctctccacccgtagcgaggaatctcgctgacgagctcggacgtctttcgccaccgtcgccacctctaccgatcttattcgaggctgaagtacgccatgcctttcgtggtggggttgaatgccacgaaaagggctatggtcaaagcacacagattgagcgacatggcggggacgtcctgctggtaaaagtggtttaatcgcggaggggcatcttgtgtgggagccgtacgaaaaaatcggtggacctcaggctgcggcgttggcgcgcagcagggatgcatcgtctctctcgctcaggtccacttggagatctttggggatacagagccattgttgttgcgatctttactgtaaaacactgctaccttggaggttaaagggagagtaaaactgtttggttagggaggtcattgattggctaaaactcgaacaaaacgtgctgcctatgggccgattgcacagccaatcaagtcgcaaagtggttgttaagcacgcatgcgtccgaaaaacgcttcggttgagaacgggccttagacacgacgtctatcttcatcagactcgaacattatggatgatcaaccctaataatccagatattcttgagctcgaacaaaaaaactatagaaagttagtatatgctcgttccatactccggagtaagtgcacggttttgtctcttacaacccactcaccagccagtttccaagcagcctcgaagatcggaactagatgatactgtcggcatgactgctactgactagcgagactaacggcgaatcataacacatacacttgcaataacaaacgaacactcatgctacgttcattttgctttaggatagatccgaccttacgtaccttctcgtttctgccacaatagccgctggtcataggtcgaaacaaagcggtcatagctcaccacttcgtttcttagatctcccactggtatatgcactctgtttacccaagcgacgtcgtcctcatcacacaccatcgttcgtaacacagaaaacggcggaaaagcgactcataaaatgaaatgcgcggcggatactcttgaaaattcaaccgtccacgctggcgattgccgtcaacggcaatgaaccaacaccgtcgcacgtttacacgaagtacatctcgcccttcatggattggtgcaagtcgtacatacgcgtgtccgtttccggtgcagtctcactgaagcccgagacagttgaggcagtgtcactaccttccgccaggaagaaccgcgcacggaacgccacgagatgcgaatagtaggccgacggcaccatggagacggagcgagtgcatcgcgcaaacgtgtaacacagtttgtaagtgagcgtctgcaattcatccgccgtaaagccgatctcattcagcagcacgtggtagtgcgtggggcgactggtgccttgcagtccagcgtggctcatcaagtaaaaatcgttctcaatcgggtgacagatagcagtgtcgacaacagttcccgccttgacattgccactgcgatcagcatctctcggagtgtcagggaacagacgggtattgtggcgcttctggacaataacgaacgtgatcgggggtagataaccgacctccagcgtctggcaagcttcacggatggccgtgacttcgtaattcagcaccatgtggaactgtccttcactcactccatcgcgatagaagacaatgcggtccggtttgccacgcgtctggcggtagaactgcttcatcagttccactaccatatctttaaggttcataatctgctcgacacggtggccttgtgcacggatcgccgatgcatgtcggatgaaattcgggtccatagacgccgtaacagcagcgacagaggggcgactcttgtccatgggacttgggtgcgtgacatcggcaccaaagataatggtacgcgacgccgatacacgcggcaatgggccactgataatgccattcttcccacccaacttggtgttcaccttcatcagaatattggcgatatactgagggttgcacttctggatatgcttcgacagcatgcactgtgacagaatacccataccagcttcactgtcggacatcagcttcaactctccataagcgtgtgcatccatcctcgggttgatcatccagatgatctgcgccggggtcttgaacgtctggttggcagcattcactgcggcctggaacattccacgcactgagtcctctcgacgctgcttcaacaggatcggaggcagtttaggcggacatcgcatgcccaactgacccatctgtgtcatcacagccttgaagaatttctcaatactggcctggttacagtatctcgcgtctgccatactgataacagcccacgacttgagttgagccggcgtattaaactttttgccgcgcatgttccacgctccgtcacgtggagtttccgtagctcgcccactgtactcgatcgtaggcggtggcaactgacgaccggtagtctccaccatacgaggctccacatccagtccaaaggctctaagcgtcgggtccgtgctgaatcctgcctcacggaacttctgctcgatcgagcgcttgcgctgatccggcggcgtgcacgtaaacttgatcatattagccacctggttgtccgtgaccttacgaggacatttctgtcccgccatgatgtggcaaacctccatgggcagataattcttgttctgtggggcgccaacatggagacacggcagcttcggatggcgcagacgcaggttgtacgtcttttggaagtactgcacaatagacatgcgttgtccctcgtcgttctcaaagaacgtttgctctgcgctgttcttggtgagcccgttaacgcggtagctgcgtcgcactcctgggcgatgagtgatgttcactttgactccacgaatggctttactgaacgcagagtgttggtgtttagccagtgaaggtggcaggtttctcaaggacagagactcacagaggaaatccagtacgtccatctcctttacgaaggcggtggctgccaagtccaagttgaccacaagtcgattctgcgtggctctcaagctctggaagtagccgaaccagagctcagctccttctccgagagatttggcgccgttgccactgaacaagtttcgtccaactacagtgaatctctgcgatgctgagtgacgcagagccacgtccagcgcttgtagtgcgtcgtacggcgtgtagttcaagcgtccagcaaagagctcgtccagttgctgcatgcggatagccacagggtcggcttccctcacagtggctgagaactccctggctctgcctccatcatcaggtagtgtaagaccactgaactcctggagctggaacggcagccgacgaggagcgtatatgttcttacgggcgtcagagacaaccataaagtctgggaattggcgcttgagctcggctaagagcgcggccatgatcttgttggctagcgtcttaggtgggccgtcgttgccgaagctccggccgctctcggccatcataacgtcgtagtgaaacacgtcgccagccaacttgaagttgaccttgaagtggttagcgtgcagttttacagctcttccagccgtgccgaagcccgggcgagggggaaatgcgtgtttacgagtggctgcaacaggcgaggctcatccggaatgcgcgctttctcctccagctccagagcgagcgacgagacgctgggggttgcagccgacgctgcagctggcgccggtggcggcgcgacggcgcgtgaggttggcggaggaccaggagcgggggcagcagtagcggggccgccgcgtccgcggcctctggcgccgccctggccacggcttcgacgcggacggccgataacgggctcggaatcttgctgcttgttgcgccgtcccggcattttgaagaatgagatgcggagcgacagggagggattttccctctcaaaacggattcgcgctacttcacaagattgcagcttaaaagcttagaactattatactaaattgctgaaggctctgcattatatttccccctgcaagatactttgggttgacggtgggaaagatctgaaagacaaacgagccgctggtcagaacgcggctgtttgcttttttgttttcagccaggctaatcacttgtagctgatttggcacaactgaagagcttttgtggtgccctggatgcatctttcccaacactgcgtcgggtctgtctgatttttcaatcatcggctgggaacgggataatatctccaatctctaaccggtttctccctagaagaatttctacaagcgaagcagttccgacaagtgtcgacactaagtagttaaaaagactagattgtctatggtaatatggatacattcatttatacttacttatattaaactaaagacaatcatcatccctccattgacttgcctcctgctccctctaataagcaaatataggggaaacggacaaaaatcctcagttaatgaggcctgctaataatagaacccagctctgattacgggtgtgctcgtttcgagttagacaatttgtcgttcttgtcgccgaaccgatcgaagcgaaaacaagattaacgcgttctgctgtaggggaagggctacaatgtgaaatagtagaaatattatacaaagtcgtgctgcgcccgaagaaccactgaaatttggtcaatcttgctgtataaaaagatgaaagtagatttttttatagtcctgtctaaaacgaagttgtcttgccggcagaatacaaatgccttcttataaccttcgaatgatgatgtaagttcccggaggatagattatctaactgtctgtcgtccaggtcgagtcctattgtattacataatgcgggagaacttgactaggtaaaaaaatacagttgcactcaaataaccaaagcgaatgcttagaggttgtagtgctcgttgttgctattaagcggcacaagagtgctaactcaaacgcatgctgcgtgagctttcgacttctttattttaccctttcgaatacgataacaatagtgctagcaacgctacgatcacggacgcactgagaaaaacgattactttttctcagtggcgcatcgacgccaactacgaactactaatgatcctatgtggagggaggctatcgaccgagggtccactgaggtcgaagtcctctacgatgcggtcgtgacgacaatacattttatttcacacaagctgcagtttcggctaatcattcgaaaattcatatctgttaacacacgaaataacataatgatatttctccatgcagtaacaaggcttacttcatcaagtgctgctgcggtaagtgtaagtaatctccgtttttatttatgtattcttgggcgaccgtttacgtgtttctattatcgcttttgcctcaactcgcctccttttgtagatcttataaagagcagacaacaccgtatccatactagtcgttggtgaacgaagcgcttgaatgcggtattgatgtagtatatgccatttttttcttcacacgacacaggggtcataagagctcttggaactagaatactttggttgccgcgacgttgttaaattccatttttatgtgattacggtatctgttcgtagtaatcgatttcttgctgatttgcgtgtgtgtgtgtgaagactcttcactgaaggggggcaatagatatacttactgcgctttgtgcgtgagactcgagcagattacgaacatcgtgatagtgcacatttataggaataactagggctgtgcgagggctgggatagccaacagttattaaagaggctaaaggtcgcgaacagctcataccggtaaaggtatatgaaacggcggttaccagcttcagtttttcggcttcagttaccgtcgagcgaattaacctgatttgggctgtcccagcagcacagagttactgctatcccagaatgaatactggtaagcaagaagagccggtccagagtaaattatgggccggtctactatttcatttgatatgacttaatcttttctccgacggtcttcattggttgcgactaggttttggcacaatgatttttcgcacgaagcgtgcacagtgagtggataggcataaattttacaataagtcgtcaagcacgtgatcgaaggtcgagcccaatcacacgctttcaacgtgacgcacagtaggagaatatttgcaaaaataagtctaatctcagttccaactgctacagttaaggacgacgaagctgttggtcagcggtttggcgaatctgacgaatggtttggtcctgtcgaaattgaaatccggcgggtcaaaacggcgaacctgctgaacaggctcaagagatcgtgcttaaatacgcgttctcaaaacttgctaatcgtgttgggtttctggggttgcaaccccagtgtcgtgacctaaagtgtcggatttgacctattttattggttaccgaaaacgtaaatgatctattccaaaataataactgacatggagaagttcttgtaacttaagacggagatcctccagcgaatggtgaccgagattcgaatctaccaccccaatgccggcatcagcgcagcaacgaaagcttctacaagaggagcacagccaaacggagtaattagtaagaaggcgaagcaaggctgagaaacactagcaagtactgataaaatattgtctatcatttctaaagtatctgaactcatgttgaagtctcccatgttcaaccggagtcatggaagacttggcacttcgtcacagtatagctcgtagcgccctacgaaagatctatcacttgtcatttggcgagatgcctcgcaagcgcaaaaaaaaaaaaccacagcaacaactacacagtatgtgtaccagtgcctcagtcgcaagttgaatcaagtctgtggtctggatttcctgcgcaaagagctctagcgaacgaccatcgttctccgccaggtggggctcattggatggaaggtcgggggaatgtatatcctccgcagccttgatcagggcaaaccgcttcccgaactcaacgcaatgtttttctaccgatgctgcgctgcttccctgggctcgactgagaaacgagatcggtacaagacgaaccccaaataccccgacctcaacaagactttcttaatgtactgggaacttcgacaacagcttcgagcccacgtggcaccgtcgctggggtattgcggtgccatgataaacgaaatgatcacgaaaatggcggttaatactgccaacatgttggctcgacacttccgtcggcgactgtaccaatacgttagattacggtacgcgaaagaaggaaagattcagctgagcttcaacaaaaccaagaaacttattgatagctgctatcgtgtccaagaagttcaggagtttgacacaaatggcaatttaacagctactatgaaaatgtggggtgcttgggataaatggcgaacttcagaagagcgcgagttacgtgagtggctcggtatggcgccttggcattggacaattcgtgagaatctaggttactttgtgacgaaggtgtacgacatgctttcgtggatggaggatttgtggagaaacacccaaagacaagaggggctcatctctactcgttactaccacaatcgagctctttcataccatctcacgttacactgaacgcgacgactttgtacgagctcttttgtcgcatttacgataatccggtggcgaaaaaagtcgtgaatggcgatctgggactggaatgcagaactaaggcagctcgtgctacctggacactaaatcgcgaagttattatccgctagcttttcaacgtaacggagttggagaccagaacccgcaagttcggtaaccgagacacgacggatggctatgcagcttcggtactactcgagcgcgaaatgcctaccacagaacccacagacaccaatacagctccaaggaaaaggaggaagactagcaaaaatcgattaacgaatgttgtggagaaagatgccttggattggcacgtgacaagttaccggaaggctacacaccagacattttcattgggatcgatcctgacgttagaatactggtcacggctgcgtcgactggatatcttccacagcaacggcaaggccgacagtgcaaacaccgccacagacgtcgtcgctttcgcaaaaagattcgaggaagtgcattgcgaagaaccaacacggacacggtcagcgagttatcggcgtcagcacagctgagtactatcacctggccaagctcaataagaagcgcgtatgggacctcaacttgaggaagacagaacctgcgtacgttttgatattgaaggaaatgccaagttttaaaacttctcagctgacaacattcatggatcgactccagtactttgtgaagcacgtgggctttctcgtctcgtattcgaccaaaacttcgtttcgaaagtggagattcttaaccacaagttcgaagacgcgggcgttgactgcgattaccaagcgacttgttccgatccggagtgcgcaggtctgcatcgcatttggtgattggagctgccaggacggtctctgtggaaaccctagcgctccagtacaggcactcaagaaagaactggaacagcgagcgacagtttgcccatggacgagtttcgcacctgtaagctgtgctccggctgccacaagcacctcctttcagctcggctattgacaaaggtgaaagaccgatagaccgagaagacctcgattgtcttggagacgtcttgtgcttcaagaacagtcgatgcaaggcacacttctggaatcgagacgttaatgcagcgagaaatatactagagttactcaagtgcaggctttcaggcctggggagactggcagctttcgagcggtgactgcgagaccaagatcgtgattggaaagtccatttcttagaaacatgctgcacttgaagggtgtgggctttttgtctggggacatgggggagcatccactcacacggtgtggaggcgcacaactgcttcgacacaagaatccgatacaagatagcgattacgtacaacgagttgtatgtagccagcttgtaacttaatggttaaatcatagaccccgaatgtctgcgaattcgacacacctgcactgtaatttgcaaagctgatgtaaaacagcatttaaatggcccagaggcttcctgctgtagtttatgtgcaaatacaagcacattcttcaagggccggatcatggtgatcccgtagaatccgggtagcagccaaacgtgaccctcatgttctccacaaccgatagccttgtcattacaacagtcggtcatctagataaaaacggtaaatatcagccatccctcctgtataaatggttgattgagacctctcgatatatcaagtatactcgatactaatctccctggttctcgaagatctcggaggagcttgagaacgtttggtatatcggtgaaagcatctacagaagacgacaattttgaagacagggcgtttggttcggcacagattaatgaggtacttaagacagggacaaagaatctaaagaaggtcgcggctagcgcaaggctcatgtttacaaaggcatgtgatgaagcagaggaagcttagtacttagaagtaaaattgaaaagtgaattgttttcttgttaactactctattgtagctaagcgtcacacggatgaccttgtcgtggtcgtaaacatgtacgtgaacatgtatgacctcgacaagtccgttaacgtaaaagtaaacctcgaggtcaaactaacggagtaatccgttacaggacaaccaaccggcgacagacaagctgttcacgaggtttaaagttaatacggcacaagagaatctctttgcgactaaaagagttcgggaagtggtcgaccggagtggtcaaaaacttcaaaagaacgaagaagcggcggatgttgccgtgatatcaacgctgatgagtcgtttggatgatgatgtgttgttggcaaataatctgatgctggcgaggcgaacgcaggcacggagagtattgctacgaggcttgaagaggctcagcatacgtattggttgcttcataaaaacagcgcggatgacgttatcaagctgcttaatctgaataaggaaggcgacaacgtgctctgaatctctttgtggagcattggctgcatacataaagaaggtaaatgaccagaacccagacgaagcgatattctctgtgttgaagacacactatgacagtgacgaaatactagcaaagactctcgttggggctaagatggactacagaatggttacaaccgctgcgaaattggagaacatgcaactctcgagatggcggaatgatgatagaaccacggaaactgtcttcaacctgctgcggttaaaccaggaaggaggcgggttattgataagcaggttgctagacacgtagatatcttacgcaactttgatgaaggaagacccgaaaaaatcttgctggtaaaattggcgactcgctaccaagacgagaaatcgctaacgcagatgctaacttccaacccagaaggatatcaatactcgatcaactgcctataatttattgcaagcacagatggagcagtggaaaatcagtcgcaagacagctgaggaagttgttacgctcctaaaactgactgaagatggcagcaacttcctgaacagccccgtcttgaaagcttgggtatctttggtagagaagttgaaggaggacccgtacgagttaatgttttccaagctgatgaagttttataatgctcataaactggccctacttctacgctggtcatcggtgcttgacataacgggaacaacgagtaagctcgaggagtttcaatgtaaattttggaaggaaagcggcaaaagcgctgatgatattttcgaacgtttgcggctgaatcagaaatctgacggctttttaaacaacccagtgtcgcgtatttgggagatctacgtgagaagattagatgtggaaatcaaataaagaattgttcttgaaattgaaagaaagctacagtgatgaaggactggcaaagatgctcatagctgctaagaaagattccagtacgacctacatcgctgaacgtttggaggacgtacacctccagtactttcaggaaaatggcaagacaacagaagatgttcataaattcttcgattggacgaggaaggtaaaaacgctcgtgaatccgccgtcttcagcacgtgggcatcttacgtggctaaatccagacaaggcaatgttcttgatcctacagaagaaatacggcaacaaacgtttggcggaaatggctagtcaggcagaggatggcagtactacaaacagcggagtcaggaagagatttggagaagtcaacagatgatagcggatggcgtcttcaatctcctaaagttgaaagaagaaaggaacctacttgtctctccagcttttagcacctggagctcctacgtgacaaaactgaacaactcgaaggaggaaccgaatgacttggcgattatcgtttatttggaaagaccctttggcggctttggtctggcgcggatgcttgatagatcgcagcagagccctaaccgacaagtacaagaggatgccgagaagttgcagacgctgcagctcaagcattggatgaatcatcactcggacacgattcgaatgctaaattacggcaacatgttggatgaaacggacacgaggatctctatcgtttataaaaaaatttccaggctaaaaacaagaagtagcacactcctgttacttggattctacgacgcgaagagcgtcacgatgtacagtcaggagtaagatcacgagattatgcagataccgatcaatataaaaaacgttacatgtacatgatatatttgagacctgacacaaaagctgctaagaggttccgtggcaaacaatacttacaatgtctttcaaatctcagttttgtcctttataccaaaattcactggggtactgcctaaagagaacacgagttggcagcgcattgacactacaccaactcgcattcgcggcttcatccctttctgaacgtgacattcaagtttaaacttttaaaagtaggatcgcagtgttcattgcgccattttcgtgtaatagcaacaacaactgacggttgactgacagcaagtagtatgccatcgtcctcaagcgtgacacaattggtccgttttaatattaggtcggctgactagttggtttgcaccaagttaaatatcagatcttcaccgatcaacaaagttttcacagctgtcggcgctatggcccatgcggatttgcatctttgccgagagagcagcatttttgggggaaagtgacgcttttcccgtgaacatcaatctttttatatcaaacgcaacaactagctaaatgcaaaacgactcgctatttcgagcctctccgggccgcccaatcagaactccgcgctatgctgtgtcagggcatcttcacctgcgtccgcttccccgcctagatcggatagcgtagaagccttttcttggatcggtacgtctcttgagcaagcttacgcttcttttttagcttcaagccaagctcgatcaacctttttgagctcgtctgtaccattcaccattctgcagttgtagagggcaatgcgagatatgggcgttcgtaaggcctacgcacaaagatatcgtcataaagccctcgagacaaacgatatttgtcggcgtatttcgccaaagctcattgagccgcccaaagtagttctcaacaatcacacgatcatgcgcaatccggtcattgtttgctttgtctgctcgtctcagatactttcctttttcggtatgataccgcgcaagaagggagcaatgtcttgatatcgtttgtctgctaacagaacccgttcatctggaaatgcttctagaaggggaccgtcgtctggaagactctcattgcctgcaactttctcattttgctgtgatggaatgccgtgttgctcttgaagatcgtgatgtcgtgtgttgccgcaggcacatgctcgccgcaattaattgcgaagccacgaccgatacctccacctttagcccatacagaagatgcttcccgctgcagtgctgccgcctggtcgccagctctgttgaaacgtgacatcttctgcatacatggcactcggaaaatgctcaaatgtgttacccctgttcgtgcgttgcgcattgttgcctcgtcgcaacgatcctgaacttggtcgacgtaaatcttaggagctagaattttgatgaacttcgtaactacgtccatgaaggtagtggtagtcaatcgaaagcgattggcgttggagtcccatgttctcccctctttgagcatcacgagcgtcctgaagaaggcgtcctttggcttaatttcggagtgcttgcctcgaccaacgttgtaattcattcgtacatggtcacgaacagtgagccacagggcgttgaactctcgtagcgaaaagttagtcatagcgtggatcgcgccagaaccaccaatctcacgaaacgggtccattagaggcgtgtcggtttcatcggtgtcgacttcatgcagtggtgcgttggggaaatgactgaggtcttcctctcggtcaatgcgacgttcttctagctctgaaagtatagattcaacacgatcccgggcagattggcgcgtaccgcgtggttgcgctggcattgctggcttttgactttgttttgtatgtggactcgggaaagactgagaaactcgggaaatgtgctaccttctcgccgggaatctttcgcttacgggagagactagtcaaatcaaaggtgggcttctcttccgtacaagatgaatcacaacatgattaagtagggttcccccaaacaacaaagtgcatcgccagccattgtgattaccagcgggaccacatgtgttcccgccgggttatcccagttatgccaatttttcagtcaactcgccaagtggcctattgcttctgagttatctggtggctgaagctgcgaccgacaaagcagacttcatacgtaagctttttaacagtaaaataaacaatcggatctccgagcaggaataaaggcccatggctgacgccacgcaccggaagttgtgagccgcttacactgtctttgtgttgaatggtactaggcatccaatcaatatattagtgacgactataagcctttcaatacttcaggcatccaaacaatccttgaaggttgctactgtattctcaaaagaagagagcacaagtggagcggctgagcgcaattgacagaagtgtcctgttcataatgtactactgaagctattattaataatactacgtactattgaaacaacagcaataatatacggtaatggcgcatgaatactattattcttcatctcctcaatagcagtaaattagcggttcccgttgaccagtcacttacaaacccaagatattactccctctcacccccctcccccaatcgtaaaatggaatacatttgcagtcaaatattcctattctggggttcttaactatgaaaaagtcataactgcacagtacatccgaagaaatctagcaaagacttttggtgcatgtggccttgctttcttccaagttcttcgcggagcgtgcgctgcatttctcgcaatccgctcaccgatctatccgatacgccagacgcacctccacaaactagaagcttcgcgacccacatgagatgctctttaattgcttctggctcaaggtcctcctcatttcacgtacgacgctccatatcgtcctcgtccagattttctgcgccgttctcagtgccatctacagccaattcttggtcactaactccaccgaagtcttcatgtgtgggatcttctgcagctgtgttctcgtctggcgggttcagcagctcgtccacggacattgggtccttaacgtgcagacgaggtaacatcgtcgcaagcacagcggacattgcatcgtcttcgtctggatcatcgaagacgcaattgtagtactttaaatgcccggtgtgcttccagcatcttgcgaagagggaaggtgaaaaaaaccaattgtttccactactggatgcggtgcactgttccaaaccaaatgtactcggaatgtgacggggtcacacagcaccttgcgctgaggaagtaggcttccaagagtatacaaacgctaagtgaacgaccgttcatgtgtccctggcctgaggggacgaagtactcacttaagggtacgattaagactgaatgtatttataggtaagcttagcttggtttctaatagaaactataagtcacctatagtaaagctatgtagatatgcaatgattggctcctagagcccctggtaccatgtaccaggtattacaagagtgactggtcactcttcatgtaacttgggtacactgggtacgtaccccgttacatggtgagttgggtgagctgggcttggttgtggttgtggggtcgagttatcgagtggatccatgctatggagatattatactgtgattggataaaattgaagaagtacgtgaatttgattgaatgttagatttactggtgctgtgaggggagatttgtgtagttcgtgtatgcattacggtgattcatgctgtttcgagtggttagtattgtgatttgagtgccgcaagtactgttcagacatttattttattttttgagtgcaaacaggacgtcgtcccgtgcagccgtgctacagcgcgttatgttggccactcggtaatcaactcggcatgtgacaaggcaattcgctcgtgtgctttgttcgagtcggacagatgacatgtcttgtgcactatccagacgtttttattaggatttgacgcggacttcgccacttgccagccaacgaaaggaagtttacactcgagaaccagttccaccgaggctcggtgtgatggctaatacatgtacatgtaccgtaatccgatttctacaacctatcctacaccagtcaggtgctactcctcctcgaacgatgatcatcgttcccgaggtggctactttcgtgagtcattgccttggatggagccattccacaatttgcagcgcatcaagtaacttcacagctcaacgtttctagaagcatgcaattaatccgacttatccttgcaaccatgcttgttcttctgccgagcagtatcgacatggtcaatgctgctaactgcggggccaagacgacaaccgacaatctccgtaccgtggaacccgtccaggccgtcagcttggcagaatctcccgacttcgctgctgcagaagaagagcgaggggcccaaaacgctggagctgctgcgcgtgtcgtcggaggagcctctgtcccggttaacggtcctccatcaacagtcggtgacgagatggtcactgtcacaactttcgatggcaacggcttcttccagcgcgtgggcaagtggtggagccgcgcattcggcgccgggaacgagaagtcgcgaagaattcgacagtgaaaaagcataagcccaacatatttatccgcatatagacaaccatagacctgcattcgatcaaaccgcttgcttaaaaccagtcaagaatattgtcagagaacttttcagagcgacaatattaccgagataaagaaagcaacgaggggcagaggtcgttgccaacttctcacagatttgaatggagaccattgaatgccgactcaacagacggaaggcaaagccacaacgcaatacagagttgatgggtacttgtgcagtcaagataatatgcactactagtacaattcaatcaaactacacgagcttgccaaggtgtgggatttagtctggtaaagtgtatatttttttagtagatggcctaaaactgatctgtcaatggcctaaaacgtagatacagactcggtatcttcagtttaggctatacacaaaagaaagctggctttgccagtctaacgtgtgtatgcgctcaagttttgtttcagacaacaacaggaggcttcatgcagtcggaggcaagttgtcaggacgtttgtgggcagcaaacgccacatgggcgcatggctggcaaatgaacgatcgtttttcaactggccgctgaatatcagtagtcccgtccctgcatccaacgtttggacggctttgggcttcgggagagttcatttgtctccctccatcgtcggtcatggcagccaccgccacgccgacgcacgcgcccaagtggaacgtcaagcagctccagcaaatggcagcaggcggcggcgctggcattgtggccaagacggtggtggctccattcgagcgtgtcaagatcgtgtgccagacgggcgagagcgtaggcatgttgcagaccacacgcagcatcttcgtgagcgagggcgtgtttggcttctggcgtggcaacatggcggcttgtgtgcgtgtggtgcctcataaggctgttcttttcgccttctctgacttctacaaggacgttttccggtctatggacccgtcgggacagcacaaactgccggcctgggggccgttcgtgtccgggtctttgtcgggcttcacggcgtctatcatcacgtacccgttggacctcattcgtacgcgcgtatcgggtcaaattggggcgaatctggtctacagcggcatcgcccatacgttcatgaggacattgagggaggaaggacctcgtgctcttttccgtggtatcggccccacacttttcggagcgctgccttatgaaggcatcaagtttgggagctatgacattctcacgagtcttttacccgaagatatcgaccccaaggcggattttgctggtaaaatcctgtgtggaggaggagcaggagtgctcgccacgatcttcacgtacccgaacgacacagtgaggcgacgactgcagatgcagggagcaggaggagccgccaggcagtacaagaacgcgtgggactgctacgtcaagttggcgcggaacgaaggctggacggtgtattacagagggcttacacccacactggtacgagctatgcccaatatgggcgtccagttcgcaacctacgacttcctcaaaagcttcattgattgacggaatttagaaatgcatgtttgaggtaaaatgcacgtttctaaaactttatgaggcttcactgttctcgtcgtccgctgcgatcatcgcagtagcgagctcctgttcgtcgtcggttaatacgccctttagagtggataaatccttctgaaagaccgtcttgacgactgattccagtgctgcacgacggtgtgtttctcgcttaacgtcagtactgaaccgctccatgagactcggacgcgttgctgcagctactaagagcttctccttattgcgagcgatcgcctctttaaattgttgtcgttgttctcttgctttctccttagcaacgacgtccatatcttttaaatccacaaagttcccagcgtaattatcacgtcgggcagactccgatcgcttgacttgagcacgtactcgacgagcagcttcttcacgtcgacgttctcgagcctcagcttctcgttcttcacgctgtctttccttctcttgcttggcagcttcagccatcagcttctgtacgcgcaaagtttcggatttcgtaggtttccactgactcccagcttcggttgctagtgacgcacgcgtccgtgctaacagcttctcttgagttcgtctagcgtgctgttgaatggct

SEQ ID NO: 248 - DNA, 20801 bp, unidentified
  source 1..20801: mol_type = other DNA
  misc_feature 1..20801: note = Fanzor polypeptide
attgcagtggggtacactagtgtgtaccacactagtgtaccccggtctggccgctgtgcgctaaccaatcaaatcactacaatgcgaagaaagagaagattatgttcaaatggtgtggtcttcattcgctttagatacgaattggtggaaccactgtacttcgggaagtgacttctcgaagcacccctggaacgaagaaaatccgaagccagctttggacaaaattgagagaagcacagtactgcgagaagtcacttccctcagtacagtgcttcacacttttcgacaagtcttgcggcggcgcggtcgtcggtcgcttggtcttgctgttgctgctgctgctggtgcgagcagcgtggtgtttgttgaagtgttggcttcggtgcgctcgaaggagatagtgggacgttgataaaatttcgacaatcaaaacccgcgattacaaagatcttatgttgcgcgtagccaaaagcgaagattgcgatccgatgagcaacataacttcctttttgctgaagattttgggtctaagtcgatttctttaaaatatatttccagaaatttagaccgaaggcggtatatcgatattttaacttctgttattggtacttcgttcgcagggtgtcttgaagtagtgattctccaattttcgagagaagtgaattccgtattccttcgtacaaggtgtgagtagcagtagcagtagcagtagcagtagcagtagcagtagcagtagtagtagcagtagcagtagcagtagcagtagcagtagcagtagtagtagcagtagcagtagcagtagcagtagcagtagcagtagcagtagcagtagcagtagcagtagcagtagcagtagcagtagcagtagcagtagcagtagcagtagcagtagcagtagcagtagcagtagcagtagcagtagcagtagcagtagcagtagcagtagcagtagcagtagcagtagcagtagcagtagcagtagcagtagcagtagcagtagcagtagcagtagcagtagcagtagcagtagcagtagcagtagcagtagcagtagcagtagcagtagcagtagcagtagcatttgcgattgttttgactctatcagagcaacgcatgcgcattgcacagttggaagcaacgtgcagatctcagtgtcaggcagttgctcgcagagagaatcaggcagttgtatgtgagtgagtgctagagcagaccaagtcgtaggtcgctcgctatgttgcgagggtggttttgtgccgtgcaggatttccatcctcaatcccattcttacctcgtggaactcaagtgtctgctcctcctcgctactcgagacgtttgcgagggcatctgcgacgaatcacagtgctgttttcatcgactcagttactcatggcgttcgctagacacggttgtgcacacttgctagaggcgattggcgtcgcgcgtgaacaaccaatcgaaggcgttagcgtagtcggagtacgtagtcgaccggcggatgtacgtaaggcttgcattcgcgctcgcttgctccaacgtacggtgcttgaacgcgttcacccgctgcgaaatcccttggcagcgcttccggtacatgaacgtctcggcaccacccaggtactcggtgatggcctggttcaccaccacactgcccttgctcgcgaagtgctggccgatggtcatgtggttttcgccgtacacgccgttcaggtggcgcaggatgtcgacgcgggtcctcgcaatcacgtccaagaacgggtggatgcgtcgctctgcttcgaggtcagcgatgcgacggcgagcggatgccaagtcgcgctccagctgcgatattagagcttcggtctgtgcatcgcgagtatggcgtcgaccttggtcgtttgtgctgtgatccatgcgtgcgaggatcgagctcgatcgggtggaagagcttgagctgtcgcgaggaaggtatgagagtgagtcgagttggacacatgtcagcgagtcttccagagttgccggcatgagcacgtggcaggacaagtgcgaaagcgatagagaaccgagtgacacattcagacaagtaagtagttagtggtctgatgggctgtcagagtcgtgacattgcgcgtttgatatgtgcctgcttctagtcacagttcagctcaagtgacgttgattgctcgcttgtcgagatccacttgaccgagtgcacgttccagccacagctctcgccacgcaaacgaacaccaacagcaacagcgacagcagcagcacacacacggagtgtatggagtcgtaccgagcgagaatggactggcgtcgccagtcatacagcgcccgctgagtccatacggctgcagcagcacagctagtcggtgctttgcatcgagtccgctttcgtcgccacagcgacagcgaacaccagtgtcgctgagcacgtttgcgctgcactcgacctcgacgagctcgctgcgacaacgacgcgatcgtctcaagcgacaccgacctcgagacagagttgaagcagtagatgatagcgtgagggaacggagcatatcagacgacccgacggcgtcgatctggtcagatctggtgcagatctggtgcagagtgaacttgccacagcgactgcagctgtagctacactttgtgtcctacactcgagcagcgagcttgccttgagcgcgtggtcgatcgcgagtgttcacagtcgttggtgactgtagcgccggtgtgtgcgaattgaatccatgtgctcgcgtcgagcgtgccgtcgctgtgtgcgaacgtgcgtgtcgctaatcgacgacatcgcgagcgagtgaacagttgcgttgtgaaagtgaggagaggacttggagcacatgacgcacttcaacgagtgtgcgactggctggtccagaccaccgctctcggcgctctcaagcacgcgcctgcgcgtggcagccgcgtgccttggccgaattgcacatgcgtattatgaagcagtaggagcactaggagtaggagagactcgagcgctcgacagcgagcgctcacttgaatggcactttgcatttcaccagcatcagcatagcagcactcaacagcaccagcacgggtgtcgccaaagcagagcggcggcatcattgacagacgtcacagagaattcttttgacaaaggaagcgtgccaggctttggagctgaggacgtcaagatgacggtgcctcagcccatctacgagttcgttcaagctccaaggctgaacgagtggagtcaacaagccctcgtacggttcgcgcgcaagcacacactgtacgaaccgaagatggcagagcgctgcagggcaactggcgacgcggtcagcaccgtcacctgtggtttgaagagctcgctcgagccacgcgtcttggaccatctcgcgtactacacactgcgcaaggacccagcagcagtgtcggataacgacattcgccggcttgtcgaagagaagctcgggagcgtcgtgaacaatcacgtccccgacatcgtcccgctcttcaagaaccgcttgcacatgaacatgcagcaggcggacgtcgaagcgcgtgtagcggactactacatggactttgacacgatcgtcgaagagcacgggctgaccaccatgatgggtcgagggccgacagacaccgaggcagggcgacagcgcatgaagctccggtgcaaggtcctcatgatgaacctccagccagaggttctgcgagtcgagatcgcgcgcctggccgatttgacgcatcgccacgtgcgagcggacgacatcgcgctgcacgaccttgttgttgagcgagcaacccgccagcaacaagcgcatctcatgagcggcgaggtccgtagttctgctgcaccgcgtcaagccggacagcatagcgacaagaagagtggatcagtgaacgcaaagcacggtcacgcgccgcgcgtacagcaggcgtctggtcctgcgacatcggctgccccggctgcgcctcgatttggctgctgggtgtgtaagggaagtcactggctgcgtgattgtccggtggcgactgagacccagagagcagaggcgaagcagaagatggccgaggcgagagaacgtcgggcactcaagcgcgtgaacaacgcgaaggctgacgtcacacctcgaacggccgtggtcaacggcgcgctcgaggtcccattctgtcctgacacaggcgccgacgtcaacatcgtcggctgctcgatcatcgacgagcttcgcgggcgtgcatcatcggtcgagatcgactttgtgagccccccccactacaagtacaggtggccggtggcgcgacggtgacctgccacgagaaggtgcgactggacctgcgcatcacgacggctgcagggccactacaactcgacggcattgtgttccacgtcatggacggcgaggacgagctgcttcttggacacggcacgctaagcgagatcggcattgacgtcgaccgcctcttcgaacagctcgttgagcgagggccggatgaagctgacgacatcgactccaggaacatgccgctccttgagccggcagacgacgtgcggatcgagctcgagcggatgtttaaggcagcagcggcttcaggattcgatccggcgtgcatggttcagccccgtgacgtggtgatgcgtttcgccgacgtgtggcgtacgtgtctcgggcgacgcagcagctcgcgtcgaaccgctcctcgtacagatacgtgacgacgctacaccgtaccggactgccgtgcgtcgttacgccgaggcacaacgccagttcttgcgcgagtacgtgcgcgagcttgagcaagcgggtctagtgtaccgcaacaaccacgcccgatgggcttgtgctgtgctgccagtcccgaaggccgacggcgggttccggatcacggtagactaccgtccagtcaatgcgaagacagtgcccatggctggtgcggcgccgagcctcgctgtcagcatccagtgtgttcgtggggcggcgtgtttgggcgatttgccttccacaagggcttctggtagatgcctctgcatgagcagtgccaggagctgttcagcttcctgactgaggatggtatctttactccgactcgagtaccgcagggtgcgacgaactcggcagtgcacttccagtcacagatgaccgactgccttcgcgacgtgctccatcgcgcggcactcgtctggatcgacgatgtgctgctgtacgcatgtgatgcgccgacatacatcgccaaccttgaggagttctttggcatcctccaccaacgtgggctcaagctgaacgcgaagaagtgcgagctcgtcgcgacgcagatcacgtggtgtgggaaggtcatcgatggcacgggtgttcagtacgatccaaccagactctcagctctcgcctcgatgcctttgccgccggacggcgcagcacttcagcacttcctctgtgccaccaactggctcagggacagcatcatcgactacgctcgtgtcgtcgctccgctgagcgcgatgctggaagctgtcatgagagagcgaggccgtcgcaagtcacagctacgtggtgccgcctactatggaccagcgaggaccgcgactcgttcaagcaggtgaccgcagccatcacgacgtcaagcaagctgtcgttcccggacgaccgcgcaactgtgtgcatgttcaccgatgccagccacaacggttggagcgtcgtcgtgacccaattccgcgagtggcaagaaggagagcctgtcgagcgccaacagcacgatctgctggtctgctgtggcggccagttcaagaccgcacagctgaactggtcggtcatggagaaggagggctatccgatcgtaagagcgtgcgatgacctgttgtacatgctcaagtgagaccgtggcttctcgatctactgtgaccactcgaacctgatccgcgtcttcgctccggacaaagagatcaagtcccacaccaaaggaaagctagagcgatgggctctcaagatagtcggccgtcgatacgtgatccatcacatcgactgcgagcacaacctctgggtggacatcgtgtcacgctggggccagcctgcggacccgacagtcgtacgacgcgtgacgacgagatcagcgcctgctccgccgagcgagctacgtcctctgcaggacgctgcattcgtctggccagcactggtcgacgtgaagcaggcgcagcagcgccacagcgagacagcacctcaggatgccacggagaacgacggagcaatcttcgttgaaggcaagctctggatcccgagggcggctcgtgagctggtccagcggctcatgatcgttgcgcactatggaagccaggggcaccgcggtgtcaacgtgatggtggagcatctgcggcggcattttgaactggacggagctcggcccatcgcgctgcggttcgtcaacgcatgcaagctacgcaagcatgtgaagggcggccacctgatccagcgcgactggaccgcgatgaggactgtgacgagcaacgagtgcctccacatggactacctctacctcggcgagagctacggtcccgctcgctacgtcctcgtcctgaaggacgaactgacgcactacgcagagatggttgccagcgatgcagcgtcaagctcagtggcagccgacgctgtcttggactggacgaagcggtttggcctgccgcgcacgtgggtcagcgatcaaggatcgcatttcaagagcacactgatgaccgagttagcgcagcgcctcagagtggagcaagtgttcgtgccggtttacacgccgtggctgaacgggacggtcgaacgcctcaaccgcgacgttctccaagtgctgcgcgtcatgctactggagtttcagctagacacacgcaactggccgcacctcctgccagtcgtccagtcaagtgtgaaccatagtccggtgccgtttctcggcggctgcgcgccgatcgagctgttcacgggcctgccagcgcagtcgagcctcgacacggtggtcgtccctgaagagcgcgtgcccctcacgctgcacatggactcagcaagctaccacgagcgcctcacagcaatgcggcggagcattgaagcgctccgtcaaccagtcgtcgacatccgcgaacagcatcgcctgctcgagatggcctgggggaagggcacgacatgcaacttctcggtcggagactttgtactatggtcgagagtcgacaagcgcctgcgcagctcctcgctcgctgggttggcccctttcgcgtcgaagcaggccacgcgcactcgttctcgatcaagcacctgcgcacaggcgacgtctacgacgtccacggttcgcgcctcaagttctacaacgatccagacctcaacgtcgacgccgagctgcgacagcacctcgcgctgcaaggcatggtgctcgaggtctgggccatcagcgaccatcgcctcaaccgctgaactggcgagtggcagctccttgtggcctggcgcgaacctcaggacgtcgagagctcttgggagccgtttgcaacgatcagcaccgacgttccggggctcgtggcacgctacattgaagacaacaacgcgacagacctggcgcaattttttgccgagtcgtagaacccaagagatcgcaacaagcccaaaatgggtacaactggtattaccagttgctgtgcaactcagaagacatgggctcacagaccatcactcacgcggtacaagggaagtacagcgcgcttgtggtcttgggggcagtgtagtgtagcgactggctggtccagaccaccgctctcagcgctctcaagcacacgcctgcgcgtggcagccgcgtgcctggccggcgcgtgcctgacgcacgtcggacgcgtgccttggccgaattgcacatgcgtattatgaagcagtaggagcactaggagtaggagagactcgagcgctcgacagcgagcgctcacttgaatggcactttgcatttcaccagcatcagcatagcagcactcaacagcaccagcacgggtgtcgccaaagcagagcggcggcatcattgacagacgtcacaacgagacacaatggggtagagtagctgtagtgcgctcgtaggtgcggccatgatgtatgactgctgctgtggtgttgaagtccgagtctgcggcacggcctactgatggacagagttgcgtgcgtgtgtgtgcgtgcgtgagcaccaagaggccaaggaatcacgcgaccgatgccagaagcacagacgtcgatacatagtatatggtgttctccatcagacgacaatgaacgattgaccctgttgtttgctgctagagacttgctgtcgtgtcaatcgtctctgtcttgcacacgcacgcatcgctcaaccgctcgactgatcactcacgcactcgaacctcctctcgcgcgctgacaaggaaggaggctctcgctcactgctcactgcgcaagtatagtgttgaaccttcactcgctcactcactcgcgagtcaatatgcgtcccgacaccgccaagtctcgcggatctgctttctctctctctctctcgctctttcgctctcgtctgatggttcggactacgcactcttgcgtgcgttcctagcgcctagtatcgggtcgcagtgccgcttgccttcttgctcgctcgtctcctcgtctcctcgcttgtgtctcgagctcattcccactcttgctcacgttcgcacaagctcttcccgactgagcgcacacaccgccacgaacacgcacgcacgcacatacgcacatacgcacatacgcacatacgcacatacgcacatacctgtacgctcgcaactgccatggtacagcacacgaaccaccgagaccagcgctcctcttcccacgctcccactcgcaacgccggcacgcacactgagtcgcaccttgtcgtcgcgagtgccgtagtctcgtcgacccagccaaaatgtaccgcaacacactcacggcgagcgctcgtgatgcgactggcgcggccacaagcgccgccatcaccgacatcggctactggcgtcgagtcgactgctgtgccgcatcgcccggcgactgtcgactggcgcgtgggactcttgaagcacctcgctcgtttcgaagctgatctcgacgagcttaacacggcgctcgagcgcattgtcgacaagctcgccgacaacgaagcaaagctccatgtacacatgcgcgcgcttgatgaactctggcgcggagtgatcgagcacacagcaccgagcaccgcacaaacatctgcgctcgtcagcgctgcagtactcgctcaagaaggcgtcgtgcacaccaagcaagctgctgcgatggtccgtcgcgcgcgatccgtccacgaacagacattactgatcgtcgaccgagcgcatcggctcgacggcgaggcaagcgcgctcagcgtgcaagcggaagctatcaatgaccaagtgcgcgaacaagctctatgcgaacatcgacaagtgcatcgtcggagcaacggagatcccgtttctcggatgctttgtcggtcgggaaggcgtacgcgccgacccaagcaaggtgaaggcaatcgtggattggccaactatcgcttcctcgacagccgctggtggatggtccatgggtcgaagtaatcgtcgtcgccgcagagcgagcgagcaagcagtcgaagaggtgcttgtcaatgtggttgtgcgcgacgtgcgattgagcgttcttgttgtaatgagcctttgaaaagttggcggaagcgcgatcttttcgaccaatggtcgcactcaaaagcgaagatcttgtgttgcaggaatggcgtcctgctaaaagtgaagatcgcgcaacgtaagcttcaccatttcgagaaatccaaagtgaagtcagtatatcgattttagctattcagtaccggtttcgtcatccaagacgtggtcgacgaactcggagtcgattcgagagacgcgagacggatcctccgagcaagtcaagacgacacgacgaccgacacacgagctctcgcagtgcggtagtggcttggcatcccgtgcacaagcgcgaacatcactgcaaacaccacgcacttcagatggaagctgatgcagatgtgctcggaagcagtgagtcaaggcgacccagcgttcaaagtgctacctgttcctgcactcactcctcggtttgtcacgatcacgacgacgaccctcttcgcgacctgcaggcgcattgagcgcgactccggcttctggctactcggtgacgctgtgccgcgggacccaccaagcatcgcgccgtatcgagacgctgcttggcgtgaggtgctcaagttcaagaaggtcaagaatgtgatgaagatcgagaaggttgagacgacgcgacgcacgtttgcacactgtctgcgcacggatggcgtctcggcgcatgttctacttcagcgaccgcggaaccatctcgatcagaagctcggttacgagctcgaccggcagaccgacacgagcaagttggttgcgatcgaccccggcgtgcgcgtactagcaacagcagtgacgtactcgcagcagcagcagccgcgagcacgtcgcagccagatcgagacgcactcgaaagcatacaagcaacaaagaagtcgtgagcggcgccagcgcaagaaggcgaaagcacgtgtacaacggaccatgctacagcaagcgagacgaccacgcgagcgccgccaacgcaagacaaacgtcgcgagcgtcgcagcacaagaaacaacacgcgagacgtgcagcagcaacaacagaaccctcgcccgtggcggtctcgaggcaaaggtcgtcgcttgcgtcgtcgctgcttgaatcgccatcgagcacagcacacagcagcaccatgcgaccagaggactcagcctgaaggtcatcaccggcgccgcttgcagcaccgcatcgagcgccagcaaccacaaccgcttcccgagtaccgagtacagcgcatcactgcgcgacgcattcggcacgaagcgcgacagcacgagcaccacgactggctcgtgcgtcaagccaaacgcgaaccagagatcgctgcgatgcgaagcaacttcccgtcgttcaagacggtcgatgtgcacgtgctgcgctacttgtcatgttcgcgagcctgccagtactgttggagttcgatcgcgagcaagcgcatcgttcgcggcgcttcaaacgcggtcgtttccagatgaaagcgatcgacgcagctgcagcacaactgactcaagaaccagggacgacgatcgctttgggtcactggcgcgcgcagcagattgtccgtggacacagatcgccgctttcccagttcacccacgctctacgacaacgagcaacagtggtgctcgtcgacgagttctgcacgagcaagacgtgctcgtcgtgcttctgcgcgctcgtcgacagtaagtatgtgaaggtgcgcagcgacagcagcgcgacgacatccacgacatccaacgttttggagtgcacagcgtgcaacctgagcgctctcggtccgtcggctcacaccggcatgaaggtgcgctggcaccgcgacgacaacgccgcacgaaacatccacacgatcgcactcgccaacatacgtggccaagaacgtccagagccattccagcgaggtcaagcacaggcacgagtagcagcacaagcaacagcacaagcagcagcacaagccgaagaagaagggctgacgcttctccaacgcgtgctcaagagcgcactccaaaaggcgcaactcaaggcgagacgtgcactcacagtggttcgtcacacgcgcgcgaaagaacgacgaggtcgacaacaccaagcagcagaagcaacaacaacagcaacttgactgtgccttgtgtgcagtcagtgggtagcggcagatgagagtcaccgagtggttctaaccatggcgtgacacagtgactctgacacgcatccacgccgagcggtgcgaggactagaaagaccgaccgaccgcaaggtttgtgatcgtgactagaacgcacttgtaggtacattagcaataatggcgagggtgctatcgacgagctcgagcaccccgagcgagtatggcagtccatcgacgagcggagcgctgcggtactcaccgacgccacttggctgcgcggatcaacgaacagcatcagctactgcgactgcgcgatatgtacagctatcacaacgatcgtcttgcgcgatcgccagctcgccgagtcctgcgcagagcctgacgaccgcggatgtctcgactcgagagcgcagagtgagtgagtgagagagagagagaggacttgcactagtggcgatgcttgatcatagctttcaatacatacacaacatgcgctttgctatctccgactcgagtcagaaccgcaagacgagatcgctcgctcgagcttcgtgcttgacctcgatgacgctgcttacggtcgcacgcacgcactcgcttcgtgcaacactcactacattgtggctctcgacccagctcactcctctcgtattgaatgcgcaacagcgctcgttgcagctacgtcgtcactcgactcgcgcgttgaggcagcgattctccgaagaggtacgtcttgcgtcgagcatatgtgtatgcgtctgtcgtgtgactgcaatgtgggcaatggatgagagagcgcgcgagggtcgctcatgcttgaatcaagcgtgcactggcacgacaacgacgcattgacgtcctagcaactcttgttcatacgatgcagcagcagacgactgcttctcgccgaacgcgccgaaccagggatccatgtcgtactcgtcgacaacgatgggtgcgactgcaaagttcacgaggatgcgcggcacggcgatgcagggctcgtcgaccacgagctgcaccaagtttggcacgtggtcgcaagtcacgccagtgtacagcatcgtgtaccagaagaagaacgacggcacgtacaagaacaacgactcgggctacaagctctacttggcgtagcaagaccgccgttcattcattcgtaggacacagtcgccgctcgctctcttgttatcagcatgagcagctacactatcgatcgacacacgtgctcgtgctcgtgcgtggaggctctctctcatacacttggatgtcgtacgacgccacggtcgctggtcgacctcgtgcctgtcactcttgtgctccttcacaaccgctttggtgcgcgatcgatcgcgggtgtttcgcgcttaccgccactcaacatcgacgctaggcgattcatcaacaccttcagtcttagccacgccagcgtcagacccgctgcgttcgaggactggttcgcatccgtgtgcgtcgtgtccgtctatgacgtgaccactcttcattcaagtcgatgagagcgagcacaagttcatcctcgagttggagcaagtacatatggcggtctatcgacgctccatcgacgcctggggcgctgcagtctgcggcgctagacagcgcgccacatcaagtaacagcagcaacaagagatcttttcgtatgtgtgtacgccacgtcgagctcttgaacgcagttccagatccagacgccactgacgagccggtgcgagaggtctgacgcacgtcgtacgctgcgcaccgagttcagtgcactcggagcgcaccagcgctgtcaaacgctagcgcttggtcactgcagtgacgaaggagaccgcgaccgggtttttgtctgctccgctgctctgactcgctcgctgactcctcgccattcatcgttgatcggacggtgcaaaatggtgatcgtcaagcgactggcgaccaacgaggatgcgcgggacgacgactgcacgaccgagtgcctcctcgacggacacggacactgtgagttacgctcagctcgagcacctcgagcaccagcggctctttgatcgtgtgtgtgtgtgtcggactagcactgctgctgtttgtgtgcatctgcagcagtcgcaacagcgacgccacgacgacgacgcgcatcgtcggacgcaactggcagtaacaaccggccatgtcgctgcgcgcgccggctttgactggcgtcgcgatgtggcactcgatgactgacggactggctgcgcgagcgaacgaaagtgcgtgtgtgtgcgcgcgctttcactgcgcgcgctcacttgccatgatgcaagcgcctacacctgcgtccacgccgcgcactgcgctcgcgccacagccgcagcagcggccccaccagcttcactatcatcaccaacatcacaatcgcgcctatcatcagcaacagcagcagcaaggcgtgcggctctacgatgccccgccgccaccacgaccgcgcacggcgactgctgggagtgcatcgagccaccgcagcggcgcgccactgccgtacgcaccgactgcagccgccgcggcagcgctgacgccgacacagatgacgtctactttacgcacacgcaggtcgtcgacagccgcatcagctacactgaggacaaccggcgctttgtcgagtacaagctcgagatcgagacgacgtcgcgcgggacgctgtacgcgtggcaccgctacagcgtgtttctccagctcgcggcgacgctgcagctgcgcgagagcagcggacacggctatcgccacgagatcccgcggctcccgagcaagaagatctttggcaacttctcggacgcgacgatcagcgcgcgcgtcgagaagctcaactggttcctcgccgcggcgacgggcgccgagttcctcgactggggcatccgcgtcgacgacggcatgtgcgtgtacaagcgcagcacggcgcggtggaacagcagcgacagcagcggcgacctgcgcgacagcatgacgtcgaacgcgtcgactgcgactgcagggtcgctcgcatcgccgcggcgacggctctcgcggcgcttgttgctcaagtcgcagctctgacgagcgaaaagcgcaccattatcttttggctggtcgtatacttcgtgcgctgttgtgactaagagattgtatcgcttttgctattcgcactgcattcccacgttgatctataattttgtatttctgaaaaggaattctactgtttgagcttctcgaaacgcccccccttttgtttggctcgcggggctcgcgcacacttgcgaactcgccgcttcccgctcacattcgcgccgaagcgacgacgtgctgtgcgtgtgtgcgtacgtacgtgcgtgcgcccgagcgagagtgagtgagtgagcaccgagcgtctgcgagcgctctcgacacttcgttgcttcgtgcacgagcgttgtgcgactctcacaagcaaacgaacaaacaaacgaacgaactgaacgaacggcgtgagcgagcgctcgatcatccgacagcagcacgatgtcgtcgacgcagttctcgtactcgagcgcgcggctgcggcgcgtcaagtacctccagttcggcgtgttcagtcccgaagagatccgcgcgatgtctgtgacgaagcagatgaaagtgaacgaccgactcattcccgacggcatctcgcgtcccgagacgtacttgaacggccacccggtgatcggcggcattggcgacccgcgcatgggcacgtgcgactttcgcgcgcgctgcaagacgtgcgactgcacgtacagcggcagcggcgggaaagtgaatgactgcccagggcactttggccacattgagctcgcgcgaccgatgttccacctcgggttcatcaaagaagtgctcaagatcctccggtccgtgtgcttccactgctccaaggtcctgagcgacgagcgcgaccaccgcttccggtctgcgatgcgcatcaagaacggcaagcgccggctcaaggccgtgtacgagatctgctcgaacaagtcgatgtgcgagtacggcgaagaggccgacatggagaagatgcgcgaggacctgaacattggtctccaaggcggcttggacgacaagtcgaagccgaaagaaggcggccacggcggctgcggtggcttgcagcccaagtaccgcaagcaaggcatcaagctcatggtcgagttccccgagcagatggaggacgtccctggctcgggcgaccgcaaacagaacttgccagccgccaaggtcctgtcgatcttcaagaacatctcggacgaaggctgctacgcgctcggactggacccgcgctgggcgcgtccagactggctcatcatgacgctcatgcccgtgccgccgccgcacgtgcgtccgtcggttgcgatcgacggcatggcgcgcggtgaagacgacctcacgcacaacttggcgtcgatcgtgaaagcgaacttggcgctgctcaactgcgtgcgcaagggcgagccgtcgcacatcattgagcagtttgagcagctcttgcagttccacctcgcgacgttcttgaacaacgagcagccgggcttgccgcaagcgcagcagcgctcgggcaagccgctcaagacgctgcggcagcgcttgcgcggcaaagaaggtcgcattcgcggcaacttgatgggcaagcgcgtcgacttctcggcgcgtacagtcatcaccgcagatccgaacctcgagattgaccaagtcggcgtgccgcggtcgatcgcgatgaacttgaccgtccccgagcgcgtgacaccgttcaacatggcgtacatgcaccagctcatctcgaacggaccgctcgagcacccgggcgccaagtacatcatccgcgaagacggcaatcgcatcgacttgcggtacatcaagaacaagtcggacctcgcgctcaagtgcggctggatcgtcgagcgccacttgcgcgacgacgacctcgtgctcttcaatcggcagccgtcgctccacaagatgtcgatcatggcgcatcgcgtcaaagtgtttgactggtcgacgttccggctcaacttgtccgtcacggcgccgtacaacgccgactttgacggcgacgagatgaacttgcacgtgccgcagtcgatgacggcgcgcgccgaggcgcaggagctcatgatggtgcacaaagtgatcatcacgccgcagagcaaccgaccggtcatgggtattgtccaagactcgctcttgggcgtccagaagttcacaaagcgcgacgtgtttgtcgagaaggacgtcgccatggggctcctcatgtgggtcctgaactgggacggcaaggtcccgacgccagcgatcctcgtgccgaagaaaggcgagctcggcaagtacaagccgatctggactggcaagcagctcttctcaaagatcatcccagcgatcaacttcacgggctttgcgtcgatccacaacagcaacgagaagttcacagagctgtcgccgttcgactcgcgcgtgattgtccagcgcggcgagctcctcgctggcatcattgacaagaaggtcattggttcgtccgctggtgggctcatccacatcacgatgctcgagaaaggtccagaagaggccaagtacttcctcggcgccgtccagaagctcgtgaacaactggctcgtcggccggagcttcaccgtcggcgtgagcgacacgatcgctgacgtgagcacgctcaagacgatcgtcgacatcatcacacaggccaaggtccaagtgcacgacctcgtgcagcgcggccagaagggcgagctcgagacgcaaccagggcgtacgatggtccagtcgtttgagcagctcgtgaacaaggtcttgaacactgcgcgtgaccaagccggtcgcgaagcgcaaggcagtttggacgagacgaacaacatcaaagcgactgtgacgtccggctcgaaaggctcgttcatcaacatctcgcagatcattgcgtgcgtcgggcagcagaacgtcgaaggcaagcgcattccgtacggctttaaccaccgcacgctgccgcactacggcaaggacgacctcggtccagagagccgtgggtttgtcgagaactcgtacttgaaaggcttgacgccgcaagagttcttcttccacgccatgggcggacgcgaagggctcattgatacggccgtgaagaccgcagagactgggtacatccagcgccgactcgtgaaagcgatggagtcggtcatgtcgcggtacgacggcacggtccggaacgcgcagggcgagatcatccagttcctgtacggcgaagacggcatggacgcggtgtgggtcgagaagcagcgctttgagtcgcaccgactgaacaagcgcgagtttgacgccaagtacgtctttgacatcacgagcgagtcgcttgggtgcgtgcccaagtgccccgaccagctctacctcgagcccgacatcatcaaagacatccggacggaccagcacacgcagcagatgctccgcgaagagatcgcgcagctccagaaggaccgcgtgaacttgcgcgtgatccttgcgagtcgtggccaagggcaagagtcggacaacgctgcgcaagtgccagtgaacatccgtcggctcgtcgagaacgcgcagcagctctttagcattgacatgcagaagccgtcgagtctccacccgacgcggatcatcgaaggcgtgaaagagctctgcaagaagatcattgtcgtccaaggcgaagacccgctgagtgtcgaagcgcaggacaacgcgacgctgttcttccagatcctccttcgctcgacgctcgcatccaagtgcgtgacgctcgagcaccgcttgaccgagaccgcgttcgagtggctcatgggcgagatcgagtccaagtttacgagcgcgctcgttgcagccggtgagatggccggtgtcgtcgcggcgcagtcgatcggtgagcccgcgacgcagatgacgctcaacacgttccactacgccggtgtgtctgcaaagaacgtcacgctcggtgtcccgcgcttgaaggagatcatgaacattgccaaggacgtgcgcacgccgtcgctccagatctacttgactgccgactcggcgcacgacgctgacaaggccaagttcatccagtcgcagctcgagtacacgacgctcgcagacgtgacagcaaacacggcgatctactacgacccggacccgatgaacacgatcattgaagaggaccaagagtttgtcgcgacgtactacgagatgccagatgaagacacgccgatggcgcgctcgccgtggctcctccgcattgagctcaaccgcgagatgatggccgacaagaagctctcgatgagcgagatcgccgcgcagatcgagtccgagtacggtcaggacctgtcgtgcatcttcacggacgacaacgccgacaagctcgtcttgcgcattcggatcatgagcgacgaagaggagaagctccagcgctcgggcgagactgctgtcgggcaagaagacgacacgttcctcaagcgcgttgagcacaacatgctcacgcagatgaagctccgcggcattcaaggcgtgaagaaggtgtacatccgcgaagggcggcagacgcactggtttgacgacgtcgggttcaagatgatgaccgagtgggtgctcgataccgacggcacgaacttgctcgacgtgctctgctacccgcaagtcgacgcgacgcgcacgatctcgaacgacattgtcgagatcatccaagtcctcggcattgaagccgtgcgccgcgcgctgctgaacgagatccgccaagtcatttcgtttgatggcgcgtacgtgaactaccgccacttggcgtgtcttgcggacgtcatgacgttccgcggtcacttgatggcgatcacgcgccacggcatcaaccgcgacgactcgggcccgctcgtgcggtgctcgtttgaagagacggtcgagatcctcatggacgcagcgatgttctcggaaggcgacccgctcaccggcgtgtcggagaacgtcatgctcggccagctcgcgccgctcggtacggggctcatggacttggtcctcgatgcaaagaagctcgcgaacgcgatcgagtacgaagcatcggagatccagcaagtgatgcgcggcttggacaacgagtggcgatcgccagaccacggaccaggcacgccaatctcgacgccgtttgtgtcgacgcctggcttcacagcgtcgtcgccgttcagtccaggcggcggtgcgttctcgccagctgctggtgcgttctcgccgatggcgagtccagcgtcgccgggcttcatggtagcatcgccgggtttcatggcggcgtcgccagcgcacagcccagcgtcgccgctgagcccaacgtcgccagcgtactcaccgatgtcgccggcgtactcgccaacgagcccagcatacagtccgacaagcccagcgtactcgccaacgtcgccagcatacagcccgacgtcaccggcgtacagtccaacgagtcctgcgtactcgccgacgagtcctgcatactcgccaacgtcgccggcgtactctccgacttcgccagcgtacagcccgacatcgccggcatacagccccacgtcgccggcatacagtccgacgtcgcctgcatacagccccacgagtccagcgtactcgccgacatcccctgcctacagtccgacatcgccggcgtactcgccgacgtcccctgcgtactctccgacttcaccagcgtactcgccaacgtctccggcgtactcgccgacgtcgcctgcctacagtccgacgtctcctgcgtactcgccaacgagtccggcgtacagtccgacttcgccagcgtacagtccaacgtcgccggcatacagcccaacgtcgccagcgtacagcccgacatcgcctgcgtactcgcctacttcgccagcgtacagcccgacatcgccagcatactcgccgacgtcgcctgcgtacagcccgacaagtccggcgtactcacccactt

SEQ ID NO: 249 - DNA, 8613 bp, unidentified
  misc_feature 1..8613: note = Fanzor polypeptide
  source 1..8613: mol_type = other DNA
gatggccatcgcctcgaaccgcaccacgtgccaggtctcgattcggttcaaccctccaagaaaggaacccctgagaactgcttacaaactcatctaaagcatgtggcagcccccacgcgttcgtgcgtcccagggggggggggcgtactttcggcgcgctggccaactcttggtggccgcgcaagtaagccgcctcgcgccagggaagaacggacacggcccggagctttccaaacaagttgcacagctgtggctggtgtgcacgggtgctcgtcgtccggggtgtgttatttgggagtgcgctcgtccgttgattcaatttgataatgcgaccaaagcgcccgtgtcaggggttgtatgtcaaagtacggcgatttggctgtgcggtccagagacgcgagcagcacgatgcagaaagcgacaacggtgatcaccgttgataccgcatgggcatattgcgccacctcttgtcgaaaacacaacatcgccaaaagtccaagacagcaagcccatgttgcgcataccaccaggtgaacgtacgtttcgcatggcgggtttgcctccatcaacgaaacaacccaactcggaaggtaccaagccaccatgcacagcgacatcgctaaaagggctagaaggccaaagctaacgcacaagaagactatatctccgggccatgcatggcgaagcttttctcgtgcccaagtacagcacttttcccacatactgatgcagcggatttaacgcccggcacggcaggcgcgcgaggtgcattgtgtttgatgttgccagcaacgcaagccgtccgcatcagggtgcactcgctgccataccctccaccattccatgcagccgcacaatgtcgatgggtggcagttgcggcagaacctcccacgccacatgcttgagccatgtgtgcacacggaatccatctgggaagagatgccggtgctcaggcacctgcatgagcttttgcagcggcttgggcaagatgtgcgcactggcagggggaatgaccgccaggagctggatggacggcgtgatggtgaagggcagcacgtacttggcaccccagctctccggcacactggcgcgcatcaaataggcgtgcagcgactgtatcgtaggcgaataacagaagttgtagcaccactcggctgcaggggccgcgttgctggtgtagtatgtcatggcccactgcaggccctctgcgtactggcacagcacatcatcctgctccgtgcccaccgggaagagccgctcgttgtacgccatccgccacccgggcttgtttgggtccacaacctgtgcctcgctgaacctggcatccagggcagcaaagtatttccatgcgtgctctgcatccgtgtcgcgcgggtgtcgccgcggcacctgctggaccgcatggtgcactgccttgagcttggactcctccgtcccgaccagcagctgcaggagctggcgcaaggcatcgtactcgacgctgccattggcgtgcacaaatgtatgcacagccttcgactcgagcaggccccgtgcagtctggagcagggcgtccaggccggatggttcaggctcctgcgccttgatcttgatgtacgacagtgggggcaagaagtcgttgcccgccagcatgctgaggaagacgtagttcagcagcgccctgtttgggtcagccttgatcccaaccttcgcctgcgccaggctgctgatcttggagatgctgaccaggtcaaagtcgcgcagggatacctggggccccggcaaagtgtctgcacgctcgcgcatgagcgtgatgctcacctccgggtgcagcatgctcaacaggatcatgtcagcatccaggccgtagatcaccacgtttctgcagtcagggccctgctgcttgacccactggaagattttgtgctccccttcccctggctcgtcccaggagctgatgtccgccaagccagacagctcacggaccaggtaagcatgcagcttctccatgaaggcggtccccggtgtcacggcacttgagttccacaggctctgcgacggggttacccctttgtacgccttctcaaagatgctcatgtagcggcgcttgcgctgctgcacgagtttggccagcggcggaacgccgtccactgcgatgtaggccttgcatggccccaccagacgcacaatgttctgggtgtacaccttgatggcccggaacacctgtgcgtgcagctgcgcctcctttgcaaacgtgcccttgcgctgcaccgcttgcgcaaccgtgtgaattaagcaattgaaatcaaaacacagggcgtccacacggggcggcagggccttggtggtgacgttgtggcttttgaccaggctggcaaagtagaacgggatgcccatgttctcagggttgcacgcacaccgttgcccttactcctgttgtttgctcctgtccttaagacgttttacgtctccccacagccaccgcaaaatgcagatgaacccaacgagcagtgctctgtctgcgaggtgcaggggggtgtgcaccccagccatgccagccacggtgttcagcaagcccacaacgtcccacgcacccggggcttcggttgtggccttgtcttggaggcacttcaagtcgacaagcagtgcccccaggttgtgcagttcggccagccttgcactaagcctagacctggcggtcttgcaatacagcctctgcgcgtcgcacacgacgcctttcaccctctgctgcgggcacgcgttgctgtctcgctgggtgtcttgctggacgcaccttgcgtgcgtgcatttggacggtgcagatgccagcttcatccctgcacttaagcacaggaggagcggccttatgccgttgtttgtgcagaacatgcagcgtgcacttcgttgcttgcgtcagcacttgcgactataataaaggcggacaggtgaaggagggatgaataatttgatcgtgtctgagtatgctgcacttgctggctctgagccatccgctgagttcatccagctgtgggcctcaccactcattctgaagcagaaaaacgtggtggatcttcgcagggagctgcttatgcttccccacgttcacgagcgggtgaccaagctggccgccaagaggttcattgcgctcactgataagacgccgcctgaggactttattaaaggcacactggcgtcgctggtggagtcggggttcagcaacgacaggatggacacgctgatccgcaacacgagggattaccgtgaaaagtacgcagcgattgtgtcggagatgtggcaagttgtgaaggaggagatgcccacggaggaggtggtggacaagttcacctttcggttcattgacgacggcaagtacagcgttgagcagctcaagtcagatatcctcaccagcaagagctgcggcacctctgctgtggcaaaaattatctcagcactgaaggccatcgaccagcagccggctgctcacgcgccagatgcctgcatccagagccaggaggcccagacgacactggacttcatcgccgcttacgaaaagcagttcaaccgccccatgactgcacgggagctcttgcggctcctgcccaaagttcccagcatcagcgatgttgctgccttcgtgtggaaggagcgtgatacgctcgagcgtgtgtatggccgtgtgcgtgatgcgtacgccggttacctcgaccaggagcacgacgtgtacgccttcgtcagggagcacttgcaggcactggatgcaaacacggacgaatacgtggcagacctcgtacgcctgtttttgaaggacgagaagtatgtgagcctcatgaaagcgtgtgttgagggcctgtaccgtgaccgctaccgtgtcggcattgaagcgcccaacctggataagatcttgctcaatcttgtcaaccgctcagtcatgctcacagacaccgaaaccatcctgcagattatggactcctacgtgctacagatggaggacttccttcgcagtgttgcagacgtgtaccagggacacttggagcgcacgctggagggcgaggaggagacagagtacaagaaccgcttccgcaacggagatgtggacatacagaagatcattgacgaagtgcggtcgtccttcgagtatattgacgtggtgaagtcgctggtggcaaccctgtgcaagagcgctggcgtgcctgtgacacccgcaaaagtttgcaagctggtgcagactgccctgtctggtgcggactcgcgctttcccgacaactcattacttgggctccagcatggcgtggcacagctgatcaccgagggagctgtctgatgtcacgacacatacaaccgagcacgggcgccaatcagttcagccagttgttacagaaagtcacttcaggccgctccgggccgtcctgtcaggccgacacaactgttgttcaaagatgcaagccattgttgctgccatgcatgcgctttctcacgtcccagcaatccgacttcacacatccacgtcgctctcctcctccaccgcgtccaccgcctcaaccgcctccaccacctccactgctgcctctgctgccacctctgcggcagtggcggcaatgctgcggggctcacctccgtccagctgaatgcccttgaacaccttgccaaagaacgacttctccgagtagccgtcgcgcttggtgcccttgcggaacgagtcgtgcagtgtgatgcggatggtgtggtacttcttgggcagcatcttggtgcccgcagccgtcttcagcgtcatcttgtaagtggccttgtggttgggaatggatggcccgttgatgacaatgccccgcttcaactcatccagcccgtcgctcgccagcttctcgttgaacagctccgcgctggtgtcgaagtacaccgtaaagaacttgcgcacgtcctctgtgcccagctcaatgccctcatccttcaggttctgtgtcagccgcttcaggaagtcggatccattgatggtagactggcggttcttgggcttgctggtcttgctggtcttgctggtcttgctggttgccccaccttgctcgttcagggtgtccgatgcggaggcgtccgactgggtgccctcggacacggaagctgacaccacgccagccttggtgcctgactcgaccacggcggccacggcgtccgcgggggcgggggtggcatccacaggcgccgctgcggcggcggccatgtccagcacctcctcctccaacacgttcttgttcttgcttgccgcggccttgttggcagcagcggtcgaggccttggagccagcagcagacttggtgcggggggccatgtctcttgtagtacttatccttgcttggacaggaggcgttaagtcctttttaggggtaggagatcgggtttgagtgccaaagggcttgctgtgtgctgtgcttcaggttggggacggggtgggggagctgtggtgtgcttgcttttcaggctgggggcccagtccttatgtatgattttgctcgttggtcagggacaccacgtcatcaacgagcatcttcacctcacctcctccaatggcatgtacgtgcatgccatgcttttcacgacggtgctcatccgcaccgtgcgcaccaggcagcaaggaaaacagcatacagtaggtctcactgagaatgggacagcgtgggggttcaggcctacggaactattgtgtaaggtcgtttcatgattgacaccgagactcgttacagagctgttgtcgactacaaatacttcacaccaagtctgcgcagagtggcagccaagtaccatgtatccaaatccagtgtgtcacggtgggcacgcattgcaggcgtggtaaagcgaaaggtcaggcaagggaagcgaagcgtattacagcctttgcaggacgccatttcgcttgctttggcgcagaaccccttcctgaccacatctgagttgaccagcaaggtttacgaaatagccggcgtccctgtttctcgtgcaaccaccgcaagagcccgtgcacggtgtggattccggtacaaagtggcatacaggacagtcgcccaccagcacgacaatggcaaagtcaaggccttctgtgagcggtacctggcctccagacagctcgtttgtattgacgaaacatacttccgtgttggtgcgtgcaggcgtcgaggttacagccaagtaggcacacggctgaatgtggcagcctccaagaaagtacgatgttccaagttcaccctgatcatggcagtctcacagcacggtgttgtccttgcaaagcttctggaccacaactgcagaaagcaagatttcgtgcaattcatcctcgacctgccgtgcagcaggggtgacctggtcatggacaacgtggccttccaccactccaaggaggtgcaggttgctatggaacagaaggggtttgcaccactgttcattcctccgtacgcaccggcaacaaacgccatcgagagtgtttttcacgccatcaaatccaattaccttggagcctgcaccaaagtgctcatggaaacgggggtggagcacatgacgccagtccattacgttgaggaaatgcacaggtccattgcttttggtgagacattgcaactcgatgcttacttcagggaagccagacggttcatacaagcaacacttacgggtattgccacgaacccgttgttcagcttcaatgggtacagcagtaaatagacttaaggagtgtccgggtggatggaataatgacagacaattaccgcagtcccatgacaccaattgccccaccatggccgcccagccagtacaaggattgctggctgactgcaagtactgaaacagaggtctgactggtacccaaatagacttaagggacggaccatacatgtacagtatgggttcggcggctacaacatgatggcaagtgtctcctgctaaccatgccccgaatcaaagggtcttcagggcctgaatgctgcacacgggcgaccaaccaagcagtgttccaggacgacaccaatatatcattggagttcaacaacaaggcatccgcacaacaggatgatagcggtcagcgggcagtctccgtcaagctcaacacagtgctcaggccatacccagatgcatcggcccaagccacacaaatggagagcttcaagcagctgctgcaaacaaccgtgatggtgggcaaccggctggaggctgaggcacacgccttcgcaaacttccatgtgctgagactgcttgatgcacagcaggagctgcccaagatcgacgacgagttctactaccggtgcctgcgctgctgctcggagccggtcacagctgtcgcccaggacggccaatggaacaccagtcgcctcctcttcaaccagctccgtccacctgggcagctgcccgtgcaggtaccaccgcacatgggccagctgctctccagcctacggatccgcatgtccactgctgccaccctccacctgcgtgccaatttgggcaagcgcctggagatctacctccggctcacccagcgcacgcagccccctgagcagcgtctgtccacacgccagcgcaagctgctaatcaaggccgtcgtggagctgccgcggatgccggtggccaagctgaccatgggcttgagcagcgtcgctcgcgagcaagtggcgcccctccgacagctcgttggccgaggccacctgaagatcatcagcggcaagcttcccaacacagtgctgcaccacaccatccccttcctccgaaccgtcctggctaccatcgagacagcacgtgcccaagcccctcctgacgcccgcgtccctggcaagcttttcacgctgctgcccatgaagcagggcttcaccatctcccacatgcccttcagcagcatgctcatgatcgcgctggtccgcgaaagcggactggcagccttcaaaggggatggcaggcagctgacacccgccgagcagaagggcatctgggaggcggtgctcaacgtgtccaggctggagacccgcacaagccacttcgacaattacctgacaaccgacggcacatccgccagcgtgctcatggacagatccgccaacctggaggcaggcaccaagagcatgctgtctgcagaggagtgcaaggcgctgctgtacgaccatgcagcagacaaggtgggggtggatcccggcatcacggacgtggccaccaaagcctgcttggacgggcgcacagcctcgttctcttcagccaggtattacgaggaggccctctacaacaccagcaggcggcgcacggaggcgtggaacagggagacggaggacctcatccagcgctttgacggcttcagcgcggagactgcatcaactgacgcgtacagcgcgtacacacgcgtgtacctggaggtcctgggccctctcctccaccaccgcgcagacaaagggtaccgcaacatgcgcttcctccgcacatccaagcaagccaagctggtttcggacatcagcaccttcatcgcgccccgcaagccctctgggcagggcgtgacagtcgtggggatgggcaactggcgggggcccggaaagacacccatccggcggcgcacgtgcggcccgctggagagggtgcgcctgcacctgaagcagcgcagcgaataataataataataat

SEQ ID NO: 250 - DNA, 8613 bp, unidentified; identical to SEQ ID NO: 249
  source 1..8613: mol_type = other DNA
  misc_feature 1..8613: note = Fanzor polypeptide

SEQ ID NO: 251 - DNA, 21002 bp, unidentified
  misc_feature 1..21002: note = Fanzor polypeptide
  source 1..21002: mol_type = other DNA
gtgctgctgacgcgccagcctgccgagggtcgcgctcgtgatggcggtctacgtttaggggagatggagatggagtgtctctgggcacacggaacgatggggttcctgaaggagcggttcatggagtgctctgacaactaccgtgttttcgtctgcaagtgctgtggcatgatggctcacgctaaccctgagagcaacctgttctactgcaagtcttgcaagaatctgactgagttcaacgagctgaggattccgtacgcaagcaagctgcttgtccaggaggtcgagacgatggccatcgccactcgattcgtcacggacgcgtagatctttaatattgggttttcagataccggatcgtattggaactgatatcgtggaacgtaaaagcatggacaattattattttctttccggtcgatgagatttgtaatacagtcggagacgaaagccatccccattatttgtaagcaagtgaatgcagtaatggatcagaaatcgtagacattttagttctccgtgtctccgacttgagtttaattttactgttccaccgactgtatgtaaaaaggtacaccaatcccagtttttcttcttattttcgagtttgttgttgttgttgtgttttgggggtggatgtctttggggtttgttggttggtggatgtattttggggtttttgggtggatgtctttggggtttgttggttggtggatgtatttggggttttttgggtggatgtctttggggtttgttggttggtggatgtattttggggtttttgggtggatgtctttggggtttgttgggtggtggatgtattttgggttttttgggtggatgtctttggggtttgttgggtggtggatgtctttggggtttgttgggtggtggatgtctttgggggttgggtggtaccaatgacatttttgtcatttgatagttttaactgttcttttgtatatgagttcggagatatatcaaagataacatgtacatctattggatatttattttgttcttttattaattttagaatactttttggattgtctaatattttttcatcataatttagttcttcgctaccgttcttaaatttcaaaacattataatttctttttccatttataaacggaacgtattcagcgtagaaatcaataaagtcttcttccctcgtagtttcgtttattttgaaattaatacctttcgagtttgttgttgttgttgttcttttaggtgttggtttgttgagttccgttcttttactttgctgttggagagttttgtgttcaattgaagaataattttggggtttctttttaatacctctcattgtcaattgagtcgggactaggattgttttattcgatttagcgtttttgtcagttgatgctatgctgctttcatgatttaatattactgcgtctgctattggtttggtagttttaacgttgatttgaacacctggtacagcagtattgtgatttgaattacttcttgttacgagacgggttgtgtttttcgtggtggatgtaaccggtgaaaaggtgtttgagttatcgtttggggtgttgaagatgtcatgcccggtcatgcgcacgattctatcaaacatttcgatagctgtgcgcaaatcatccgaatcatcagtgatctttgtattgagtataagggaagatagtgtctttgccacgacgatattcatactggacggaagtgtatcttcaagcgtttgtttagtttcagcactcaaatcacccggtcttaattctgttctgccttcgttcgttgttttaacaatttcgttaacggacttcacgagatcatcgaggttaattttgggacgatcaccttcattgaaatcggtgcctatataatcgatctgtttcctgattcgattgttgaattcggtggcaacattatccatggtatccgacttgcttggttgttgtgtgttactaccggaattattagtaacaatgttccatattttggtacccacagccttgctgatttcttggatgtagtagtacgcgtacatgacagaggccattggggggaacaatgtgtgtttggatttgtcagttacaaagaactcaagtgtcttgcaatcttttagggttgcaatagagaaacaacatttgatgaataatacatcattctcatgattaacgatctctatcttcgtggaatctattttgtcaggccagcgagaggctatgcgtcgcacgtacttcaagatagacgcggacagattttccacgctcgcaggggaagcgatgtccgtgaaaacgacttggcgaccgtcagcagactcggttacaaatgaagatgattgcgatattctagactgcgaagacatacctgatttatacaatatctctgattgagatcgtgataattgagatgatattcctgattgagatcgtgataattgagatgaaacgcttaataatgggggtatcaaaacggaaatagaatgatgttcttcagaatcacctgcccctccagtgagaagagtgcgatacttagaaccgattatttcgtacacaagcatttcaagtgataatgtgttgttgtcgcggtggcatttagttttagaattaacaaggacgatcgccattacgagtgtcaacgcacgcatcgcaacctcttccaactctcgtggaagcttagagacacatcccacacgccattttggacgcataatgatgcgttcggaacccaattgattaaaccacctaaagtgttcgttcacacgccgagctacagtaacatgcctggcaaatgatgacgatgaggcggatgctaaagacgatgctgttctacgcaatgcggtcgctacacggtctggcctgatatgtacaacgacgttctcaatcaacaagtgaatcagccaaagccccaccaatgctcttacgttcagggaggttcccttggacagcaactccaatacggtgaccacatcagaagcaccagatacgtctattttgaagctattgcacgatatcttgctctgaccattggcccttgcatccatggctaccgcttctgaccgaagaaatacggcgcccatgcaggcgaacgtatttatttttctatgttttcttgtggatttgtgcagggacagagacgacataatatcaagcaggcttttacacatggctttattgcctccatttgatctatttatatttcgtccgatccaagtgcataatacatcacatgaatcgtcttgttgaactccacccgttggcatgtcggttggcgtcgagggttgctttacaatggaacgttttttttttcatcttcaagagttcttcaacgtttcctcaggcggcgcagtcgtgtgcgtgttagcgacggcgcagcacctgtagggggcgtacatgcccacatccggagagaagcgcacgatgcgaaccaaatggccaggacgcagatctaggtaccgtgccatcgggtcagagcacgcgataatcggaaagtggtacttcgacttgactcggtatcgtgcgacgagttgctcaatcacgtgcttgtcgcggatgggttcgtggcggggcaccaactcgtgacgagagatgttgaactgcagttcggagagacagaaaaactgcacgcagcgacgaacgctctcatctagacccctccgacttgtgctcaataccttctcgcgagtcaccaaaataacctctcgaatgttgttgccgcccacactggcacctcctccaccacgttgttgatgctgattctgactgtcgccaccacccatcttggtggtataagagtccgcttcggacaacgccttttcatttatatcgttgttgtcattctcggtgtctcctccttcctccataatgacgtcatcttcttcgatatcccccacaaaatcctcatcttcatcttcatcatcgttccgtctggcaaccgccgcgtccttccctacattattttcgaggggggcgaggagtttcctcacgtcggggagcttgaacgtttgattgagactgtagatgacacggtagccgcagtctcctggaaggtagacatggaagacgccccccgatgatggggtgacggctctggcgtgcaggtcgagagcgatcggggcggtctcctcaatggataacgtctcccctctgtcgacgagcatctcgcatattaccgtgaggctcttgcggacctgtttgtccaacatttttgttattaataaattctttagttatttgctttacactcgctcacattttaggcaccactttctaattggcagtgttactgaggcataatatttttgccacgaaaccagccagcatcgtggggatgttgtctgggacgaacttgtacgtgttttcgaacgtctccttattcacaatataatatccgacaccgtccgtttcctggacgacgtagtctcctgcgtccactaccatttgcgattgagagcgtgagctactgaacgcaagcgtttgtgatgtgtacacggcggctcggcgtctcccaggcctggccgtcaacgtggaccccacaatgtcgtacagcttgagtgccttgggaatggtgacgttgtaccggtccgatttgggattgcagatcaccaatacggcaacgacaccttcatcggggaccatcatggacgcaatcgtgaacgtcatgctctgcaattcatcgcgtgtgcggacaaacttgtacctcaatcgtttcttctccacatcacggaatttaaggtcgtccattctgatgaggtttgtgacatgttcaacgtatttttaaacatttatactgtattttaaatgaagcgtggtgcggtggcaagaggattcggaaaaaaaataaaaataagatataacgcatgaatgcagctcccattgatgaagttcgacattacggatatccgccatgacaaggtgattgtattgataggaaagagacagaccggcaagtccttcctggggcgagatattctctttcacaaccgcgcaatccctatcgggaccgtcattttgcctacagaggagtccaacaagttctacggcaacatgattccgcacatgtttatccacgacgagttctctccggatatcatcgataacgtgataaagcgacaaaagttgttagctcggaaggtagacaaacaaatacaggtgtacggttcatccaatatagacacacgcgctttcttgattctggacgactgtctttttgacaagacgtgggcaagcgacacgggcatccgctatctgttcatgaacggtcgtcacctccctatcatgttcatgatcacgatgcaacatccgatgggcatcccccctaatcttcgaacgaacatcgactacgtattcatccttcgtgagaacgtcctctccaaccgaaaacgtatctacgataattacgcgggcatgttcccatcgttcgacatgttttgccatgtcatggaccagtgcaccgagaaccacgagtgccttgtgatcaacaacaatgtgcaatcgaacaaacttgaggaccaggttttttggtacaaggccgagccacatgaccaattcaaactcgggtcaaaggaggtgtgggaactcgctagaaggaccaaacaaaaatgggacgatggtgcagattcggatgaagagggaggagactcgaagaaaccgtatgacaaacgaacttatttacaaggaaagggggggaaacaacaaacacaaattagtgtcaagaaaaccatgtcctgatacacgtgtcctgatgagaacaactgtagtataatttacatgaacagaatctcgtctccgttcttcgtggcgttgtccttgttctgttcctcctcctcctcatcagagttcttcttgacgttgttttcgtcgaggtacatgtcatcatcggtgggcatgaacgcgtagccgtcgaggttggcaggcatgatcatgcgcagctggcagaccttccacgtaacaccgaacgatttgttcagccccacggaccagatcgactgaagatggatgattgcggacacgcgcgcacccttgccacgcttagggctccggaggatctctttgaggtcgagaggctcgcggtcgcctccgtacacagggaaacggaaagtgccatctacgaaggggaggttcagcttaaagttgggagggtacatcgtcgacaactcgccggtatctttgtccttgctgtaccgcatcgatggggtgaacatgtcggccaccacatcacgagaggggtacttcttcttgaaccacgcgttagtgttctccaatgcattgtcgatcacgtgctcagaaacgcgctccatcatgtcgaaaaaatcctggacgccttggtttgtgtcccgtccagcgaaggacctttgcagtgtgtgcttgtcaggtagcccccgctctccgggccacacgctgataccgaacggcagagacatcatgggcgtctgtacaatcaggttccggttgttataattgatgaagatactgcgacctccgttgtctagctgcttcggagcactaaaggtgatcttgctcacgtcaacatcgcaagggaaggtgacgtcgctcgcgacagacttggacgtagtagtcattggtatagggggaattaggatggggtggtgggtcaacaataaatgagaggaacaaagctgatacctaaaacatatcggatcctctttatacttgtttgagtgtgccatttttattcttattttttttgaaatgtgtaccgctaactttcttgggttttgggggcatggaaagcattagcaagtcaggatcgtaaaatgttggagagcgacgaacattgtcgtcacgcagggggggggtgtccacgttttctcgttggattgtggagcgttgtttttgaggtgtattctgtgtttgttgttgaggcggcgtattatggggtttttgaggtgtcttctgtgtttgttgttgagacggcgtattatggggtttttgaggtgtcttctgtgtttgttgttgagacggcgcattatggggtttttgaggtgtcttctgtgtttgttgttgagacggcgtattatggggttttgaggtgtcttctgtgtttgttgttgagacggcgtattatggggttttgaggtgtattctgtggttgttgttgagacggcgtattatggggtttttgaggtgtattctgtgtttgttgttgagacggcgcattatggggttttgaggtgtattctgtgtttgttgttgagacggcgtattatggggttttgaggtgtattctgtgtttgttgttgagacggcgtattatggggtttttgaggtgtcttctgtgtttgttgttgagacggcgtattatggggtttttgaggtgtattctgtgtttgttgttgagacggcgtattatggggtttttgaggtgtcttctgtggttgttgttgaggcggcttattatggggttgttgcggtgtcttctgtggttgttgttgagacggcgtattatggggtttttgaggtgtcttctgtggttgttgttgaggcggcgtattatggggttgttgaggtgtcttctgtgtttgttgttgagacggcgtattatggggtttttgaggtgtcttctgtggttgttgttgaggcggcgtattatggggttgttgatgtttacgcgtgtgatttcggtgtttcggtccgaccgtattggtttcgctgagattaacgatgtccctcaaactcttcgatagatcgaatttgaacaccttgttatggaggtgctggagcgatgggttcaacagtgttgtcaatcgtatctggaatatggcaggctcgtcccggttgttaatgtcggtgaagatcgtgtaaaacaggttatcgaagtctttgagcatgagtattctggcagaggtattgttgtatttacgaatggagcgcaccgacttgtacttcataggcgacatcttgcgacactcgactgcagtcgtgtcaccatcaatgtcgtatgtgatcgttaacatgtgtatagcgatagcttccatctcttgtgtgtacttcgcttgatcctcagcacacttgagcagtcgatggtcccccaacgacattacgtacatgtagttcctggcgttcctggattttaagaagctagagaaccctccgcgacagtgatcgatgtagtgaccaccgtgaatcaactcgttcatcaagaaaaatcgatcaagcacgctccctggatcaaacttgagctccggctcaaagctcctgtagtactgtccagatagggatacatattttatgaaagagcttatcttatggtcggttccatcgggattcagtagcttgttcattactatgctgtagatcatgtaggaaactatgtggaaggctccggcaatcgtgtcgcggtgttttacactgtccaacccgtccagcaactccttatcattaattcctataatggtcttgtaaatccacgtattggaaccgtcacgtttggcgacaattacattggttgtcttgtactcgctaatgcgagctatctgattgaataacggagcaacgctaagctctagatatcttttcaatatgtccaagtgactgagtcggtgttcgttatcaatcatcaagacgctcatgtacgctggtaagttatgctcgatgagacgctgttggattaccagtccgaaaaacagttggcgcatttggtttcctgcgccgtggttggggcgcggcacacctttgccgctcgaaaacattgaccacatcgacgggtatggcttgttggagaaattgtcaaaaacgaaatgcgcacacgacgtgatgaaggtttttattggagttgaggaggacacgatttcttcattattgagtccaacaacgcttctagatgcatcgtctaagtacgggttgttcagatctatggatccgtagtgtttcgatacattggggtatccgatacccttcagtttcttatattcatagttctccttgataagcatttaggttcacccagtgcgcaaattattggtatacatttgttcttcaaattaaatgatgtaccattaattgttacactcagaccggtcaataatgttacagtatattgaatcaattccaattctctatgtacaacttggacagacggtcgattgttgtacacatgtacacattgctgcaaagtttgaggagagtggctatacttgcgaatgtaagccacatgacagtctcgaggtggatctcaaaccccactaaaaaagtgtacaaacggaataaacctacaaaatcggatgtggtcatagagttcttaaaggcgtcattaaaaatagatccattcgcatctctttctgttcttcgtcataaggtaaaggatgctttcggatttgaggtatcaaaagagttgattcgcgttgtgataaaatggcttgggctcacaaagaaaaaaacaaagttcttctccaggcctgataacttatatgagaaaaccacgtcattcataagccaaagggaacggttaaaagaggaagggaggacttttgtatcgatcgacgaaacttcatttggaagacatacgagagacgtgtttggctactcaccaaagggagagctactggttgtaccgaggttgagacctagggtgacgacaatgtcggcactttgtcttattcaacaaggcaaaggagacatttattttaacatcaggcaagggtctttcaacacacatacttttgttgagtttttagaaaatttggactgtccaactgacacagtaattatacttgacaacgttgcgtttcaccactccaagaaggtcaaaacacttgcagcttcaagggggtgggagctcctatacactcctccctactcaccttggttcaacccaatagaaggggtgttctccatcgtcaaacgcgatttctataaaagccaagatgtgtataaggctttgagttctgttaaagagaaacacgtagaggctttttttcgaaagtcattgaatacaatttctggaccttgatacaaggaaatagcgacattggctactaaatggagacgatagtcaataaagagcctccggacaagcgtacgcgaccggaccaggcgtccaaaattaaggacaggaaaaacggcgaggagaacgtggtaaagtgtacactgagtcggatcatagcggataaggacaacaaggacgttatcatcaaggtgattaaggagcgggtcgacagcgtatccaagaggacttatcttgccggtgttgcggtgaaccggatattaaaagaagtcttcgaaggggtaccagatgcgcaacttcacaatgtaagtgtccctagcgtcgaccagaacttcattcggcagcttatggtggggtcgagacaggcgcacatggagacgagggacgccacagtcgaaaggttctttcacaacaattattggtttagggagaagattgaggggcgcgaggtaattgtgaaaaagaagaaacaatacgtgggtgccatcgctcgctacgatggcgatcgaaacctgtacagccatgcgtcgaagaagtacctgaccaacttcaataaccactacagagtccatctctccacatggatcaagaagttcgtttactcgaaggaaaacaggatcttggccaaggagttcaaagatgagcacggcattgacgagaccgtattccaccgatacctcctctacgatatccactcttggggagtaaaggaagacctcatagcgatacattcgctcctaccggagcgaacaaagatgttgcttaagattcagcactcgatcatcggacgggacgagatcaaccgacagtggctcaagagcgtttccaacagggccaagatgatccggtacaacgtctttatcaatcgatacctcgaggccacagaggacgagggctacgccaagcaggtcaacatcgctcccatcccaacagtcaagcacgccttcatcacgatagacatcgacggcctactgggcgtcctcaaggatgtgggtctcgtcgagagtctcgaaaaaacgctgacgaacaaggagcactaggagtcggtcttcgatgtggaaaacatctgttctattgggaaaggtgtgttaacatgcaccatagacactgacggcgtaatggcttgtacccactttcttagggccgagaagaaaaagatttcaatcaaggacgacggaacggcgattaagaagcagaccaagactctccgcgagttttccgagtccgaccccaatgtggtggtcgttgcaaacgaccctggccgctgcaacattgcctttttgacttggaagaaaaataaggtcgaagaaaaagataaggggggtaggaagaggaagaggcactgcgagttcgggagcaagagactcacacgggagcggtactacgttgagagcggggtcttcaaatctagagggccgaccaagaagtggttgtctaacatccaggactgccttgacgacctgaaggacaacagtcccaagcgcacatctctagtgtcgtttgacgcttacgtgactgtaatggtcaaccattgggattctcgatggggggagatgtccaagtcgcggtggggcgcgcagcgcctgcggctctacggtggcaagaaacgtgtcttagcacgcttcttcaatgaggtccacgcggatgtcggtgagaggaaaacaattgtcgtcgcatgcggttctgctaagtttgcccctggtggcaagggtgaaatttctgtccctacaacgagcgcgttcaaggcgtttagcgaccgtttcaaggggcgagttgccgtcactgacgaattccgtaccacacagatctggcacaaggacagcaccaccgtcctccaaagtgtgcagtccaaaaaagaagggcgcacggtttgaggcttgctatggtgcagttccaacatggagaacagcaagttgtttgtaaaccgtgacctaaatgcagccattaacaaacagtcggagacacaaaaacaatggtgttccactgccccgtggatttctacatgtacattattatcagccccgcggaatcacaatacctctccagaccatgtttcgcaaccagtcacaatccgccgggaggcaggaacacccattatttgtaatgctgccacacacccaacttgtccaatgaaaaaatgaatatatcggttgacctccacgtgggatgtagacctcgttcaccgccgggtcaatcgggtagaacatgccgtggcgctgtaccttgaaaacttcagaattcccacatgattctctcgatgctccgaggccttcgcagaagccggtagatcatgcttctcagtgagtacacgaaacccgttgagcaaacgaatgtatccttgtagtcgctgcgtcccatgcagaggtcgtgatctgctatctcaaaaggagtcagaggcgcgtgcatctcattgtcagagagaaactgttgttttttgacgaaggtacgtctcagtacgtcccagcacgcgcttcttcttgtagtatcattgattactccatgcgttcgtgcatgacgagcgcgactctgctgcgaagagaccgtcgagtcggcctgcggcgatgcggttactggttcctacatacgggtgcacttctccccgcatcggagcatttgcgtccgtcggtgtccagggacgcgcgtattgaatcccttgaacacgtacttcataacgcgttcaggccaccgattccccaaaaatcgagttccacgaagaacatggtgctgcgcattgcctcgatgaacgtcggggcacagaggccctccagagcgtggatgtgggttgtaagagatggcgaccctggacggtgcgatgtcaaagttgaggataagtgtggcaatgtcctcgatcagctcatgatgacttggatgacggggtgtctcccaccatactgacgatgttcatggtgtcgagtcctgatgatttttccggcgtttagcctctcgatttctgcgaccatgctctcggcctctgcctcgtcatcatgcccacaaggaagatgtcgtagtccctatgcgtcttctccattccagtgacgacatgcctagcgcggctcctcctgcgagcactagttttccggcacccagtcgcaacaacgccagcacctccggtgggagggacttgtgcagttgctttgacatctctgctaccgtgagactttcgtccatcactaatggctcggagatcgagcttggacgccatcgagcttggacgcgaccgagcttggagtcgatgccgccgaagagccaattgatgtttcgggagctcgtgcattctggtggacacgtccgccggatcggggacacgtcgtcgagatttaccaggcacgcgttccttgtggtagcgttgtcgctcgtccgacatttccactccagtgccatggcgtcccacatgttcgggttctgacgcaagatgtccaggctagcattgacagcttcgaggagccgttgcaacctgtattggcgcaaaccgagcatgtcggcctccacgcacaagcaacggaaacaattgtccataatgcaaccgtccacactgacactgtcattcataatgaacttgtcgtcgtcattcagaatgaaacggttgaacatgaacatgatgtctgatcgcgagtgtgtattggcagtctttgacacggcattgtagatgtcgatgaagctggtgcgagtgcatggagccgggacgggaatggtttccgattcaggttccgatttaggttccgattcaggttccgattcggagtcaggaatgtggtcaggactgctgtcaggaatgtggtcaggactgcggtcaggaagtggttaggagacggtcagaatgtggtcaggactgcggtcatttagagatgtgtagcacatgtcaagctgatcatccagcaggggctcgaagtaggagaatagtctgagcaccttgctgtttgaaggaatctttaacgtttctccgttgtggaattgcagcgtgacgaaggttgtcttcttgttgctcgcctcttctgccgccttcatctttccttgcacgatgtcgccacgtatttcaggatctcgttgggatgtgcaagagtgcgttcttcagtttttgcagtgttcgattgtgttttatcgcatggatgcaggatgcgtgcatatgagagggggcggatccattttttgccttacttggagcgatgaccacgaagctgatgttcctgttgcggcgagcgctcttgaagtccactcctgggatgcgttgtgttctggtccgtcgtagtattcttcctcttcggcgagtgcagatcggaggaaccaatagtgtctgcggcacgggttatctcggtggggacgtggttcagaatcgggaagatttcctcgaggtgcttcactagcttctcgttgtccacgtcaacaacacaaagctgtctaagaagcactcctgcatccatgtggttcttgtgcttagacacgaagggtgtgatcaccccattcccaaacgttgtcctgtgctgaaacttgggtttcttatctattgctgcatcaagacatctgagaatagacgtgttctccaggaactgcagtgtcaaaaaaactctcatgtgggtaatctacgaaacggtattctcgttttacaccttaaagatgtttatgaattggagttgattttcccccttcttggagactagcttcatgtgttcaagtggaacgggtagagtggacgagtcgtgcaacgtattggcggtacatgtttgcttcctttatgatttgagggacgcagaagtgagaaccaattggtttaggtctctcacttgttctaggatgactgcttggttccctcctattataggagtctgtcaggaatacgggcgcatgacgaacactagttgatcttctgactggggcctatcacgagctttcgatccgagtctacccaaacgcggtagcggatcgcttggtgatagcgcccaaattggcgtcgctgaagaacacgttagctacactggaggttggaaggacaaccctgcgcgaccgcgtattggattcctttgtgatagccctgttggttgttggtttttacatcacgcagatggggggggggggagcattgtgacggacgagcttcttactatttttacatgttttataaaaaaaaggcgcgtgtgacacgatgcgtaaaaaagccgcatcgtgaaagaacccctttccaaaactcaaaaatgttgtgcgtgatttttgcatcctttgcggtaatttcatggtggtgatcgtgtgctagtgatgagtgctatccatcccatgaattggggaaaaaaggaatgcctcatggatgggaagatgatccctgtcctaaatgaaaagtcaaagcggcaaaatcaccatataaagtcccccccaatgacaaaacttctctagaaaaaaccaaggatacccccaagaccccacagtccatctctaaagcggattcctccactgcaataaatgccaattctcaagaaccaaataccgccaatgccaaccaaccaaataccaatgccaaccaaccaaataccaatgccaatcaaccaaatacacccgccaatgccaaccaaccaaaaaccaatgccaatcaaccaagtacacccgacattgattctaaagaacaaaatgcacaagcggaccccactgtaatcaaacaacacgcaaatgccactttaccccccaccgatttacctcctgatactggacaccctgtataatttgaatatcccatgaaacctgctacaggtccggggttcactactactgtttaaatttttagttaaagcgttatctgcattgaaaagtgtcttcagtcatcatcatcatcatcatcacaatgagcgttttctcataccaagttgcgtttccagagacctttccatcattgtgtaccatatcgaccattcatacaacggatggtaggtcgaggtcgttgttgttttggcgaaatcctttgggatttggttgagccgtgtgcaagcttcagtacgaagacatatgcaggactcctgagtttccttcacatctcgtctgtgttcggcgctcatccgcacgcgcgatacggccgtccctgtcgtccttgatggaggataacttgaaagatggccatctcatggcattgccttgagagcagtggtggaaagtacctcccgatgaggacacggtggtgtttccccacattcaacaaccttttcagaggcgtgttggatctgtggaggagattgctaagcactcggtaatgcgagcactcaggagcgcttcgtggtgttcaagagattctttgaaaaggcttgcggagtcgtggacggaacgacatgtctgacctccttggcgagttcagtattggtgtactcgtgactactaaagggagcgtcttcattgtgtgcatatgtttttggagaactcctggggatgcacatggaattggtgtcagagttgcgcaatgtgtgatgtactctacagggagttctggaacattgttccctggccggatgcccccgctgggaaaagtatatcgcctctggggggaacgtgcatgctctgtaggctattgtagatcatgtttactgtctccgggcgcacaggcttgtttgcccacggggctcctttgatgaacggtttgggtgttcgaccgcgtttaaggcgcgtgggggatctcgggtactttgcggaaagtgttcagaatccagaatcggccttaacaggacactgggtttctgtttcttgtaatggacttggtagtgtcgatggatctactcattgtaacggactcttcttgtattgaggacataaaaaagtgtaaaggaatggcgattaatgattgattactaaactttaagatgatcgtcccagttcgttgcttacatgtggcaagggtcgttgcagacaagtggcgtgcttacaccgtatggcgacgagacaagaccttgaaggacgaggagcgtgggaaattcttgatacattgggcatcaagcgcatatgttgccggactgtcatgctaaaatgtagacatgatgtttgttttgtgatacaagtgcgttctttcgcaaatccattttatttcagatggtgaatctcccgacgtctctttgcccccccctccaatccattatgatttgcgactctataaggaaatccgcctcttacgaaacgtgttgtatgcgtatctctcatccctgatggaccgtgccaaagatgatgctgtgcggttgctgatgagcgccatgtcctcggttttttccagaaaaattgcgtacacagtccagtccggtttcaaacatttttgagtgatgatgaccactagctacaccgacacagaccgcgatgttttgttggatgtgtgtaatcacgtagcaagaatcgtgtacacaagaccgcatatcctctacgatggtggaaggattgagccaggtcgaagcgggcagataatcggaagatcctaagtccaaaaaatggcatttctgcaaaacatacatacgacgagactctgcgaaacatatgtctatgatatccgaagcatccgagaaattgtgaagatgtggaactagataacggtatggagtagtgacgatggagtagatgacgatgttgaagtatatgatgatgttgaagtagatgacgaggggtcaagaatagatgacggtggatcgatgtaagttgaagtagatgacgaggtggagtgaggaagtagatgcaaagatcgttgaagtagatgacgatgttgagagtagatgacgacgtggaatcagatgacgaggtggaagtaaatgaagagttggaaatagcagacgattgtttctggtgatgatgatgatgatgatgattgatgattcgattgattcttcacgtacccctaaccggccatgttggcggatgtgtgatttcgtggagactgcacataatcatgtgatattagcaaatgtccgtgtcctcctcatcccttcatctgacagggagacaaacagaaggacgctatagggaagttgacgatgagagttgatagtatcatgaagagcaactcccatcgcatgcgtgcccgaatggtgcgaacgtcagtgttcagtgttggaagagatcctcggatgaggggtattacatacttctgaaaaacaaatttgagccgcgtaattgaacgcaaccacccctctacgcacacgaggtgattgcaggaagggcgagcgcttgcacaacatgattgtttaggacagcaaggacaccgtctgaaatcttcaacggagaagagggaattgggggggtacagaatcttggaggttcgtcaaactggatgccaacgaccgacgtgtgacatatgacgaataatgttgacaagatcccccgccagtagggaaaccatggagacactcgaacccgccacttcgtcagttggccggaaaagtaaaataaacattatcagatggaaataaatgtacgacatcgccgttagaaaattggcggttaagacaatggatcgctgacttgggtgagttaaaacttctgtgtcttagcgaacatcagtcgtttacgatgtggaggtggagggtaaattgaaaacgagtttgcagtgatattggaagcaacaccatttctgtgagtacgaacaaagatttgttggaaaattgtctttgatgtcaactacaagcgcgagccaccgtagtgtcatgttttcctcgagcctcgtcgagttaagagagcggcgtacgttcctgccgaaaccgtctttaggtgttggtgcaaggtttgcaaaagttggtggaacgcacaaggaggcccctacgtccattataactacacagttggtatatcgtttcataaaactacattggtttacagaaaaatggagcaactacacgtggacagtgtacaaaggggaccttagttccattgtcactgaattttgtgtatccacctcctctttcccagctaagattactacggattaacaactgtatctgttaatgcgggatgcatcctcccattttaggctctatcagttgacgaaatgtgcccggttagtgagcgtctcaagcaacacttagggttttcccctgtaggaaaaatgttatcccgtttttaaaactattggttgcggtgtgtgtacacacagagtttcgttgaggaagttttgtcagatggatagcagaaggagttcgttgttggaagaaaggatctgtgaagaagacggacttcgctgctttattgactcatgagttgtgaaaataatttcagtaagtaataatcgacaacgtccagtatccataaactgagtcctcaaagcccagtaaatattggctacactccccttacagtccagaatcaatgctattgagctgcttgattcgtgaagaaggactttttcgtcgattgaacatataccaaacgctacaaagactctcacaatagcaaaggaatgcactgacatggaaatgttgggtaagggagggagaccgcttccatttttgccaggatgcgtgttgttgatgggctacgatacaaaaaacatgatggtgttccactgcaatgtgcggcgcgttgcacccattaaaagttacaccataaggtcccctacaccataaggtgtacgctacactccagaaagcggttattttcgtattccgtcgagtgtaaatccgtcatcaactgctaccatcgctgactggtgttgttaatccccccttgctgtgctgggttagctcaacccgtcacgttgcccttctgaatggcgattccttcacaccagcagcaggacaacatttgtatttgatattgcaaaagttattccttacttatgtcagaacaaactttattaccaaacgtttaacatggaccatggttgtctacgtctgcaggtgttaacgttacttctcttcaatttttttttattgttgggcgcggccaatccttccttcagttgttgatattcgtggttgtggccagaacgcctgatgttgagattgtatctgagcggacgacgtgatgaccaagcttccaaaagagcgataagagtaatgcgtgttttataacgagcgggattcgttttttgactctgacgggagctctttccctaaaaactcggtgtacttccgtccgtcggatgggacaatcgtgtgcaatttttcacgtgattccgtgaagaaggttgctaactgtccttccgaattcaaattggaggatgttacggtaattgacatgcggacgcagttcacagaccctcgatacgagtgttctacaatgatgtctcctaacgtgagtcgagaccctgcgcaacacatggacgcgcgcgtgcggtgtgcttctaggcgagtacgagtttgcaaagacgtgtttacattggagactcttgtttggacgcatctattcctacagtacactgtgctttgggaccgcccgcgccttttccaccaagtttttttcctcttgcgccccatcttcgtccggggaccggggtgtgctcccatgcgcactcgcacggtaagcatgtacgactctcacgatccgaatagtgtttcccaaaacaacatccctgtagtatttgaggcattgtccgacaacccgcatcataggtggcaatcccggggatttcgtggacattagcgctgtccttaggaatatgcaaacgacggctgtaacgtacggctcgaagcgtgttaacattcccatggtcatgtattacctcaactttgtgcaggacgttcctgtcgagtctctcaaatacacaaacgggttaccgcgttcatcacgcgcaccaccttgaacgctcaggtgcgtttgacagacagcgtcgtcatgaccgtcaacgtcggttccgtgaatgtcaacattgctaatgccagccgcccgtttgaggttgattgcgtgcgcgatagctcgttagttgtggtgaccttcacgacatctcttatcatcatggcgtccatggactcagtgtcggggcgtgtgcagatgctgcagatcggcggcatacctgtgatgcgcatgtcaaccgacgcactgaccagggtggagcgtttgttccctccaacgaacaacatgtacccttacacgaacaagagcat

SEQ ID NO: 252 - DNA, 21653 bp, unidentified
  misc_feature 1..21653: note = Fanzor polypeptide
  source 1..21653: mol_type = other DNA
acgctctatcctaggacagctgcaaatggtccgtcttagtcgcaccaccctgtcctacgatgacgttaagggcagccaggcatgcgacaaggacagtgacctgtctcctttcgaggtgtgcaagaaagttgctagagcctgccagctcaagcatgagcattcaagatcggctgaacctagctatggtggacgacatcgtccccctgttgatccaggagaactaccttaaccaccgcccagtcatcgcaggaactgaggacgcagcggatgagggcagtggcaaagtcagctgaggccatatctgcaggagatgtgatcaacacgtctgtgcggcgctacatgaactggagccttatgcctgccttcaacacgcttgcaatgccttgtgccgggggcgtacatgcgcggcgggaggggacgccttctggccaggcgacaactactctctcgcttcacctcatggctgggcaacttctcaacctcaaaagcaaaaacgctgctgggagaactcaccgccaccatggcttccagcggccacatggcttctagcagatctcccgtgcggttagagtacctatcagccatgcgcaccctactgacgcgtccactagtggactgatggagagagtgggtggcatccagcagagtgtttaccctgatgcaggactactgcgtctcccgggaaatgtttgactacgtgattgacgtgaccaagttcaagaccaaggccgattggggagaggaccccatgaaggatgtccctacaaagattaagagcgcctttaccaggagcttcaaccggcaaggcctgcaggcgaagtgcggtgcaatgctctccgcacctttgaagggcaaaaagggtaagaaggggcgctgccgagcagagagaagacggagcggatgacgatgaggacgagtccgggttcgagaagcttagtgcaggcgttgcagatgaagacgaggacgcagatgatggcgacgagatggtagcggcagccaaaaagcccagctgctaagtgccaagctgatcaagagaggcatgacgatggacttaaagtctgacaatgctccagtcaaggggaagggcagtgcgggacggggctccgggggcagaggggcaggtgcaggtagagggagtgggggcggagggggggtggcatagacctactgtcacgtgggttgctacaccattaggttacaccgtaaggtttcattttagtattccgtcgactgtatcactatactatcgacttaaccccactgtctggtcttacggccctacagatcttgagctttaatagtccctgcttccagcaacatttaaatagggttttcagagttgtaatcccaatgaaatcagtaagcggcaactactttcgagtcggagcactcctttgcgtttgccatgctcataattgtttagggttttatattgtacatttcaaaacacgatcttcagacatggattacttaccttaccagaatcccacgtacactgtagggtccattgtaaccatagacaacccaacaacgcacaacgacttggataagacaacaagtatcgtggggctagtatacgagtcttacattcacaagggatttccgatgtatggtgtgctgatgagaaagaaccatgcgtgctatgacatgaaaaatttcaagcaatcaacctcatgcttgtcaagtgatatatgttgccaacacttggatgagaaccgtatcacaacacttgatgtcaacaacagtcatcactttcgggcaaagcatgatcagcatgcatgtcgggaatgaacaatgtgtcgggatagagacttcggcctccgtagggaatccgggtccgcaggtctgccccaaaaaacgaaggggagctggagttggaggcgcaggttcgaatcacacgaggagcatctttcggggcgagtgggtggtggtttccacagcgcacgtgagtagttggctgcatgcatgttgcaacctttcgaacctgctgctactgctttcagtctttatcgaacccgagctcatctttgccaacccttcaggtacaacaacaccatgccacccacgtgtggtgagtcgagtctacatgcatataaaaaaaaaacaggctatctaaccttcaatacgacttgccaccatgtgtactggtaactgctcctcatgtccttgttacagtcactgccggtgcacgtatgctccacctttcaaggacggggattcagaggtagcactcaacctaccgggcaaggtcatgcatgtgcgagccctgtgcagtggcttagcgtccattcgcccgagcctactctatgtcaagaatgcactggaagatcatcatgacatggattggacaatttttcaagacaccgtagcacgagagctcactatggcatccatgttcctgggcggcattttggacggctgcgtgatcgcagagatgcagcaatccagagacaaaggggggcctgcagctcccaagagatctgtgtcctttcagggaaccatgttccaggatgcaacgcttcgcaacatacaggcaggggtcaacggattgcgttcgttttactttgaagagcagagtgtgcaggcaagcttatggacggtcatacatttttggaaacactactttccttaccaaccgctaccaacagagttctcgcgaggcagactgcacactctactcgacttccagcttgtcctcggaagtaaccatgcagcacttgacacaggtatacctgagtccaaggacagcctcaatagcaagccactcagcggtcctgtggtgcacgacctcctaatccctgcgttcaacgctgcgtgcggcattactgctcgccttgtggagatttatgcagtttctgggaatcatacagttgatcaaataattttgggacactcagtataatttgaatgatatcccctgaaaccagatacaggtccgtggttcactacaaatattttttgaggagttgcaacatgtaatcaccgttttcgcctactttaccgtgtgtttccggggtttgagtgatcgatcccccaagagtatcgacatcgttccaccgtttgatataagttaagtgtagtctgcttgctacggggacgatgagggtcactttgcttcaccgcccaagtgttacagtgaaaagctcaagcgttacagtgagaagctcaagcgttacagtgtacgcgagtcatcaaatgaatccaattcaatcaaatccgctgccccgctccgcggtgcccgcgctcccccttcagaaaccaatagagttgtcgttaaagcaggagtctgcttgaagcctccgtgtgagaatgagtatgcgcaagtcatcgtgatccccgcaatccgcacgactgccgacatgatcgatcatgtatgtatcatcttctgtgacaagtttaagttgtcgtcgaccgagtgtgtgacatgaatcatggcatcgagttcttcatgccggcgcccttgaacacagatttgatcttttctgagggagttgtcaattgagcagtgcttagtatcataaaatccgatagaccaagaccaatctgaactgttttgtgtggcatgcttcatgtaattgactacctcatcgcatgtatttggaaattgtgcaaattgtgatgcaaacccatggaaattggtgatgctgtgtttggggaactgcattgagtgggacatgtcttcataatggtttatcgaaaatcctcgaagcattttacagttttgaagcgaacaccaatcgacatcgtataggaaaaaacgcaattccagaaatttcatgtttgggaatgtatcaatcaatgcttggacatcaccttgtagtttggacttcatattgctgccgccatcccaatatcttgcttgtggaaaaatatcttcgccgacaagctcgacacaaactgcattgctaattactgttggatttgatttcaacagtaaacaacctccactctggaccttgattgttatgttatccactgattcacctcccattttcacaacttctgcaatactttgtgtgcaccctcccttgacgtaaccgatatgtgtgatatccatattcattttactgttccgccgattgtagtagatgccctcttaacaaatcgggtcatttggcatctttaccatcagatcacctgaactcgcctcagcctgaagatctccaaaatggacatctttgaccccagtgcaaatcaagtttgacgtgcctaacgcagtgatgagagaagcgtaatctgtcattctatactgtatgcaaaagaattgggagttgaatgagcgaacgggtagatagatatgaaaatctttggggagggggaagagacgttgctgatggtcacgatgatgatgaggcgaagagaccaagtttgctgatgctgtccatgtccgagatggaggcggcggcgtcgcgtgtgtgtgtgtgtgtgtgtgtgtgtgtgtgtgtgtgtgtgtccgttccgtaaatcagtagtgtgtctgcgggttgatgttacactgtgggctcccctccggtcgcccacccgctcggttcctcgcggactcctttgtggaggcccctccggtcgcccccggtgggggaagatgtgaaaggggctccgccacttgtttaatgtggtacggtggtattttgttactttcgttattttttgatggggagggccatagtggcacctgtgccgccgtgatgagagtggtcggtctctctgtgatgtgactcgacacaggttccgcctgatgcgaaagtctccctgtgagtgactactcggctccgccgatgcaggtgccgcctgatgcgaaagtcgccgtccttgatgagatgagggaggggcatgataaaagacccgacgatccccgtaacagcataatttccttttgttttgttctcctctttttctccgcacggcggctttcgaaaaacgagtgtaaacggaggggggaacatccaaaattgagaaattatccacttcttttgcttaacaaatcttcatgatcatgatgatatcgagcctcgagtgaagtgtgtggctcacgcccgacagcatcattcatggggattgcccagacccagatgtctgataacacactcgaggttggcttacctctcggatcgatgagagtgctgtcaaggaagccgaccacagcttgtgaagacaagcagttcctcctctagggaaccgttagactcgcaacttcaaaagctgggaaaagctacctctgtacggtccttgagggttcgatgatgattgctgcatctatcatccgcggcgtcgcttgtgtgtgtttgtgtgtgtgtgtgatttcagtagatgtgaagtgtgggctcccatccggtcgcccacccgctcggttcctcgcggactcctttgtgggggctccccttcggtcgcccccggtcgctccgctggggggaagaggtgaaaggggctccgccgcttgcgtggtggtgtgtgcatcttattcctattcagcacatttgcggccagctggaattcatacttggcttttaatttgtttaggcattgcacgccacatgagtctttgtattcactcagttgtataattatcccatcaccatcagctgggatactgaatggatgtgaaactgctacaattaaccgtgttccagttttgacatgcagtgatatagcatcttgtagtaaactgtctgtcgaattgaaaatgacgttgtccaaaactataatcttaaacccgattaggctatccagggtgtctcgcatgctcataattgcaattggggaatgcagtttatgatgagttacgtcatggtctgtctcacaaaccaccaaagtggattcaccatcccctatttcgtttgtgatcatgaagctctttccagtctgcctacgcccaacaatatacatcacatgagtaagcacacacactgtcggctgcgacaatacggatgcctcatttacagaagcgttggttgccatacatggcattctgatatctagtacatgcaaattccttatacactgttaggtttacttatttttggaaagcaaacgagtcaactgttgcaaccctttgacaccatggacctacatcgcgcatggaattgaattagtcatgtgtgtgggtcagcacagagagatgttattgtattgcatgcattgtggggcacaacgcgcaccgcgtctattcatgagtgcacgagcaagcagcacgcacttgaggttctcgatctcttcgtcctgcttggaaaccaagctcagcgcctggttcagtagacaatgttgctcatgcgcagactcctccgtctgagctagtagcgttttgtacgctcgctgaacagcgtcagcacgcacgcgctctgcagccacggcatcagccacggcaacagccacggcatcatcgagttgggctttcgtgtacatttcggccatgctcagacactgcacatgcattgccttgtctggggctgggtccctatattactattctaatatccttaaaaattgtgtattggtcttgttcctgatgattccgtgtgctgcaaagcttcaggactacacgggatctgggagccctgtgcaggaacttttgcccccagcatgcaaggtcccatgcacactgttgctggagttttgtgtcgggatggaaaggtatttctcgtggatgctggaggaatgcagttcgctcacctctctcaggacaagcggcacttcgagttgtgggtaccgtctcgccagttgccccacatcgaatgccagccgggcagcccatgatgacatgtatacatgctgtccttcttcgatcactaggtcgttcatccatgggggcgtagtacggatgggaaagtattgcggaatactcacaaagttgatgtaaccatgcttaagaaacccttggtgatgaagtgcatgacaggttgcaaagtaattgcaaatatcaagaatttcctgacttgtgtacgacacatgcatttggtgaatgccgggtaccagcacttccttcggtgctccggatgaagtcatggacataatggatcgcaaagcgatcgtcaactcattgtaaccatgaaatgtttctacagtgcagcgtccagacaaacgcataattgtggatggcaatgtatcgcgagtcatcaaccaaactttcgtcacattccatcccatgtcaagtaacgcttcggctacttctaactctttcaccgcatcgcctgcatcagggaacacacaaacgcaactcgttttatgtgtcggtcctccacacaacaaagtttgtacgtgtttcgctattgaccctgcagtgccactgtagtaaggcatgagtcctctatttttgtttaatggagggggcgtaatgtacttacagatcacggatctcttatatgcgtacatcgatccccgaaaacagcatgatttcctttttgttttgttctcctctctctctctctcttacttcacacacgacctcctttctataagcagcatcattcatcgagcctcgagtgcagtatgcggcttacgcccgacagcatcattgatggggattgcccagaccccgatgtctgagtacacactcgaggttggcttacctatcggatcgatgggagtgctgtcaatcaaggtagccgccaccgcttgcgaagacgagcagttcctctgtcaaaagaggaatcgtcagacgaaagccgccgtctcaaatcgcaaagtttgtttgttgtgactctcatttgctgcgcagattcgccttctcctctcgtaacaacgaattcgagggaggatcagattgttgagtgagggaataggtgaatgagcttagcttggtgttcaagagcatgtatcacacgagggctctccacttgtacacacgttccacccaccaatccattgacccagggggctacttgataggatgcatggggctgcacagatctgcactggccgcatgggctgcatggaacagactgcactgggaatggtaactgcatggtactgaatgtggaatgaggcttctcatgggttgcagttggttgtcataggctgcagttggtcgtaacttgcccattatgtgtgaggctgatgagcccttgcactgtttgaagatttccaataaatttaaagtaattaaaaggctctgccttaggccttttattaaaaatatttctttgtgatcgtattacaggatggagaacatgcaagatgatgagctcgagcgcgcgggtaccaaagaggctttggtagaacttgtccgtaggttgcgcaagaaagtgggcaatctggagagccagctgaatgaagtgaggtgcgaaatatatattctacgtcgagtgattgtagggagggcacaatactcatcatgttcctctcaacacatgttcacagcccggagcttagtgtcttgaggaggttcgctggccggacagtcccatgttctgatctggatgacgacatcgacagggctaggggcacatacggcatggtggagcgccattcccaccgccatgccattcgggaaaagctcaggggttggggagtggccatggttcaaattgaccagcagtcgcattaccagattccgggggatgtgtgacagaggcatatcctacacgtgtgtttccgcgcgcccatgaaagactagtgtaaacaagtcatatccgacacgtatttccgcgagtcatcagctgaattccactgccccgtggatttctacaccattaggttacaccgtaaggtgtggtgccgtacacgaagcggtttcattttagtattccgttgaccgtataaatacgcctgagtctttaattctatcttaattcacttgtaaccccgagtcaagagtcacccctggagtcccgtctcttgtcccagtctcctctacgtgagttgtctttgatcccccgcatcgccctgtcggacatatccttttcgcgacccgagaccctgatttgccaagatttgcctgaagaccccagcccggcccgcccccagcgacatatccttgtcccgacctcgagaccctgaagacccccccgaaagcacgtgctcagtgtgtgttacactcagaccggtcaataatgttacagtatattgaatcaattccaattctcattgtacaacttggacagacggtcgattgttgtacacatgtacacattgctgcaaagtttgaggagagtggctatacttgcgaatgtaagccacatgacagtctcgaggtggatctcaaaccccactaaaaaagtgtacaaacggaataaacctacaaaatcggatgtggtcatagagttcttaaaggcgtcattaaaaatagatccattcgcatctcttgctggtcttcgtcataaggtaaaggatgctttcgaatttgaggtatcaaaagagttgattcgcgttgtgataaaaaggcttgggctcacaaagaaaaaagcaaagttcttctccaggcctgataacttatatgagaaaaccacgtcattcataagccaaagggaacggttaaaagaggaagggaggacttttgtatcgatcgacgaaacttcatttggaagacatacgagagacgtgtttggctactcaccaaagggagagctactggttgtaccgaggtcgagacctagggtgacgacaatgtcggcactttgtcttattcaacaaggcaaaggagacatttattttaacatcaggcaagggtcttttaacacgcatacttttgttgagtttttagaaaatttggactgtccaactgacacagtaattatacttgacaacgtggcgtttcaccactccaagaaggtcaaaacacttgcagcttcaagggggtgggagctcctatacactcctccctactcaccttggttcaacccaatagaaggggtgttctccatcgtcaaacgcgatttctataaaagccaagatgtgtataaggctttgagttctgttaaagagaaacacgtagaggctttttttcgaaagtcattgaatacaatttctggaccttgatacaaggaaatagcgacattggctactaaatggagacgatagtcaataaagagcctccggacaagcgtacgcgaccggaccgggcggccaaaattaaggacaggaaaaacggcgaggagaacgtggtaaagtgtacactgagtcggatcatagcggataaggacaacaaggacgttatcatcaaggtgattaaggagcgggtcgacagcgtatccaagaggacttatcttgccggtgttgcggtgaaccggatattaaaagaagtcttcgaaggggtaccagatgcgcaactgcacactgtaagtgtccctagcgtcgaccagaacttcattcggcagcttatggtggggtcaagacaggtgcacatggagacgagggacgccacagtcgaaaggttctttcacaacaactattggtttagggagaagattgagggacgcgaggtaattgtgaaaaagaagaaacaatacgtgggtgccatcgctcgctacgatggcgatcgaaacctgtacagccacgcgtcgaagaagtacctgaccaacttcaataaccactacagagtccatctctccacatggatcaagaagttcgtttactcgaaggaaaacaggatcttggccaaggagatcaaagatgagcacggcattgacgagaccgtattccaccgatacctcctctacgatatccactcttggggagtaaaggaagacctcatagcgatacattcgctcctactggagcgaacaaagatgttgcttaagattcagcactcgatcctcagacgggacgagatcaaccgacagttgctcaagagtgtttccaacagcgccaagatgatccggtacaacgtctttatcgatcgatacctcgaggccacagaggacgaggtctacgccaagctggtcaacatcgctcccatcccaacaatcaagcacgccttcatcacgatagacactgacggcctactgggcgtcctcaaggacgtgggtctcatcgagagtctcaaaaagacgctgacgaacaaggagcactgggagtcggtcttcgatgtggaaaacatccgttctactgggaaaggtgtgtttacatgcaccatagacactgacggcgtaatggcttgtacccactttcttagggccgagaagaaaaagatttcaatcaaggacgacggaacggcgattaagaagcagaccaagacgctccgcgagttttccgagtccgactccaatgtggtggtcgttgcaaacgaccctggccgctgcaacattgcctttttgacttggaagaaaaataaggtcgaagaaaaagataaggggggtaggaagaggaagaggcagtgcgagttcgggagcaagagactcacgcgggagcggtactacgttgagagcggggtcttcaaattgagagggccgaccaagaagtggttgtccaacatccaggactgccttgacaacctgaaggacaacagtcccaagcgcacatctctagtgtcgtttgacgcttacgtgactgtaatggtcaaccattgggattctcgatggggggagatgtccaagtcgcggtggggcgcgcagcgcctgcggctctacggtggcaagaaacgtgtcttagcacgcttcttcaacgaggtccaggaggatgtcggtgagaggaaaacaattgtcgtcgcatacggttctgcttagatttcccctggtggcaagggtgaactttctgtccctacaacgagcgcgttcaaggcgtttagcgaccgtttcaaggggcgagttgccgtcattgacgaattccgtaccacaaagatctggcacaaggacagcaccaccgtcctccagagtgtgcagtccgaaaaagaagggcgcacggttcgaggcttgctatggtgcagttccaccatggagaacagcaagttgtttgtaaaccgtgacctaaatgcagccattaacatccacaattgctttacaatgtacccaatccgccccggaattcttgcgaggccaaagaaatattgcaaactggaagttttggtaggacgccaaattgattacaagctgacaggttctttacagaacgcagtgtcgagcgaagtgtagaagataaacacatacaagaggattttgggggactcgggatattatgtaacataattcccttgtccgagtgtacagcgcccatgaaaatacgagtgtaaacaggtcagatctgacacgtgttttcgcgcgcccatgaaagacgagtgtaagcaggtcagatccgacacgtgtttccgcgagtcagcagctgaattcctgtggcccactctgtgggtcccgcgattcctctttcatactcccgacatagttgtcaagacacgtgttcagcgcgcgccctacttgacgcacccagtccaagccacacacaccccagccatgtcaatcttaaccaagtaccgactccaattctttgctcacgaagaactcagtgtgttagggagcatccagcgaactccgaaagtagctttgcatttcagtgagtgaatttggcgattacgttacgtgtgttgttgttgtgctggctctgttgagaaaatcgtttcgttttttttcgaaacgtagtctatttggcgcgcggggtccgcgttgcctcatccgcgtttccgattcggtccgttcccccccctatttgttgtttttatctgctaaaaatccgttgcatttccatgctaaaaaaaaattgacgcctttttccttcctttgaaaccacaacaacaacaacaacaacaactgataaaccccaactcaactgatatcatgtctaccaacaacatgtctacaaacaacatgtctaccgagatcacatcattcgtgaatgatacctgtatattaaaagttgtcctaatgacggaccgaacgaagctatccagcaaacccaccgtccctcaattgaaggacatctgctacaagataatttcatttcctcgcgttcctgcgtgcctcgcagaccctgtctgcgcaatgaaaattgcgcacgctaagtttctcgaagattcccccggcgcggagaaaaagcctttacagctaatgcttctccctgttgccgtcgctgctgcgaatgccgtcgcttctgcttctgctgctgctgctgctcctgctgcttcctccttgcttgccctcgccagtgcccttgccctcccagaggacgacgtccccaccgaggacgtttgcatgtcggaggagagttccggtggtaccaagcgcccccgcaccacggtgtcactctctgtggctcctgctgctccggctgcttctactgctgcttctgcttctactgctgctgctgctcctgctgctgctcctgctgctgctcctgctcctgctgttcctgctgctgctgttcctgctgcttctggtgtctcgttttcaacgggccccccctcctcctccttggcctccggtcgtgttggtcgttgcggggggtccgttctaaagaacgagcttcctgttggctccaaacacggcgatctgaccatcgtggggtactcccccaccctgggctgcactgctgtcaccattcacggcaacccgtgtggtagaaaacaggtgctcttaagcaaccccaatggtgggaccttcaccactggcaagtgcgcgcacctagcgtgcatgaaccagactccctccaagcgtgaggcgtacctcgccaagaagctcgctgctatcaagctcccaattgagcttcgctccctgtccctcagccagcagctttagttatatagatactcagttatttagatactcttttttttgctacatttcttagagacgagaaaaaatggtcctgcctgtatgtactgtactatactgtactgtaccgtaccgtgtgaattcccccctccgtttgcgtgcgtgcgtgcgtgcgtgtgtgaggatgcggtcgggcgagcgctctttacacatcccatccatcatcccccttttgtttgtgattcgtgagtgagtgagtgcactactgtggattttgaccacctgattccttcaccaatctgaactacaattgtgacgtgtttttcaagaatcatcgaatcaagcggcagtcctgccgcctttttgttggctctcagagtgtctcaggtcattttactgttccgccgactgttttattttactgttccgccgactgtagatggttacaacttagtccctgtagaatggtccaatcacttccccatcagggtatctgttgaatccatacaaaaaagcacgtggctcttcgttgaccaaggtttgaattgcaatgtgtgtgtggaaccgatgctgattatctaactctaagtggattataagcacttcatgtgcaaatggaagccttagtgtaatggcgttggaagttgacgtaatatcttggacaaacttggaggcccagtcttggtccataacatgcatagaccggtcaataatgttacaatttgaatctctatgtagtttggccagaatatgtgttttctcattgaaccgcatggggcttgaggagtggcacatccaagatgaagaggcaatccccatcgatgctttcgggcgtgagccacaaactgcactcgaggctcgattctgttgatacagtcgacggaatactaaaatgaaaccgcctcgtgtacggaacacacaccttacggtgtagcaacccacagggcagtggaacaccaatacgattttgaatcaacaaattgcaggatgttaacgagaatatcgtggtttttttttagatcacggctctccatcctgcagactccgtatcgttcttttgtcggtactttcgagagtgtccattgaaggaccagccgcagtaccgtggcccttcctggaccttccccagtaccgtggaccttccccagtaccgtggcccaaaagaacacggggtctttgttgatgtgcaatgcgtcatgtaaggaggtttctttgctggacgggtcatttttgctgcgcagacatttattcacattcacgaagaattcgaggaccagcgcgcaccaatctggccgaaggtgagtcccccgatattggtaagcgaccgactcgaggacatgctgaggggcatgaggatgcataaagctgcatcgtgttggtttacatacagaatgggtgatgtcatgaaaactgcctcgcaaaacctacactccgtccggccaaacgggcaaaccctttgtcgtgtagattccaagcaggacatggcaaccgacgaccaggagcccccccctgcatgggccacgtccatgctgcagcagctctctaaacttgagcatgcagtgtctgacatcaagttggacattttggagatgaagtcatctatcaggttggcatactgtcgtcatcttgggatgatagatatccttgtacataacactgatgcttgcaccgcgctgcttgccatgcgcaggaacatgggctcgtcctccagcatgagcatggctgagatagttgccgattacgaggtaaacaatcgtggagaaggactagtcgggcctttcgggggcgactgccagtttgctgctagggctgctggagaattcttctcaaagatccatgggctgatgcgtgcgataatggtcactgtcgtaatgtactctccgtcgggcgccaccctttcattggctccaggcatcaacggcacttctcctgtcaaagacagaaccgtcccagatggtgctaaaccgtacaggctgacagagggcagttgcgtttggactcagtatgatacgcaacacccgggcccttgcaagggatacgtccactatgttgccagtgtggtcactctggatggtcacaatatcatggttgactggggtattgctcaatttgcaaagctaccgagcgacatgatgatgtttgtctgatgattgcaaatccttgttgaccgcattagtgcttgcacgcactgcatggctggtggcatgatgtggcatgaccgtgttggaatgcatgcatggtggtgaggcctgtggtgtggtttgagagaaaggcgattgtttacatcaagctccccttggatgtcgggtaccacacttgctctcgcatcactggcttctgttcttcatggctgcgtccaatggcacctgcaatcagcagcattcacaatactgacgtgcgcagccaaaacatatagatgacatattgtcattgctcattgcatgcacatacacctcctttgcaggatgaccaaatacaccgtccttgctgttcatgttctgcatggtcacgcgtacgtttgggcaatgctccttgagcactgttcccagtttgtggtaagtcgtaagctgtcccactgccacccacgcgtccatgaacttgctgcctcccgctccgccccgggccattccaaacatggtggacgcggcaataatgacaccattgtagtcagcaatcgaatagggaattgatgcttctgcaatactgctagatgcgtgttgctgagaatattcccactctcccttagccttggctctggactcgtaaaatgtcaggctgggtgcctcgttgttgctggggtatccctcttcctcgcacatgttcagcacacgaacaaacgtgccggtgaacccttgctgtgctacgatgtcctcgatctcctgtgctgtaatctgctgcccaaacgaacagacaagggcaccatgttgcgttgaaccactccacgtcccatggccacagaatagcagaactgcgacatccgtgccgggctgcaggagatgctgtatggcggctctcaggtcccgttttggaacctcggaagtgccgcccataacgttgcagctgaatccttctcccagcgactccttaaaacgctcaacatccgttgcaaaacccgtcgtgctgtacgtacggaggtcgcgggggagcagagccgcctcctctaggactcgcgtgaggcgcgcctccaggttcaaggcgtagctgggtgagactagcaatgcacgcttcatcttgtggtaatagtcttgggggggatataaataaatcacagtcctgcgcgcacaacaccaatatgcatttttagaactcatcaacaatgatagataacattgactgcagctgggtgttgtgcaagtaaagcatctagttcagcgtcgccatccatgacctgcaataaagaacatgaatggatactttttatacagattgcagccacgcacgcgagcaaatctctcaatgtcgaacagcgcagcgacacatgcgatgcgtctaacaaatcagaattcggccatgcagatctagtcgccccatgcatgggatcatacagtgcgtcagcagctgaatgcctctgccccgctccgcggtgcccgccctccccccctcaaaaactcaagagagtgtcaaacagacgtctgcttgaggagagaccacctgactgccttcatcccctttgactctgtgtgtggtgtcttggcaccccatgtatcatccgcggcggtgcgtgtgagcagacacatcgttactgtccccgctttcctcgagatacttgtggaacaaggcaacgctcgactccctgaaatcttcctcaaactcgcagttctcggcgaggaacgcttgcacaccgtcctgctccgccaaatattcgatgacgagtggacaaagagaatgcaaaagccgccgtggcatgtggaggagtatggacaatgaggatgcaaaagccgccgtggcgtgtgcgagaatggaagatgggcaagccgccgtggcatgtgtgtaaacaatctcctctccaagcacacacctgtttccaccaccgtttaaaccattttgtctctgttgtcattgggtggtggtgtgtacaatgagaatccaaagcgttacagtgagaagccgaagtgttacagtgaatggtgtatgtgagtcagctccgccatatcccatcagaacacactatagcctctcaatagcttctggcgcctggttgagcatccggccaagcgcatcacaggcgtcacatgcgtcattgaacaaagggaaaagcaaacccctcaggacggggccggttctcgtggtggcattcaccgggaagctgacgtcccattgtccatacgtgttgtcagagtctcagccatggaatgtagtgtttggcaaaattgcggagagtgtttgccgtcacgccccctttgataatgtactcggttgtgcgctccttgatagcccgcagctcggcaaacatgggatccaggaatgtcctgtcccgatcccaatacacatcgccgtcagaaggaggttcctgcatcttcttctcaacgtatactgtaattccatccaacaaggctacaagcaacgctgtgccggtatgaaagttgtagcacagatcgtcctgactgccgcccggcagagcagcagcagctgcagccattaagtgagcccgaatatggcggagcgcattgtgaaaggaacgcatgacaccggggtcatttagcccggccaccggctcaaacaagtctccagccccctgcaaaaaatatgcaagagtcagcatgttctgttttatttcttgcatcattccatcttacagttgttctcaaattaaagtgggacaccctttataatcgaacttgcaggtcgttgctttttggcgacgttgggggatcctcaaaaaatatttgtagtgaaccacggacctgtaagagggttgatcacccgtcccgaaacgcaccagaatgccgccggcaaatgcctgcttcgtgggcatgtctacgctcggtcacgccccctgcgaaatacagaaatgcatgcaaccctacagtcagtggaacagtaaaatgaaacctcccaataaacggtatgaggcggcgacagacgttatagtgtgcgttttgccatccatgttcgagatgcacaagcgtgcgtggatgcagaggcgacactgctcaggtacatgcgcggtggttacgattccagaatccagtcacgaagagatgtgggcacatcaatccctattttaaacgtgttcacatgaacacctctgaaaagactctccatctcgggaacaacaattatttcaacaaaaaataaatactgaagaaagccggaggctcacatcaatccctattttaaacgtgttcacatgaacacctctgaaaagactctccatctcgggaacaacaattatttcaacaaaaaataaatactgaagaatgccggagactcacatcaatccctattttaaacgtgttcacatgaacacctctgaaaagactctccatctcgggaacaacaattatttcaacaaaaaataaatactgaagaatgccggagactcacatcaatccctattttaaacgtgttcacatgaacacctctgaaaagactctccatctcgggaacaacaattatttcaacaaaaaataaatactgaagaatgccggagactcacatcaatccctattttaaacgtgttcacatgaacacctcagaaaagactctccatctcgggaacaacaattatttcaacaaaaaataaatactgaagaatgccggagactcacatcaatccctattttaaacgtgttcacatgaacacctctgaaaagactctccatctcgggaacaacaattatttcaacaaaaataaatactgaagaatgccggaggctcacatcaatccctattttaaacggaaaataaacaataatatgttgacctcaataagatgcatatcgataacttgttcaaggtgtgcgacaatctttacctatcaggccaagaagcagctctcaaccaccaactttgtaaaacgttgcaattcaagcttgttgtgaactgcacaaaccacacaccgtacataaaaccaaggaaccccaacacaacatacattaaggttgctgttgaagacaactgcaggcaaaaagaggtcacgaaactcacatcccatctaccatatattgttgaggtgatgcatggagtgttaagtcaaaacaatgtcgtgcttgtgcattgtcggttgggaagacaacggtctgcaacagttgttgctgcttatctgatgtgggaaagatgcataacgatgacaaatgcgatcaagcacattcaaaggttgaaccccgccgcattccaaccagaagccaactttcaacggtcccttgaaatgtttgaagttcacctgaggggcacggtcatccatggcggtgcatccttgtcccatcacgatgacaaccatgaacaagatcagcgtgaacctggggtgaagatgctcctagtgagattcgaacctgcgcctctaactccagtgcctcgttttgggtagcggacctgcgtacccggatatttatagcttttgtaacaaaacaaaagtttggaatcgccccatgcatgggatcagacagtgagtcagcacctgaattccactgccccactccgtgggtcccgcgattcccctttcataatcccgaaatagttgtcaagcagacttctgcttgaggtttgtttctgtagaaagaggagaacgttacacacacatcaaaacaatgctgctactgtagagagagagagggaacgttacatccatctgggggagagggaggacgttacatactcagcaaaacaatgccgagacctgtatggatcaaaagttgtttacactcgtttttattaaaacaattgtttagttgctaatctgtcatcggggttgtagctcagtggtagtgcgtgaggttaagccaattttcttcattccttgatcatgtcgcccactgatgggttcgaatctcggtacctccagtgttttgccaaagttccaccttcagttaatcaagttacctgagttaattaatttaactaagttagtcaatttcctggctgcggatatcttgactgaagacgcgtccaccgcgatccacagctgtcacgatcatacgacgaattgtcacagatccaagtgttgttccgtctttcatgtcaatgttgatgagatgcggtatccaggacgaaagtctactcgcgcacatagtggcctgctgtatgtctttcaacaccttggcatttccagttttggcaggggctttgatgattttcgtctccaccaagaaaagtgtgtttatagcatgtgataatacaaggggggcgtccccgttggcgcgcttgaagcagccgtcatctaagacgtactccacagcaacgaggaacaaacgtgacgatggggatgtgtggtgtttttgtttaattaggtggcgcaatgcgttatactccaagacgcttggatcgccggaagtagccgatgacgtccgcagtgcattgagacgtctgactcggcagtggaggcgatcaataaacttggatgtgtcgagactgtccatgtccagcgcccttcctattttgcggactgggtttgaaatgggctgacaaggttgtgtcggcaacgcgtcgatgaagactcgtttcttcgcgcatacgtggatgtggcaatggttcttattcgtgtgtgtatggctgtaatctgtatggattttgcgttatttgtagatggaagaaaggaaaggaggagggtggtgtgcgaaggacgcgctagggaaaaggatgaggaggagaataaggttcgttacagggtctgatgcgttgtttacaccacttccacgagacgatgagtggcgatgatccgccaccgtgtgtcatgaatggacggacggacggtctccatctcgggaacaacaattatttcaacaaaaaataaatactgaagaatgc

SEQ ID NO: 253 - DNA, 20930 bp, unidentified
  source 1..20930: mol_type = other DNA
  misc_feature 1..20930: note = Fanzor polypeptide
ttgggaggttgcaacagtagttgcctcgtttgctttccgaaaataactaaacttcgaaacgctgtcgataccaagcagagcccccgtattcatggaaaaaatacagagaatggggtctagttgacgtggtttttaagttgccacgtggtttcgcacgatgaaaggcacgagcacgtgactgaccatgtgattccttttcctctggaggtgttcgcggtatcgctctgcgatcactcgaactgccttactgacgcgcagccaagacatgcaaatcttctcgaagaagacttcctggatttctgtatcaaagtaagagatcgacagtgtatcggagccaaataagtcgatgttgatgtccaatccagatcgggtgatgtacatcctctccattattcggtagatggttggattgtcttcggacacaaacaaggctttcagcgcaaacaatttgtgtctgttccttttgtccatatacaatatggagtcaaagcattcagacatgtccattccatagatctgattgtccacgaactgagagaacgctgggaagaaagcgtctccgaatgtgaacaacaaagctaatccgttgggaaagataatcagagacggatcttgtgatttgtatgcagcattagcaagttgcaaccatattttctcaccgactgttgacattattagttatttaacgttgtggatagagttgggttggttgttttattgctttgctcagatggaaatggtttcaattttttattttttaggtaatgcatacagtcaaacgcccccagtagtgtgtctcatgcttgatatgaactgtgcgttatccacacgaagaaatcaaaacataacaaataatcaacctaaccacacttgccaagccatagatcccgtaagtgaaccagaatacaacatgagggaaatagcaaaacagtcaattctgcttgaggaacatctactcgtcagagacaaatactgcgcagactgtatcaagaaacatttcctacactgcattggtcttgctgaagaagcggcgatgctggtgtgtgggaaaaagcaagggaaccatttaccatacttaaacgaagcaggaccgttttacaaagccaaattcaatgaatggctaaaaaaatgccccatgtggactcaggaaagcgcgaacacgagagtgaagattgcaggagaaataagggatttcaggaaagctatagtgaacgtgtacgcatcatgagcgtgattttttcaagaacctgtccagctcgaagcggtttcattttagtatttcgatgtctgatcgcacactcgaggttggcttacctctcgaatcgatgagagtgctgtctaggtaagacgagcagttcctctgtcaaaagaaacaatatgttctttgttattgaacaataaagagaagctttaagcggatgtaggcaaagaagagtcaacatcagacaacaaacaatggacgttgtacgcagaacaattatcaacataccatcgtctttcttccgctgaaaaattatctgcatccgcaacagtaatagaccgcaaaatacgcttcaacatcttagtcagggtagcgttattcgccttcaacactgcaagtttttttctagattctgcaagtttttttgtatatttaatatgagatgataagatacttatagtctcgcgttgagattctgcaatactatttctagattctgcaatatcttttctaaattctacaatctccttgatattatcatagtataacataaccatagtaacaccaatggttgaaatggttgagaaaaaaatggttgagataccgaaataagagtgtatacccatctctgcttaaaactaataaaaatatataaatgattcatacgagggttacacgggtttatgggcgcgccatgttctggttctcttgttccaaagggccttgtctgggtctggttccctatactactattataatatccttaaaaagagtgtaatagtgtatatgtgtgatggaggtctaaacgattccaaaatgatcctctccctattgtcaagcagaagcctgcttgagacaagcgatgtgtgtgggtgagtcatctgttggcgtggagctccgctttgactgcttttgcagtgtaagaaacttattcgtaaaagagcatccaacagtgcatatcgtcgtcgccgtttacccaacggtgttgaggatacacgcatgctaagtaaccaatgccaaagttagtcattgtgaccatgtgtgagtagccgaagctgctgctcaagaggatgcgtattcccatagcggtgctgatacggtcgatacttggcttgaactctacagcaactgtgcagagccatataaggagttgggcaccaggatggtgcgctccatgttggttgaccatttcacacaacaaatttgtagccgcctgaattttcgctttacttgtatcgcacacatggtcgcaaagtctattttgcagtccatccacgccgtttatgtccactaacctaccatcactatgcgagggcagtgtctgcgtgagtggtagcactgcttccgcagggacatccaaggtaatcaattcgcatactacagtcagagacagaatttatgggacacccttaccggtgacccttgaacccaattgattgggtaggtcagctaaaggttttgtatcaaagtcccaatccttcgtgtccttcatcccgtatttcagcatttaagctggcccagaggataacaattgtaagctgctaactgacccaggtgggtcggttggttgagcgcccacatttgcctctccggaaactgtggtttttggggtgggcgatgatgagggcacacaaaatgtcgccggtcgctctttcccgtccatccacgtcgtcagaagcagaagaaggttcttggcagcgttcacgtctcggttccaggttgcaccacagcgcacattggatgatgcgcttttgacactgttgcgacagtgcagtactttgtggatcttgacgttcttcaccaccgtcttctgcttctcaatcgttgttgttgttgtaggagccccgttgatgagggaggggggctcgttttgaactctgcgccagacgacgctgtctgccttcatgttgatgagcttctggaagcagccgtggcaggtacaagaagtgttgcgttcgtcgacgtttttgaacagaacattctgacgacgtgaaaggcacttcctgatctctttcacgggtccagaacaagaacgactgatgccatagccctggttggaccagttgccgaagccaacaatggtcttctgtgcttttggagcaatcacatcgcatacattttcttcgatcgtcttcttctgtgcttttggagcaatcaaatcacagaccttttcaatcgtcttctgtttacccacataccgaaagaatcgcatcgatcggtaacctctgctggctcgatgttgaaggagtgtcgggagagcgctgaggtaacctctgacatggtcctgcatgtcgtgcatactgctcgtagtcggcgatggaatggacttcacgaggtcttgcgtatcgacattccatttgttggtgcgacgattactggtattgtacccagctgcttcgctaaagcgggcagagctgaaagactcgacgcgaccggcagaagatgctacagtgacgatatctttcatacccgggtcgacaccgactcgcagagaagcgtcctggcagtcttcgagaattgcgtctttgggataccccgcgttatctacagcgacatcttcactcgcctgatgcttcatttggacggagacccccttgccgtcgctgaggattcggttgtcaaaacgagaccctttcgtctcaagtccttggacattgaagtactttctccacaacatggaatgattctcgtgacgtccatcgccacggaagctctcgagcggcgaatcgcccatgctgagaagcttcatgagtgtcatggacgatataaggacgtaagaaatggtgaagccgctcttgcgtggaaggatactgaacagacgggggcgtttttttgttgttttctcttttagatccgctcccaactctgtaagcacgtgatgaaacagtctcattgtcaggtgcgctcgagtgttgaactgcttcccccttggcagcggcaagagatctctcaggcgtctgacaacgtctttgatgaggttcgcatgcacgagactcgctgggatgattttgtcgatatccgactcaggatactggaccactgccttgacaatcttattgaaatgtttcttcaacgagggatgtttaaagcgcaggtacttgattacaaccctgtccacgtttgcccagacgctgttgcatgccatcgtcgccatttgtattgagacgtctgagattacctgtccccattgacgaacgtccacctttaagtagcctgctggcctgagagcgtcgaaagcaaccatgctatccttcaagctttgtcccagagtatcctttcgaacgttggatgtcgagacagcaaggatgcacctgtaataaaagtttcgatccaggtgcggcaactgcttcacgtcaaagtctacatcatcgaggcatctggtgatatgaaaatttgcgaataagtatgcctctgcaactgcgtggttgattacgagtaccatgctttggatccttgagcagatttgctgccttgatacatccatgcacagagaattaagcgtcttcttgaccaccatgatgtccagatcgtcgtcgtcatctccattgtttgtcaccacccccatcgagatggagggagggagtgttcttttcttgtcttgatatcatcatgtactacaatttccttataccataatacacgaatttatggacattccatttaatgttactgtaaaaaataatagtggaattgaacaattatatgctcgtattgatagtttcatgaagactagtcgaatttgatagtcatagaacatggtgtaacattcaacttccttgtcacagatttactgagctcattccttctctttctagtcagcagctgcgtattcccatcgattttatgaatcactttgttccttacgttatcgtcttgtaatcgtttcttctggttctctttttgagtcctgatcatgtcttcgtctatgactttgtcattatcttcaacttgtatagaccttaataccttgagatcacatggttcggcggctgaatgcctctgccacgctcgcggtgtactctctcaagtgccaagaacatgtttaccatctcaatagcgacaaccgtctggacgtcattgaattgagaagtgtttgttgacatttgttgttgttgctattatttattacatgctgaatgctattgtttaaactaacgcaagtacatgggcgatgaaccaaattttgccaaggcgagagtgcttgaaagatttttttttagggcggaccatatttgagagaacacttggatttttttaccatatttgagagaaccgcatgtgccgtgcgcgtgcgcgcgtggggatgatgcttgacaacgatacgccaccgcattgccgtgtcatgtggatgatgcggattgggtcagcttaaatgctgaaatgtctctgattgtacgagaggcgttttgggctactactacattgtactcaccaacgggagtgtaattaattctttcaagagtctgcgtcggcacacaacataactagggtttgtattcacgtgtctccatgtttcctgaatagtcgctgcggctctgcgtcttcgcactaaacggcacgcgtcttggacggataccaacatgttgcggtttctactcaataaatgccagtcccatggtttgtccgggttactcgagacaatgtcccaagtggctactccgggattcgcactcaatccaagccagttccacggattgtccgggttactcgagacaatatcccaggtggctacactggggtttgtgctcaaataataccaatcccatggtttgtccatgttactcgacacgatgtcccatgtggctacactggggggtgtgctcaaacaataccaatcccatggtttgtcagggttactcgagacaatatccagggtggctaccccgggattcgcactcaatccacaccaatcccacggcttgtccgggttcgtcacgacaatatcccatgtggctactccgggattcgcactcaatccacaccaatcccacggcttgtccgggttcgtcacgacaatatcccatgtggctactccgggattcgcactcaatccacgccagttccacggcttgtccaggttactacacacgatgtcccatgtgacattggggtttgtgctcaaccaataccaatcccatggtttgtccaggttactcgacacgatttccaatgtggctacaatggtgtttgtgctcaatccactccaataccatggtttgtccaggttactcgagacgatgtcccaagtggctactccgggattcgcactcaatccacgccaattccatggtttgtccaggttactcgagacaatgtcccatgagattacactggtgtttgtgctcaaccaataccaactcaatggtttctccaggttactcgacacgatgtcccacgaaatactcgcgtttgagctcaatccataccagtcccatggtttgtccaggttactcgacacgatgtcccacgtgacgacactggcgtttgtgctcaaccaataccaatcccatggtttgtctgggttactcgacacgatgtcccacgtgacgacactggggtttaagcacaatttactccaatcccacggtttgtctgggttactcgacacgacgtcccatgtcaggtatggattatcactcaagtgaccccaatcccatttgcattctccggcttttactcgatccagtatgtgactgttaatttcgatgtcgagcattatataaattctcacggttgtgttgttctcaaataaagtaaagtgggaccattctttatgtaaagaagtaagtaaagtgggaccattcttttacactacagtcgacggaatactaaaatgaaaccgcttcgtgtacggtgtaacctaaaggtgtagaaatccacggggcagtggaacaccaatacgattgtgaatcaacaaattgcaagatgttaacgagaatatccattgaaggaccagccgcacttaagcgatcgcctcttccccggtaccgtggcccaaaagaacacggggtcttgatcgtgctgagtttcctgttgaaatattcgcatgtcttgaagcgttctttggcctccttcagcagaaatgcgctgtccgggccgttcacatttccaaaataattttgagcatgtagggaagggaggatgagtgactttgataatcgtttgcggcagcttgaggcggactacaaagtgttgttcgaggaacaggcaaaccagcgtcaggatatccaagccttacgggatgccacgtccacccagatccagcgtctggacaaggagatccaagcagtgcgggatgccacgtccacccagatcgagcgtgagttggaaacggcatgggccgcggcgtaccatgaactgcaagggatgttgaccgatgctcagttgacccaaggaaaactggcaacattcggcatgcacaaactcacaccccatcttgcttgttgaaaatccttgcttgccatctcatggagcagcctcctgcacgactcgctagcttgagacatcagcaccaaggaatcacaaatccgctccataccatgtttcgcaaccagtcaaaatcggccgggaggcaggaacgcccattcattgtcaaagctttgcatggggggggggagttcatgaatttgcttggtgtgtttgccttgccataaaaataatgagagcggtaggtaatgtatacctgaaaaatgcatacgtattacgtccgtgctatatgcacgttgcaatatgatcaattgatagattggtttcgatcgcatcctaaaaatatatgctggcctctgcagatgatggactggggtgacgtgtttccagatctgtacgatgttctagacattgatgagggtgctgttgatcaagaaattctgagggcgtttcgcattcaagtggtcagggttcatcccgacaagctaggtcctttggcatctgaagatgaacgaacagcagctgccctccgcacacgagttattctgcaagcgaagaacgtgttgctgaacaccgaaagccgcaaggaatatgacagtgagcggcgaatgagaaggcaaggggagcagcaatccaagtctggttttagtccgccggaggaggcatctgctggcatggcgcatgtttgggaggtctgggccaatgttgttgtagaagggtttgccaagcagtttgaggcaggagctcgaggcgagcgagtggtgcagcttttgggaacgattctgctgccagccataggggtgggcttgggtggggagagaggcttcaagctagggctgacactgtctactgtcttcaataccggatgtatttctgtggtcgtgaaggcgctctcttccgaggaccaaaagttgtttttccaggctctggaagtgttgtgtaccaaaatgccttgagtaatacagttgttgagaaaagtccgcagctgaattcccctgtcccactccgtggggtcccgcgattcctctttcatacttgccatttcccgacatatttgagaattcccactttatttgagaacaacataaaggagcttcttcattgatctaataataattttgacgtgaactgtcaaaatgttgcaagaagaatatgaaagagaattacgtgtgttggtggaaaaaacatcgacccccgtccgaagcctggtaggttccatcaccaatgacttaactgtgacatagtttagcttgaaatggaaaatactcgaaattcttgggtatgacgtccaggtcattcatgtaagcgagtatggttgcggtagagttttcccctgcccactttcgtcaatcacccgcccctctctccccatccgtgttcatgtggttcagcctttgttacactcagaccggtcaataatgttacagtatattgaatcaattacaattctctatgtacaacttggacagacggtcgattgttgtacacatgtacacattgctgcaaagtttgaggagagtggctatacttgcgaatgtaagccacatgacagtctcgaggtggatctcaaaccccactaaaaaagtgtacaaccggaataaacctacaaaatcggatgtggtcatagagttcttaaaggcgtcattaaaaatagatccattcgcatctcttgctgttcttcgtcataaggtaaaggatgctttcggatttgaggtatcaaaagaattgattcgcgttgtgataaaaaggcttgggctcacaaagaaaaaagcaaagttcttctccaggcctgataacttatatgagaaaaccacgtcattcataagccaaagggaacggttaaaagaggaagggaggacttttgtatcgatcgacgaaacttcatttggaagacatacgagagacgtgtttggctactcaccaaagggagagctactggttgtaccgaggttgagacctagggtgacgacaatgtcggcactttgtcttattcaacaaggaaaaggagacatttattttaacatcaggcaagggtctttcaacacgcatacttttgttgagtttttagataatttggactgtccaactgacacagtaattatacttgacaacgttgcttttcaccactccaagaaggtcaaaacacttgcagcttcaagggggtgggagctcctatacactcctccctactcaccttggttcaacccaatagaaggggtgttctccatcgtcaaacgcgatttctataaaagccaagatgtgtataaggctttgagttctgttaaagagaaacacgtagaggtttttttcgaaagtcattgaatacaatttctggaccttgatacaaggaaatagatacattggctactaaatggagacgatagtcaataaagagcctccggacaagcgtacgcgaccggaccgggcggccaaaattaaggacaggaaaaacggcgaggagaacgtggtaaagtgtacactgagtcggatcatagcggataaggacaacaaggacgttatcaccaaggtgattaaggagcgggtcgacagcgtatccaagaggaattatcttgccggtgttgcggtgaaccggatattaaaagaagtcttcgaaggggtaccagatgcgcaacttcacactgtaagtgtccctagcgtcgaccagaacttcattcggcagcttatggtggggtcgagacaggcgcacatggagacgagggacgccacagtcgaaaggttctttcacaacaactattggtttagggagaagattgaggggcgcgaggtaattgtgaaaaagaagaaacaatacgtgggtgccatcgctcgctacgatggcgatcgaaacctgtatagccacgcgtcgaagaagtacctgaccaatttcaataaccactacagagtccatctctccacatggatcaagaagttcgtttactcgaaggaaaacaggatcttggccaaggagttcaaagatgagcacggcattgacgagaccgtattccaccgatacctcctctacgatatccactcttggggagtaaaggaagacctcatagcgatacattcgctcctaccggagcgaacaaagatgttgctgaagattcagcactcgatcatcggacgggacgagatcaaccgacagtggcttaagagcgtttccaacagcgccaagatgatccggtacaacgtctttatcaatcgatacctcgaggccacagaggacgagggctacgccaagctggtcaacatcgctcccatcccaaggacgtgggtctcgtcgagagtcttgaaaagacgctgacgaacaaggagcactgggagtcagtcttcgatgtggaaaacatccgttctactgggaaaggtgtgtttacatgcaccatagacactgacggcgtaatggcttgtacccactttcttagggccgagaagaaaaagatttcaatcaaggacgacggaacggcgattaagaagcagaccaagactctccgcgagttttccgagtccgaccctaatgtggtggtcgttgcaaacgaccctggccgctgcaacattgcctttttgacttggaagaaaaataaggtcgaagaaaaagataaggggggtaggaagaggaagaggcactgcgagttcgggagcaagagactcacgcgggagcggtactacgttgagagcggggtcttcaaatctagaggtccgaccaagaagtggttgtctaacatccaggactgccttgacgacctgaaggacaacagtcccaagcgcacatctctagagtcgtttgacgcttacgtgactgtaatggtcaaccattgggattctcgatggggggagatgtccaagtcgcggtggggcgcgcagcgcctgcggctctacggtggcaagaaacgtttcttagcacgcttcttcaacgaggtccaggcggatgtcggtgagaggaaaacaattgtcatcgcatacggttcttctaagtttgcccctggtggcaagggtgaactttctgtccctacaacgagcgcgttcaatgcgtttagcgaccgtttcaaggggcgagttgccgtcattgacgaattccgtaccacaaagatctggcacaaggacagcaccaccgtcctccagagtgtgcagtccgaaaaagaagggcgcacggttcgaggcttgctatggtgcagttccaccatggagaacagcaagttgtttgtaaaccgtgacctaaatgcagccattaacatccacaattgctttacaatgtacccaacccgccccggaattcttgcgaggccaaagaaatattgcaaactggaagttgtggtaggacgcacaattgattacaagctgacaggttctttacagaacgcagtgtcgagcgaagtgtagaagataaacacatacaagaggattttgggggactcggcatattatgtaacataattcccttgtccgagtgtaagtccaccacccatgccatgcattcctttgtttgtgtgtgtcagtcagtcagtcgagtagtcggaaccatcccagcaagtgaagaactactacatcgatgtaaaacgcgaagatgcaattgctggattgaatggcctgttcggagtgtcacgcgaggactcaggtgcacgcctggtggagtacatgccatcccatgaccaaccaggtcccccgcatctgaacatggccaccagagagagagggaacgttacatccatctgggtgagaggtgggaacgttacatactcagcaaaacaatgccaagacctgtattgatcaaagttgtttacactcgtttttattaaaacaattgtttagttgctaatctgtcatcggggttgtagctcagtggtagagcgtgaggttaagccaattttcttcattccttgatcatgtcgcccactgatgggttcgaatctcggtacctccagtgtttttccaaagttccacgttcagttaatcaagttacgtgagttaattaagttagtcaatttcctgtctgcggatatcttgactgaagacgcgtccaccgcgatccacagctgtcacgatcatacgacgaattgtcacagatccaagtgttgttccgtctttcatgtcaatgttgatgagatgcggtagccaggacgaaagtctactcgcgcacatagtggcctgctgtatggctttcaacaccttggcatttccagttttggcatgggctttgaggattttcgtctccaccacgaaaagtgtgttgatagcatgtgagaatacaagggcgtccccgttggcgcgcttgaagcagccgtcatcgaagacgtactccacagcgacgaggaacaaacgtgacgatggggatgtgtggtgtttttgcttaattaggtggcgcaatgcgttatactccaagacgcgtggatcaccggaagtagacgatgacgtccgcagtgcattgagacggttgacattcctgcagtggaggcgatcaagaaactttgatgtgtctagactgtccatgtccagcgcccttcctagttggcggactggctttgaaatgggctgacaaggttgtgtcggcatcgcgtcgatgaagactcttttcttcgcgcatacgtggatgtggcaatgactccaatctcaaaagaatgctttacatatccgtctgtgtggcgtgtggaaagagcgagtgagcgagatagaaagatagagagagagaaagagagagagagagagagggatagatattcgcgtgtgtatgtattttgcgttatttgtagatggaagaaaggaaagagtagggttgtgtgcgaatgaagaggatgatgaggagaataaaagaaaaatatgcattctcggggcgaggatgtccttttatgatgcccggctatcgtacctccagcaatacacaagtattgggcatgcctgtgtacgcaaagcgccggtccctttaatctgagtgagtgatagcagaagtctgcttgagacgacacgtgtttccgcgcaccctcgaatcacgagtgtaaacaatatattctttacactagcctgtatcctttgaaaacccctcgcaaaacagaagccaacgttaagatccattcgcggatccgcgatctgggctttccgggctgggctggtactgacagggatgggtgccatgagatattcctactctgccccattgaccagtatgtttcaacttataacttccctgcgtgtccatcaacatcaacagcgtcacctctacccatttcgtgtaaagagaccctgtcgtaactactgtatgtatattcggattttctcatggagacgtcggtggtcctcgtcccgggccgtcgctaccgcatccgtatccacccgaacctgatgtccggcttctcgcccgaggtcctccaccacccgctgctctgggaccgggtcatgcggtacgagggcatcgacgacgcgttccccggcaagtcctgcggcaacacgagccgcatcttcaccgacggcttgaataccctgtccttcgtgggagtcgacccccactgcgtcgactaccaggcgttcatggcggtgatctgtgcctgccagaacgaatgcacggatcacgggacgacgctgcacgtcttcgaacgcaagccgggcgacgggacgcgtcagctggaggtggttgcagaggtgtccgacgaggaagctgactcagccgaccctgggcacgataatgaatgaatgaatggagaaattaccgtgtgaacgatgatcctacagatgaactgatgcgagaggtcgctcgctctgtgactcgactcgactcgactcgactcgacagtttccgccgtgatgtaatgcgagaggtcggtcgccatgtgatgtgactcgactcgcctcgcctcgacagatgccgccgtccttgatgagagtggtcgaaacacgagtgtaaacgttgttgtggcctaatccccccccctgcatccttacatgacacacgacattcgacagtgttccgcatctccgatacattcgacagtgttccgcatcttgcgtgtgtcctccgatacattcgacagtgttccgcatctccgatacattcgacagttttccgccgtttgcttgtgtcctccgatacattcgacagttttccgccgtttgcttgtgtcctccgataccgctgacgatctcgcttcttccaagcttgatgtgaactgtgggctcccctccggtcgcccacccgctcggttcctcgcggaccctttgtgggggctcccctacggtcgcccccagtcgctccgctgtggggaggtgaaaggggctccgccgcttgttatatgttaatgtgagacggttatcatccaagtgttgtttgttatctttgactcgactcgacacaggttccgccgtcatgtaatgcgagaggtcggtcgccatgtgatttgatgtgatgtgatgtgatgtgactcgactcgactcgactcgacagtttccgccatgatgcgagaggtcaccatgtgatgtgacttgacagtttccgccatgatgcgagaggtcaccatgtgatgtgactcgacttgactcgacaggtgccgccatgatgcgagaggtgccgctcgacaggtgccgccgtgatgctaaaaatcaccttacagatggcaaggcaaccatctgcaaaattgtcatttcagatgacacggtgcgcgcattggcagtcggggatgatgctaactatgagaacgagaaggagatcctcatcgcacctggcttcatgattgctcaagtcaagggaacgcgcaccttcacagacaatgggaatacaattatgtgtttcgacatcagaggcaacggggcttaatccatagttgagcaactgtatctgatatgggatatttattggcatctctgtaatctatacagatcaccgtgatttgaatggaatccttgtatatcttgttccgacggtacccagcaaaatcataatagatgcctaaattaaccattgcatgcctgatttctgcatcgctgttgtcataccaaccggaaattgtgtgcattgggatcaatacatactgaacacccataacttgttgtatccggtctggcacatatctgtgtcgcaaggtctctactaagtcagatgatttgtatcgttgcgagcacatcttcgaaggagggattttaaatgccagcctcgtatcaataacacattttggaaggatgtgggaaaaaatgatgtccttagggagtgcacgccagcatttgtccatcctaccatataatttggcctcgatataaaaaaataaacataaaatatcctcaacgctttggtcctccaattcgttgcgactgcgaatctctcgacagcatccgccgctacgcgtgtgtgaggatacggcatgtgtcgtgataaagtgcgttatcctatctatcctatctatcctatctatcctatctatatatatatatctatgctacgtcgtttgtctacagatacaaatgctgcagaccggggtccgctgtcagcgctcgcctggatgtgcgccgcctcacttatgtcaaccagtacacttcccagagggcgattctgagggttcaattcgtcacgtgtgtatacagtttttcgggttccatataaattacgcatatcctgtaaaaaatgtgtttttttcacaaagatcagaatcagagagccttcaagaaacgagttcaataggttcgtaacaactttacattacaagatgcagaagacgtattccagctgtttcaacaaataaaaacaccgaccctgtgggataaagcaatcatgtacaacttcctggatcgtattgaagaactcctagaaataattagatataagcaacacccttactgggaaacaacaccttttcatctcattacactcgacggaatactaaaatgaaaccgctttctgaagtgtacggtacaccttgcggtgtaacctaatgttgtcgcgaccaccggagggggaccgagtggtgtctacaacaatacgagtttttattcatcaacaacaacagagctgctgtgggcaaatggaagaggtcgtcctagacccatcaattccatgcagtgcagccttgcgattgtgagagcagaagagcgatcccggtccgagtaaatgcatgtttctggagagaatcgcagtcctcgtacctctgggtaccgctcgatcgatttttgagaatcgacaagggaagtggcgaagccacccctcctgtgcttctcttgtgcgcctttacgtttattgtacaaccttacccctaagtggtcgcaatcagcgacctttggcatcgttttcgatttcgtgtgaccaaaacgttcaccacccaacctaagcttcacgtctgctgaacaaacacttgggatcttgtaaacacgttctttttctttacccgtctcccacgacataagagtcgttttgaactcatctgtcacagaaacgtcctctttgaaaattcttttacacgatgcgaacatggccccagtgggaactgcaacttctcccggtccagtaggcttcagtttcgtgatggcagatccgtaggccacgcaaaccttcatatcaggaagttctttcatcatgcaccgcttgatacccgcccagaaagagtctttgacctttcgttttccgatgtaacgctgcaagttgtcacgggattctcggcgtcgcaaagccaatctccaccactcgtcagaaaacttagcgtaatttgacaagtacgcggagatcttatccgtcctcgatgtactcaaagctgctccattttcacgcagagactcccacataggaatcatgtcagcaaaacgcagttccttctgccttgtctgcttcttgatacccgacttgtggtaaaatgcaccacgtgtcagcgtccatgtcttatttttatcgtctgccaaatacgttaccgtagcgatgttgctccgtcctgggtccacacccaggacgacgatacccatatcgggcaatatcgttttaagtgagccgtcgtatttttctgcgatcttgataccttcttctttacgaggcttcttacaggtcttcttcagatctgagacaaggacctgtactgtcttgctgtactgcatgctcaaagagactccgtcagtacagatgctgcagtcgaaaacccacccattcttgacaggtggttttctgaagaaggaacctgcgactgtttttcgggcgttcacaagcgtgtcatacaaaccctttgcatgtctgtactcgtcagtagccttgatatccttaacatcatcatcgtacttcttcaggaccgacttgtatgcctcccattcaccaggaccacatgattttttcttcttctgtgcaggcctctggggcaacatgaagctgtcgggattctttacatgttcccacttggaaagctcaacgatgttctggtcattggggaacatgtgcctgaacaggttcacgagggtcttcaggtcaaggctaacatgcacccgttggacattgaagatgggcatcaatcggatacgacgtgcatccatatcctccaaccgtgtctgtatccaataattaaaccggaccatggtcggaaagtccatgtctttgccatagttatcataaactcgacttccatctggaacactcagcatctccctaacttcattgacgtactcttgaacagactctggccatccctccatgttttggacttcttgctgaatagcctgcatcacgtcgtatccccgaatgatcttcgatgtgtccagcgtcttcggggaatttaatttatttaaagtggtggaagtgagtctggccagacgtggtatcaaaggaacccatgcgttgtttgacacgacagtgctcaatgtgtgacctgcatagttcaatacctgatcgaaatagatcggataagacttgatgtagtcagcgtcgtcattaccaattacatcgccgatggagtccttcacagcttcgtacgatatcttgctttcctcatcggggaagattccgtctaccccgatacggagccaatccttccagtaggtatctttcatgttgtacaggtctggaatatccagacctttctctaatagactcgtgatgtggaaagtcagcaccagactgtaccgccgtaacatgcggctcaccacattgacgagctggtccacatgctccctaaacttaccgaattcttcatcgtcaagactcattgccttcttcagggcgcatttcacgacacacatcttttccaccgtcttgtattctggagggggtctggcgatgagaccattgtcttcgcataaacggacaagatcgtccttgttggacttcgacgagtatggtacttcagccaatttcagtagctccttcaatttcgcgactgtcggaggtttcgtcgccatctttcataatcaatacgtcacagaccgctttatacacataagtgttccaaacgtgttcaaaacaacccataataattttatcagtgaggttgccgaatgctaaggaaatcatatcagacacgtgcgtctttgtttcattcggtatgtagttcaaacgacgaaagtctctcttcactaaggtttagcgaagcatagctcaatagcattgaattctggactgtaaggaggtgtgtaacaaatattgacggggtgattattactactgaattattgcacaaactcaatgattcaataaatgcaacgaagtccgtcttcttcacagatcctttcttcacaacgaactctttcctaccatctgaaaaaactgccatcaacaaactgtggtgtacccacccaccagtagttttaaagataacaggttttcctacaggggaatacccataatgtggcttgagacgctcactaaacccacattcgtcaactgatactaaaattttcccagcattgattgtctccttgtacctactacaaaattcattgacaagtggaactaagtcccctttacactgtccacggagtttgctcctttttcttgtaaaaccaatgagttttatgaaacgatacactgttttagttgataatcgtacattgtgagtacttttgaaaaaagcaacaacgcctcttgcggttgtgcattgagttgacaataaaaacgattttaacaaatccttattcgtctcaaaaaggttgcttacaaattcacgtcgttttcgatttacaccaaagcgtttccacctccacagagtagaacgactgatgttcgtaaacacagaattttttaacacacccaagtcagcgaccattcttaacgccaattttctaacggcgatgtcgtacatttatttccatctgatatatgtttcattttactgttccgccgactgtaggcggtttcattttagtattccgtcgactgtagatcgatggacgagccaatgatgaccaccgacgcgcaagcctccgtgtttgtttggtgtcttttggatacatacatatggacatgtttccgccgtttgcatgattgtggaagtctgcttgatggacgatgacaacagtgtttgttcttcatccgttttgcgtgtgttcgtttgtacgtacgtgtgtttgcttgcattcattcattaattcatgcgtgagtcgtgagtgcagcattcattatcatcatgtcgtatccgcaatcccatatacccgcgtgtcgagttccctttgatttgaagcactttttttacgacccccttgttcttcatctgcctgtggaaccacttttctcgatctttactgtccccgctttcgttgatatacatgttgaacaatgcaactctcgactccctgaactcttccgcaaactcgcagttctcggcaaggaacgctttttgtacgaggcgactccccatgtatgtatccatagatgcagccggtatctacatacagctaggggcatttgaaagtgggacaccttgtatttgggggattctgaaaagttgattcgaactttgtaaccgatcttgtcaatacagatactgtcttccggagattgactcaaaacattcaaggcctgtaaagacacagaagttacatgttcaaagtagcctgaaaagtcaacatgctggctcacatcgtgcgcatcaataattattttcaaagcgttccagtaataaaacaattctgctacatctggaattattgggcacgcacatcgatattttagctgcaaaccggacacattctctataggggcttttttttaacctctcgctctgttgtctgggcctaaatttatggtagatgtaaggcatttccaggatgaagtcgatgaacttggattacagggaatctcaaaggcggcccagacagacttcaaaaactatccctatcccatgcgggagaggaacttgtcattcacatc

SEQ ID NO: 254 - DNA, 20975 bp, unidentified
  misc_feature 1..20975: note = Fanzor polypeptide
  source 1..20975: mol_type = other DNA
cttgcagacatctgcgtgaccttcctttgcagcctcacacaaggcccagctgtcgctagcggtcgcccgggccctgtactcaagtccagccacctctggatccatgagaagcttgcagacatctgcgttacctgcattggcagcctcacacaaggcccggctgtcgctagagttcgccatggccctatactcaattccagccacctctggatccatcagaatcaagcagacatgtgcgtgacctgccttcgcagcctcacacaaggcccagctgtcgctagcgttcgccctggccctgaactcaattccagccaccgctggatccataagcaggttgcagacatctgcgtgaccttcccttgcagccgcccacaagacccagctgtcgctagagttcgcccgggccctatactcaagtccagccaccgctggatccatcagcagcttgcagacatctgcgtgaccttcgtttgcagccagccacaatgcccagctgtcgccatagttcgcctgggccctgaactcaagtccagccaccgctggatccatgagcagcttgcatacatctgcgtgaccttccttggaagccgccatcaaggccatgctgtttatatggttcgccctggccctgtactcaagtccagccaccactggatccatcaaaagcttgcagacatctgcgtgaccttcctttgcagcctcacacaaggcccagctggccatatggttcgccctggcccttttctcaagtccagccacctctggatccatgagcagcttgcaaacatctgcatgacctttcgttgcagcctcacacaaggccctgctgtctctagagttcgccctggccctgaactcaattccagccaccgctggatccatgagcagcttgcaaacatctgcgtgacctttcgttgcagccgccaacaaggccctgctgtcgctagagtttgccctggccctgaactcaattccagccaccgctggatccatgagcagcttgcagacatctgcgtgacctgccttggcagcctcacacaatgccttgctgtcgctatagttcgcccaggccctgaactcaagtccagccaccgctggatccatcagcagcttgcagatatctgcgtgaccttcattggcagccagccacaatgcccagctgtcgctatagttcgccctggccctgaactcaagtccagccacatctggatccattagcatcttgcagacatctgcgtgaccttccttggcagccacatagagaagcttgttttcattttggttcgccctcaattgtaggaccccgttcacctgtacaagaggattggacaccaagcatactgctagaaggtcggcgcgcccccctttcgccatcatctctccaactcgctgtggtggttggatcagtccggtaaggggccatccagaaaatctgttgtgcagagttttacacactaatacaatctttgggttggaagagaatagggcaatacgatcaagaatgtcatggggaaacgttgggaatggaaacgatgatcgcgtgtgcgaatgcatgttcgatgaacatgtttgtacaatgcgtgcaagcgcacaggatggtataaataaatactgagttgggataaaccctataaaccctataaaccctataaaccctgggttgcacttgcctggcatgaaagcgacaagcggcacttgcccggcggtatctgcaagcggtacagaatgggtgttcctgcctcctggcgatttttttgaattttccaagcagaagttagagccgtacaaacgactcactcactcgccaaccagagatttagttctccgtggaattgcgattccgaccagaccaggctccgaaaccagtcaaaatacctccgtgaggcaggaactgtactggtgcaaattgtcaatacaacagatattgtcttcaggagattgacacaaaacattcaaggacatagaagttacatcttcaaagtagcctgaaaagtcaaagtgctggctcacatcgtgcgcatcaatcattttcaaagagtttcctgcctcatcataatcaaatatttctgctacatctggaattattgggcacacgcagcgagaaaactgaacacattgctgaaaagtttgaggagagtggataaatacatgctctacggtggcaataaacgtgtctttcctacactcgggcaagggaattatgttacataatatgccgagtcccccaaaatcctcttgtatgtgtttatcttctacacttcgctcgacactgcgttctgtaaagaacctgtcagcttgtaatcaattgtgcgtcctaccacaacttccagtttgcaatatttctttggcctcgcaagaattccggggcgggttgggtacattgtaaagcaattgtggatgttaatggctgcatttaggtcacggtttacaaacaacttgctgttctccatggtggaactgcaccatagcaagcctcgaaccgtgcgcccttctttttcggactgcacactctggaggacggtggtgctgtccttgtgccagatctttgtggtacggaattcgtcaatgacggcaactctccccttgaaacggtcgctaaacgcattgaacgcgctcgttgtagggacagaaagttcacccttgccaccaggggcaaacttagaagaaccgtatgcgatgacaattgttttcctctcaccgacatccgcctggacctcgttgaagaagcgtgctaagacacgtttcttgccaccgtagagccgcaggcgctgcgcgccccaccgcgacttggacatctccccccatcgagaatcccaatggttgaccattacagtcacgtaagcatcaaacgactctagagatgtgcgcttgggactgttgtccttcaggtcgtcaaggcagtcctggatgttagacaaccacttcttggtcggacctctagatttgaagaccccgctctcaacgtagtaccgctcccgcgtgagtctcttgctcccgaactcgcagtgcatcttcctcttcctaccccccttatctttttcttcgaccttatttttcttccaagtcaaaaaggcaatgttgcagcggccagggtcgtttgcaacgaccaccacattggggtcggactcggaaaactcgcggagagtcttggtctgcttcttaatcgccgttccgtcgtccttgattgaaatctttttcttctcggccctaagaaagtgggtacaagccattacgccgtcagtgtctatggtgcatgtaaacacacctttcccagaagaacggatgttttccacatcgaagaccgactcccagtgctccttgttcgtcagcgtcttttcgagactctcgacgagacccacgtccttgaggacgcccagtaggccgtcggtgtctatcgtgatgaaggagtgcttgactgttgggatgggagcgatgttgaccagcttggcgtagccctcgtcctctgtggcctcgaggtatcgattgataaagacgttgtaccggatcatcttggcgctgttggaaacgctcttaagccactgtcggttgatcttgtcccgtccgatgatcgagtgctgaatcttcagaaacatctttgttcactccggtaggagcgaatgtatcgctatgaggtcttcctttactccccaagagtggatatcgtagaggaggtatcggtggaatacggtattcgtgtaatccggttgtacacttttttagtggggtttgagatccacctcgagactgtcatgtggcttacatttgcaagtatagccactctcctcaaactttgcagcaatgtgtacatgtgtacaacaatcgaccgtctgtccaagttgtacatagagaattgtaattgattcaatatactgtaacattattgaccggtctgagtgtaacacaagacctagctgctgtcaagattcacaagggccctgtactcggggccagccgcctctggatccatcaaaagcgagcagacatcggcgtgacctgccttggcagccgcccacaaagccctgccgtctctagagttcgccctggccctgaactcaattccagccaccgctggatccatgagcagcttgcagacatctgcgtgaccttcactggcagccgcccacaaggccctgctggcgctagagttcgccctggccctgaactcaagtccagcgactgctggatccatgagcagcttgcagacatctgcgtgacctttcgttgcagcatccaacaaggccctgctggcgctagagttcgccctggccctgtactcaagtccagccacctctggatccatgagcagcttgcagacatctgcgtggcctgcattggccgcagcctccaaggccatgctgttgacagagttcgcccgggccctgaactcaagtccagccaccgctggatccatcagcagcttgcagacatctgcgtgcccttcctttgcagcctcaaacaaggcccagctggccatatcgttcgccctacccctgtactctagtccagccacctctggatccatcagcagcttgcagacatctgcgtgaccttcccttgcagccgcccacaaggccctgctgtcgatagagttcgccctgcccctgaactcaattccagccacctctggatccatgagcagcttgcagacatctgcatgacctgcattggcagccgcccacaatgcctagctgtctctagagttcgccatggcccttagctcaattccagtcaccgctggatccatgagcagcttgcagacatctgcgtgaccttcctctgcagcaacccacaaggccctgctttcgctagagttcgccctggcccttagctcaattccagccaccgctggatccatcagcagcttgcatacatctgcatgaccttcccttgcagccgtccacaaggccctgctgtcgatagagttcgccctgcccctgaactcaattccagccacctctggatctatgagcagcttgcagacatctgcatgacctgcattggcagccgcccacaatgcccagctctctctagagttcgccctggccctgaactcaagtccagccaccgctggatccatcagcagcttgcagacatctgcgtgaccttccttggaagccacatagagaagcttgttttcattttggttcgccctcaattgtaggaccccgttcacctgtacaagaggattggacaccaagcatactgctagaaggtcggcgcgcccccctttcgccaacatctctccaactcgctgtggtggttggatcagtccggtaaggggccatccagaaaatctgttgtgcagagttttacacactaatacaatctttgggttggaagagaatagggcaattcgatcaagaatgtcatggggacacgtaaggagtggaaacaatgatcgcgtgtgcgactgcattttcgatgttcatgcatgcaagcgcacaggatggtataaataaataatgagttgggataaaccctataaaccctgggtttcactttcctggcatgcaagaggcaagcggcaagaggcacttttcctggcggtatctgcaagcggtatagaatgggtgttcctgcctcccggcgattcttttgaattttcaaagcagaagttagagccgtacgaacgactcactcactcgccaaccagagatttagctctccgatgaatttcgattccgaccagaccagtttccaaaaccagtcaaaatccctccgggatgcaggtcacacgaaatcgaaaactatgccaaaggtcgctgattgcgaccacgtaggggtaaggttgtacaataaacgtaaaggcgcacaagagtagcacaggaggggtggcttcgccacttcccttgtcgattctcaaaaatcgatcgagcggtacccagaggtacgaggactgcgattctctccagaaacatgcatttactcggaccgggatcgctcttctgctctcacaatcgcaaggctgcactgcatggaattgatgggtctaggacgacctcttccatttgcccacagcagctctgttgttgttgatgaataaaaactcgtattgttgtagacaccactcggtccccctccggtggtcgcgacaacattaggttacaccgcaaggtgtgccgtacacgaagcggtttcatttaagtattccgttgactgtagtgcaaattgtcagtacaacagatattgtcttcaggagattgattgacacaaaacattcaaggactgttacatcttcaaagtagcctgaaaagtttgagtagagtggataaatacttgctctacggtggcaagacccagctgctgtcaagattcacaatggccatgtactcggggccagccgcctctggatccaccaaaagagtgcagacatctgcgtgcccttcctttgcatcctcccacaatgcccagctgtcgtgagagtccgcccgggccctgaactcaattccagccacctctggatccatcaaaagagtgcagacatctgtgtgacctcctttctcgcccacaaggcccagttgttgacagagttcgcccgggccaagacccagctgctgtgaagtttcacaatggccctgtactcggggccagccacctgtacatccatcaaaagcaatcagacatctgcgtgaccttccttggcagcctcacacaatgcccagctgttggcagagttcgccctggccctgtacttgtgtccagccaccgctggatccatcagcagcttgcaaacatctgcgtgacctgccttggcagcctcccccaaggccctgctgttgatatagttcgcccgggccctgtactcaattccagccaccgctggacccatgagcagcaagcagacatctgcgtgacctgccttggcagcagcccacaaggccctgctgtgcgtagagtttgccagggccctgaactcaagtccagccacctctggatccatcagcagcttgcagacatctgcgtgacctgccttggcagcctcccccaaggccctgctgttgatatggttcgcccgggccctttactcaattccagccaccgctggatccatgagcagcaagcagacatctgcgtgacctgcctttgcagccgcccccaaggccctgctgttgatatggttcgccctggccctgtactcaagtcctgccacctctggatccatgagcagcttgcagacatcggcgtgaccttccttggcagccagccacaatgccctgctgtttatatggttcgccctggccatgtactcaagtccagccacctctggatccatcagcagcttgcagacatctgcgtgaccttccttggcagccgcacacaatgccctgctgtctctagagctcgccagggccatgtactcaattccagccaccgctggatccatgagcatcttgcagacatctgcgtgaccttccttggcagccgcacacaaggccctgctgtcgatagagttcgccctggccctgtactcaagtccaaccacagctggatccatgagcatcttgcagacatctgcatgaccttcattggcagcctcccacaaggccctgctgtcgctagagttcgccagggccctatactcaagtccagcaaccgctggatccatcaaaaacaagcagacatcggtgtgaccttccttcgcagcctcacacaaggcccagctgtcgctagcgttcgcccgggccctatactcaagtccagccacctctggatccataagcaggttacagacatctgcgtgaccttctctagcagccgcccccaaggctctgctgttgatattgttcgcccgggccctgtactcaattccagccaccgctggatccatgagcagcaagcagacatcggcgtgaccggccttggcagcctcacacaaggccatgctgtctctagagttcgccagggccatgtactcaagtccagccaccgctggatccatgagcagcttgcagacatctgcgtgacctgccttggcagcctcccacaaggccccgctgttcgtagagttcgccagggccatgtactcaagtccaaccacatctggatccatcagcatcttgcagacatctgcgtgacctgcataggcagcctcacgcaaggcccagctgttcatatggttcgccttggccctgaactcaattccagccacatctggatccatgagcagcttgcagacatctgcgtgaccttccttggcagccgcccttaatgccctgctgtttctagagtttgccagggctctatactcaagtccagccacctctggatccatgagcagcttgcagacacatgcgtgacctgccttggcagccagccacaagaccatgctgttgatatggttcgccctggccctgaactcaattccagccacctctggatccatcagcagcttgcagacatctgcgtgaccttcattggcagccacatagagaagcttgtttttattttggttcgccctcaattgtagggccccatcaacttgtacaagaggattggacaccaagcatactgctagaaggtcggcgcgcccccctttcgccatcatctcttcaactctctgtggtggttggatctgtccggtaaggggccatccagaaaatctgttatgcagagttttacacactaatacaatcttggggttggaagagaatagtgcaatacgatcaagaatgtcatggggacacgcaaggagtggaaacgatgatcgcgtgtgcgactgcatgttcgatgtaactacatctttctttattactttaagtacagaatgggttttcctgcctcactgcgatttttttgaattttcaaagcagaagttagatccgtacgaacgactcactcgccaaccagagatttagctctctgcggaattgcgattccgaccagaccaggctccgaaaacagtcaaaatccctccgggaggttgcaacagttgacttgtttgctttccgaaaataagtaaacctaacaggaatttgcatgtaatgggcgttcctgcctcccggcgattattttgaattttcaaagaagaagttagatccgtacgaatgactcactcgccaaccagagatttagctctccgaggaattgcgataacgaccagagcaggctccgaaaccagtcaaaatccctacgggacgcaggaacaaatcagggccgatagttctaagggagtacatacagctagggacatttgattgtgggacaccttttattttggggatttgaccaattcaagctttgtaaccgatcttgtcaatacagatactgtcttcaggagattgatacaaaacattcaaggcctgtacagacacagaagttacatgatcaaagtagcctgacaagtcaacgtgttggcttacatcgtgcgcatcaataatcattttcaaagcgttcctgtaatcaaataattctgctacatctggaattattgggcacgcgcagcgatattttcgcttgagcaaactgaacacattctcaatagcgttgaactctggactgtaaggaggtacaaagagcgggcgtattcctacagaatcgaacgcagagatcgtctcctttgaatgatggaactggatattgtcaaggacagcgacagtaccctgctttacatgtaactctgatacaaactgtacaaattcgactttcttgcaattgtgatcaaggatcttgtaatgaacgatacctttgacagaaacggcagcgacatcttgatagaggacagagacgtcacaccctctgcaagctgagacattgtcaagaatggattggagtcgatcagtttttttatagcaaccttgatatcttcggtaatgacgctcgcccgtttcttccaatgatgttttatattggctttggtgacccaacgttggagtgacgattttgatactttgtacgacagactaactttcctcaagctacgattatagtatttgtagtgaacaaccgcgcgatgtcttacctctgcatcaatcatgataacgtgcacgtattagggtataaggaaattgtccgttagtatggtatcaccaaaataataatcactccctctcgatgggggtggtgacaaacaacggagatgacgacgatctggtcatcatggtggtcaagaagacgcttaattctttgtgcatggatgtatcgaggcagcagatctgctcaaggatccaaagcatggtactcgtaatcaaccacgcagttgcagaggcatacttattcgcaaattttcacataaccagatgcctagatgatggagactttgatgtcaagcagttgccgcacctggatcggaacttctactacaggtgcatacttgcggtctcgatatccaatgtccgaaatgatacgctggaccagagcttgaaagatagcatggttgctttcgacgctctcaggcctgcaggctacttaaaggtggatgtttgtcaatggggacaggtaatcgcagacgtctcaatacaaatggcgacgatggcatgcaacagcgtctgggcaaacgtggacagggttgtaatcaagtacctgcgcttgaaacatccctcgttgaagaaacatttcaataagattgtcaaggcagtggtccagtatcctgactcggatatcgacaaaatcatcccagcgggtctcgtgcatgcgaacctcatcaaagacgttgtcagacgcctgagagatctcttgccgctgccaagggggaagcagttcaacactcgagcacacctgacaatgagactgtttcatcacgtgcttacagagttgggagcggatctaaaagagaaaacaacaaaaaaacgcccccgtctgttcagtatccttccacgcaagagcggcttcaccatttcttacgtccctatatcgtccatgacactcatgaagcttctaagcatgggcgattcgccgctcgagagcgtccgtggcgatggacgtcacgagaatcattccatgttgtggagaaagtacttcaatgccaaggacttgagatgaaagggtctcgttttgacaaccgaatcctcagcgacggcaaaggggtctccgtccaaatgaagcatcaggtgggtaaagatatcgctggagaaggaggaggagataatgcggggtatcccaaagacgcaagtatcgaagactgccaggacgcttctttgcgccagggtgcgctgcgtgtcggtatcgacccgggtatgacagatattgtcactatagcatcttctgacggtcgagtcgagtctttcagctctgcccgctttagcgaagcagctgggtacaataccagcaatcgtcgcacaaacaaatggaatgccgatacgcaagacctcgtgaagtccattccatcgccgactacgggcagtatgcacaacatgcaggaccatgtcagaggttacctcagcgcgctcccgaccctccttcaacaccgagccaacagaggttaccgatcgatgcgattcttttgatatgtgggcaaacagaagacgattgaaaaggtatgcgatttgattgctccaaaagcacagaagaaaacgattgaagaaaaggtatgcgatgtgattgctccaaaagcaaagaagaccgttgttggcttcggcaactggtccaaccagggctatggcatcagtcgttcgtgttctggaccagtgaaagagatcaggaagtgcctttcatgtcgtcagaatgttctgttcaaaaacgtcgacgaacgcaacacttcttgtacttgccacggctgcttccagaagctcgtcaacatgaaggcagacagcgttgtctggcgcagagttcaaaacgagccctccgccctcatcgacggggctcctacaacaacaacaacgtttgagaagcagaagacggtggtgaagaacgttaaggtccacaaagtactgcactgtcgcaacagtgtcaaaagcgcatcatccaatgtgcgctgtggtgcaacctggaaccgagacgtgaacgctgccaagaaccttcttctgcttctgacgacgtggatggacgggaaagagcgaccagcggcattttgtgtgccctcctcatcgcccaccccaaaaaccacagtttccggagaggcaaatgtgggcgctcaaccaaccgacccacctgggtcagttagcagcttacaattgttatcctctgggccagcttaaatgctgaaatacgggatgaaggacacgaaggattgggaccttgatacaaaacctttagctgacctacccattgggttcaagggtcaccagtaagggtgtcccataaattctgtctctgactgtaagtagtcaccaagtcataaaacgcttgagagcaccgcaattcatgctgacactccacctatgacacaggtgacatacaatactggtgcaaatttgtcttcttacattaaggaattcaagtttcatcaagttttgtaaccgatcttgtcaatacaacagatattgtcttcaggaatctgcctaacacaagacctagctgctgtcaagattcacaagggccctgtactcgggtccggacgcttctgtatccatcaaaagcaagcagacatcggcgtgaccttctttggcagcctcacgcaaggcccatctgttgacagagttcgccctggccctgaactcaactccagcctacgcttgatccatgagcagcttgcagacatctgcgtgaccgtccttcgcagccgcccccaaggccctgctggcaggagagttcaccctggccctgaactcaattccagccacctctggatccatcagcagcttgcatacatctgcgtgacctgcattaacagccgcccacaatgcccagctgtcgttagagttcgccctggccctgaactcaagtccagccacctctggatccatgagcatcttgcagacatctgcgtgaccttccttggcagcctcacacaaggccctgctgtcgctaaagttcgccagggccctgaactcaattccagccaccgctggatccatgagcatcttgcagacatctgcgtgaccttcattggcagccgcccacaatgcccagctgtcggtagagttcgccctggccctgaactcaactccagccacggctggatccatcagcatcttgcagacatcggcgtgaccgtcctttgcagccgcccacaaggacctgctggcggtagagttcgccctggccctgaactcaagtccagccacctctggatccatcagaagcttgcagacatctgcgtgaccgtccttggcagccgcccacaatgccctgctggagctagagttcgccctggccctgaactcaagtccagccacctctggatccatcagcagcttgcagacatctgcgtgaccttccttggcagccgcccccaaggccctgctggcggtagagttcgccctggccctgaactcaattccagccaccgctggatccatcagcagcttgcagacatctacgtgaccttcctttgcagcctcacacaaggccctgctgttgctagagttcgccacagccctgtactcaattccagccaccgctggatccatgagcagcttgcagacatctgcgtgacctgccctggaagccacatagagaagcttgttttcattttggttcgccctcaattgtaggcccaccttaacctgtacaagaggattggacaccaagcatactgctagaaggtcggcgcaccccccttttgccatcatctctccaactcgctgtggtggttggatcagtccggtaaggggccatccagaaaatctgttgtgcagagttttacacactaatacaatcttggggttggaagagaatagggcaatacgatcaagaatgtcatgggaaaacgttaggaataccgatgatagcgtgtgcgactgcatgttctacgaacatgtgtgtacaatgcatgcaagagcacaggatgaaaacctaaataatgagttgggttaaactctataaaccctataaaccctgggttgcactttcatggcatgcaagcggcacttgcatggcggtatctacaagcggtacagaatgggtgttcctgcctcccggatatttttttgaattttcaaagcagaagttagagccgtacgaacgactcactcgccaaccagatatttagctctccgcggaattgcgattccgaccataccaggctccgaaaccagtcaaaatacctccgggaggcaggaacaaatgtacaggtgcaaattgtctttcttacttacattaaggaattcaagtttcatcaagttttgtaaccgatattgtcaatacaacagatattgtcttcaggagattgacacaagacattcaaggactgtaaagacatagaagttacatcttcaaagtagcctgaaaagtcaaagtgctggctcacatcgtgcgaatcaataatcattttcaaagagttcctgcctcagaatcaaatatttatgctacatctggaattattgggaacacgcagcgatattttcacttgagcaaactgaacacatttctgaaaagtttgaggagagtggataaatacttgctctacggtggcaagacccagctgctgtcaagattcacaatggccttgtactcggggccagccgcctctggatccatcaaaagcaagcagacatcggtgtgaccggccttcgcagcctcacgcaaggcccagctgttgacagagttcgcccgggccctaaactcaagtccagccacatctggatccatgagcagcttgcagacatctgcgtgaccggacttcgcagcctcacgcaaggcccagctgttgacagagttcgccagggccctgaactcaattccagccaccgcaggatccaacaaaagcaagcagacatcggtgtgaccggccttcgcagccgtccccaaggccctgctgtcgctagagttcgcctgggccctatacttaagttcagtcacatctggatccatgagcagcttacatacatctgcgtgaccttctttggcagccgaccccaaggccctgctgtcgaaagtgttcgccctggccctgtacttgagtccagccacctctggatccatgagcagcttgcatacatctgcgtaaccttcctttgcagcctcacgcaatgcccagctgtcactagcgttcgcccgggccctgaactcaagtccagccacctctgtatccatcagcagcttgcagacatctgcgtgaccttctttggcagccacccacaaagccctgctgtctctagagttcgcccgggccctgaactcaattccagccacctctggatccatcagcagcttgcagacatctgcgtgaccttcattggaagccgccctcaaggccatgctgttcatatggttcgccctggccctgtacttgagtccggccactgctggatccatcagcagcttgcagacatctgcgtggccttctttggcagccgcccacaatgcccagctgtcgctagagttcgccctggccctgaactcaagtccagccacctctggatccatgagcagcttgcatacatctgagtggcctgcattggctgccgaccccaaggccctgctgtcgctagaattcgccccggctctgaactcaagtccagccacctcttgatccatcagcagattgcagacatctgcgtgaccttccttggcagcctcacgcaagccctagttgtcgctagacttcgccagggccctgaactcaagtccagccaccgctggatccatcagcagcttgcagacatctgcgtggccttccttggcagccagccacaatgcccagctgtcgatagagttcacccgggccctgaactcaattccagccacctctggattcatcagcagcttgcagacatctgcgtgacctgccttggcagccgcccacaatgcccagctgtctctagagttcgccagggccctgaactcaagtccagccacctctggatccatcagcagcttgcagacatctgcgtgaccttcctttgcagccacccacaaggccctgctatagtttgccagggccctgaactcaattccagccacctcttgatccatcagcagcacgcagacatctgcgtgacctgccttggcagccgcccacaatgccctgctgtcgttagagttcgccatggatgaactcaattccagccaccgctggatccatcagcagctagcagacatctgcgtgaccttccttggcagccgcccacaatgcccagctgtctctagagttcgccagggccctgaactcaagtccagccacctctggatccatcagcagcttgcagacatctgcgtgaccttcctttgcagccacccacaaggccctgctatagtttgccagggccctgaactcaattccagccacctctggatccatcagcagcttgcagacatatgcgtgacctgcataggcagccgcccacaaggtcctgctgtcgatagagttcgcccgggccctgaactcaagcccagccacctctggatccatcagcagcttgcagacatctgtgtgaccttcctgtgcagccgcccacaaggcccagctgttgacagagttcgcctgggccctgaactcaagtccagccacctctggatccattagcagcttgcagacatctgcttgacctgccctggcagccacccccaaggccctgctttctctagagtttgccagggatctgaattcaattccagccaccgctggatccatgagcagcttgcatacatctgcgtgacctgcctttgcagcctcacgcaaggcccagctgtcgctagagttcgccagggccctgaactcaactccagccaccgctagatccatgagcagcttgcagacatctgcgtgaccttccttggcagccacatagagaagtttgttttcattttggttcgctctcaattgtaggccccccttaacctgtacaagaggattggacaccaagcatactgctagaaggtcggcgcgcccccctttcgccatcatctctccaactcgctgtggtggttggatcagtccggtaaggggccatccagaaaatctgttgtgcagagttttacacactaatacaatctttgggttggaagagaatatggcaatacgatcaaccctataaaccctataaaccctgggttgcactttcctggcatgcaagcggcacttggaactctgctaattatgcttttaagcttgttgatgtcccttcattcggggaactgactggattgtttgatcagtatcgtcttcttaaggttaaggtaacgtgggttcctcactttcgtgatcccacatccggcggaccagatacatccaacatgacagcaggtcctttaatctattttactagatccgatgatggcactcaaaacttgacgactaaacttgaagcttttcaggactcttccattaaaggagttgtggatccttattcggaatttagcgtcactcttactcccaaagtacagtttgaagtacaaaccgcattaactattaatgggcgttcctgcccctgggccgaagccgaccaagcaaattctctaggtccaccagtcatgagccctgaaccctagtatcaggctaatctggtggcagtattaccctagagaattgcttgaggcgatactagatttgcttgagactgatactcgactataaaagcaagcgtatctgcaagcggtatttacaagttagttacatcttcaaagtagcctgaaagtcaaagtgctggctcacactggctcacatcgtgcgcatcaataatcattttcaaagagttaaatatttctgctacatctggaattattgggcacatgcagcgatattttcgcttgagcaaactgaacacatttctgaaagtttgaggagagtggataaatacttgctctacggctctacttcattcggggaactgactggattgtttgatcagtatcgtcttctttaggttaaggtaacgtgggttcctcactttcgtgatcccacatccggcggaccagatacatccaacatgacagcaggtcctttaatctattttactagatccgatgatggcactcaaaacttgacgactaaacttgaagcttttcaggactcttccattaaaggagttgtggatccttattcggaatttagcgtcactcttactcccaaagtacagtttgaagtacaaaccgcattaactattaatgggcgttcctgcccctgggccgaagccgaccaagcaaattctctaggtccaccagtcatgagccctgaaccctagtatcaggctaatctggtggcagtattaccctagagaattgcttgaggcgatactagatttgcttgagactgatactcgactataaaagcaagcgtatctgcaagcggtatttacaagttagttacatcttcaaagtagcctgaaagtcaaagtgctggctcatcctggctcacatcgtgcgcatcaataatcattttcaaagagttaaatatttctgctacatctggaattattgggcacatgcagcgatattttcgcttgagcaaactgaacacatttctgaaaagtttgaggagagtggataaatacttgctctacggtggcaagacccagctgctgtcaagattcacaatggccctgtactcaagtccagccaccgctggatccatcagcagcttgcagacatctgcgtgaccttccttggcagccacccacaaggccgagctgtcgctagcgttcgcccgggccctgaactcaattccagccacctctggatccatgagcagcttgcagacatctgcgtgaccttccttggcagccgcccacaatgccctgctgtctctagaattcgccagggccctgaactcaagtccagccaccactggatccatcagcagcttgcagacatctgcgtgacctgccttggcagccgaccccaaggccatgctgttgatattgttcgccctgcccctatacacaattccagccacctctggatccatcagcagcttgcagacatctgcgtgaccttccttggcagccccccacaatgccctgctgtcgttagagttcgccagggccctgaactcaagtccagccaccgctggatccatgagcagcttgcagacatctgcgtgaccttctttggcagccgcccacaaggccctgctgttgacagagttcgccctagccctgaactcaattccagccacctctggatccatgagcagcttgcagacatctgcgtgaccttctttggcagccgcccacaagactcagctgccgctattgttcgcccgggccctatactccagtccagccacctctggatccatcagcagcttgcagacatctgcgtgaccttcctttgcagccgaccccaaggccctgctgtcgttagagttcgccctggccctgaactcaattccagccacttctggatccatcagcagcttgcagacttctgcgtgaccttcctttgcagccgaccccaaggccctgctgtcgttagagttcgccctggccctgaactcaattccagccacctctggatccatcagcagcttgcagacatctgcgtgacctgccttggcagccgcccacaagacccagctgtcgctagtgttcgccctggccctgtactcaagtccagccacctcttgatccatcagcagcctgcagacatctgcgtgaccttccttggcagccagccacaatgccctgctgtctctagaattcgccctggccctgaactcaagtccagccaccactggatccatcagcagcttgcatacatctgcgtgaccttctttggcaggcaccaacaaggccctgctgtcgctagagttcgccacggccctgtactcaagtccagccacctctggatccatcagcagcttgcagacatctgcgtgaccttcattggcagccgcccacaatgcccagctgtcgctagagttcgccctggccctgtactcaattccagccacctctggatccatgagcagcttgcagacatctgagtgaccttcctttgccgcatcaagcaaagccctgctgtcgctagagttcgccgcggccctgaactcaattccagccaccgctggatccatcagcagcttgcagacatctgcgtgacctgccttggcagccgaccccaaggccatgctgttgatattgttcgccctgcccctgtacacaattccagccacctctggatccatcagcagcttgcagacatctgcgtgaccttccttggcagccccccacaatgccctgctgtcgttagagttcgccagggccctgaactcaagtccagccaccgctggatccatgagcagcttgcagacatctgcgtgaccttctttggcagccgcccacaaggccctgctgttgacagagttcgccctagccctgaactcaattccagccacctctggatccatgagcagcttgcagacatctgcgtgaccttctttggcagccgcccacaagactcagctgccgctattgttcgcccgggccctatactccagtccagccacctctggatccatcagcagcttgcagacatctgcgtgaccttcctttgcagccgaccccaaggccctgctgtcgttagagttcgccctggccctgaactcaattccagccacttctggatccatcagcagcttgcagacttctgcgtgaccttcctttgcagccgaccccaaggccctgctgtcgttagagttcgccctggccctgaactcaattccagccacctctggatccatcagcagcttgcagacatctgcgtgacctgccttggcagccgcccacaagacccagctgtcgctagtgttcgccctggccctgtactcaagtccagccacctcttgatccatcagcagcctgcagacatctgcgtgaccttccttggcagccagccacaatgccctgctgtctctagaattcgccctggccctgaactcaagtccagccaccactggatccatcagcagcttgcatacatctgcgtgaccttctttggca

SEQ ID NO: 255 - DNA, 21440 bp, unidentified
  misc_feature 1..21440: note = Fanzor polypeptide
  source 1..21440: mol_type = other DNA
aaagaagtacttgaacgcagaatattaaaattggagcaggacagcgaacagcaaatcaaattcgcaacccagcggaacactattgccaaaatggaaggcaaagttgatttggtgcaggtcgctgaaaactatcgtcgtgttgaagcgatcgaggatgagtgctgggcttcgaaagtcaccttgaaagcgcctgtacaagtcgaggaggtgtcgtcacatggggtcgcccctccttgaagcacaagttgtcgagccagagccacacgttcatttgtgaaatgataaaccgcgcgaagaacggaaaaaacgcccgcaaccatcacaaacgtgaccctcgctcatgtgatcatgaacggattcgttctcgccaatacagtcaacggaagcttcgtgtacggcacaccttgcggtgtaacctaatgttgttgcgaccaccggagggggaccgagtggtgtctacaacaatacgagtttttattcatcaacaacaacagagctgctgtgggcaaatggaagaggtcgtcctagacccatcaattccatgcagtgcagccttgcgattgtgagagcagaagagcgatcccggtccgagtaaatgcatgtttctggagagaatcgcagtcctcgtacctctgggtaccgctcgatcgatttttgagaatcgacaagggaagtggcgaagccacccctcctgtgcttctcttgtgcgcgtctacgtttattgtacaaccttacccctaagtggtcgcaatcagcgacctttggcatcgttttcgatttcgtgtgaccaaagcgttcaccacccaacctaagcttcacgtctgctgaacaaacgcttgggatcttgtaaacacgttctttttctttacccgtctcccacgacataagagtcgttttgaactcatctgtcacagaaacgtcctctttgaaaattcttttacacgatgcgaacatggccccagtgggaaatgcaacttctcccggtccagtaggcttcagtttcgtgatggcagatccgtaggccacgcaaaccttcatatcaggaagttctttcatcatgcaccgcttgatacccgcccagaaagagtctttgacctttcgttttccgatgtaaggaggtgtgtaacaaatattgacggggtgactgaggaccaatttcttatggatactggcattgtccattattactactgagttattgcacaaactcaatgattcaataaatgcaacgaagtccttcttcttcacagatcctttcttcacaacgaactctttcctaccatctgaaaaaactgccatcaacaaactgtggtgtacccacccaccagtagttttaacgataacaggttttcctacaaggggaatacccataatgtggcttgagacgctcactaaacccacattcgtcaactgagctcttagttcctctggaagcggcacgcccctctccgtgaggactctgacgcaggtcaggctgtgcatagccatgccctgcatggccctgagtgtaacggggttaattttaaaccatttcattatattcccgatagagtctgtgttgacatgcattataacttgggttagtattgacatggcgccatattttttgtatagttcttgctgatctgtatctacgtatgatatcacatatgtcttgggaagatagcaacatattggggtttctgctcaactcataccagtcccatggtttatctgggttggtttgtataatctcccacgtgatattggggtttgcgctcattccaccccaatcccacggtttgtctgggttggtttcgataatatccatctttatgacagggtttttgctgatccagttccagttccatggtttatctggattggcttcgatcatttcccacgtgatgtagggttttctgctgatataataccagtcccatggtatatctggattggcttgtataatatcccatgtgatactggggtttttactgatcaaaaaccagtcccatggtttatctgggttggcttttataatctcccatgtgatactggggtttttactgataaaaaaccagtcccatggtttatctgggttggtttgtataatatctagtgtgatgttcgggtgtgaactcaatccaccctattcccacggtttgtctgggtttgtaatgacaatatcccatttaatgcatgggtttctgctgatccaataccaattccacggtttgtcggggttggcttcgatcatttcccacgtgatgtagggttttctgctgatataataccagtcccatggtttatctgggttggcttgtataatctcccatgtgatgttggggtttatgctcaacccaccccaatcccaaggtttactgagggttgtaatgacaatatcaatcgttattgtagggtttctgctgatataataccagtcccatggtttatctgggttggcttgtataatctcccatgtgatgttggggtttctgctgaaccagttccaatcccatggtttgttgggattggattcgatgatatcccatgtgatattggggtttgagctcaataaactccaataccacttgtgttccatacatttgacccgtctcgagatgtggttatttatttccactgaaatcattattaatagtaataactaaataatagatggtaatagatagtaatatatccacaagtatctttatgctccgatttgtacctgattttaaaagattgtggtgatttcgcagaatccgtccgtacattcaaaatccatgaactcggtgaaaatcgttatccattatccacgcttattacatggtacatacttaaccttactatctccttgtttgtttttgataatatttttaatgcattgtgtaccattaacattccaaactgtgcgttctacatatttgccacctactttaacggatgtctttgttccagtatttacagctgtatttgtcttcttagttgttgtcttcctagatccacctccatattgtcgtgcttcgttttctgtaccgcatgctaagaaccagcttcccccactttctctctcatcactagcttttaagccactatttgtgttttccttagcttcattacaatcattcatggaattgtacttcctatgttctattccttgcgttccagccccccaatttctgatcgtgcctgttaccatttttatatatataatacaaacatttatttttcaatggccccacaatatccggtactctttctctttcatttacagcattgatttgacagctaaagggagttgcccagctgtgggagtctgcttgaacgatcccataaccgggcacagagcataccttgcgcgactcagcatcgcttctccacctgatgcaaaacgccttggtcagcaagctggtccttgtgggcatccagatacccgtgcaagcagcgcatcatctcttttgagagcaggtcggaggatgtggccagcagcctcggtagcacctcccgctcataggcattgacaaagagcgggtggtggacggagtagccgtagttgttgcggcggaagtcggcgtcggcgcgagtgtgcacaaacatcagctgccaaggggtttgcacgtccacacccggcccgcctgacatgcccgggaaggtgctgcaggtgtgctctatgatgcgctgagaggccccggccaccagttcagtcgacacgaccaagcgcgaggggtagcacacatcatcctctagggcaaacgcacgtcgcagggctagattttcatccagccgccagtctgctggagtaggtagctgatggcccagtagctcggcctcatcagcggcctgctcataatccgcctcggtgcgcagaaaccttttcgcccatttggcagtcaggcgatgagcaaaccccagcacgcacaccgcgtccccatccaccagcttccttgcgctgggaatgaagagctgcatcggacccccctcaggtgccttggtgaccatgaacccgaagtctggcaggacctcagcctcaccgatgcgctgcgagggctgcgaggggatgtgttcagccagctcactaacgttgcgccccgctgttagccagcccaggtccacaatcgcgcggggaaccggccgagtggacagactggacggcagcacgtctgtgccgtagccgcaccgccacttctgttgcacgctggcgggcatgaggcagtgcccagcgctgccccacaacacccctacgccggcaggtgctgcgactggaaagaaggtgccactgctgtgccccgttggctcttcccacagcccacgcatgagctttatgcctgtgtacttcccgctgctctgctcaagcagcacctcgttgtcactagctgcaccacggatcagcaccttgcctgttatgtggtccaccggaaaagtgcgcttgtaggttccagtgcctttgatgacaatcggcttttcagcagcagcctgcttcagcatgtcccagttgccctccatgttgctgcccatgttgttgatatatctgtagtgagtgggaacgcggacagggaagtcacgaacgaagcggtaaacgtcccaattacgttttttatctcagagatgtcggtgagaggcgttggccaggcagagaatccatgattctcaggatatgccagccacattgtaacccgatgtcttaagtcgctgactcacacgcacgcacgcaccgccgcggatgattatagatgatgatgcatgcatgggcggcttgtgtgctcttgcgcgtgcagggaaaacacatacacgcggacttttggggactcatcatgtaacgtgcgggttcgaggtgccttcacgacagcgtggatgagtgtatacctgcactggacggtcaacagattgaaacatattccgggtattagcccagaaaacaacggaacgtcagtggacatcgtgagaggaagtgactctcgcgcggttggtcaacttttcaaaagcctcaaaagacaggggtatatctctaaaccctggatatacaccgtaaggtgtgccgtacacgaagtggtttcagtttagtattccgttgactgtgtatcaccgcttctgcactctgctacatgggtccagaataggcatcctgcatcatgccactggtgcttgcaaacatgggcttagatcaagcctggatatcctgcttgaagcaggtaggtgtgaaggtcgtagttgggggtgatgccgatgcgcatgattgtggtgccaagtgcgcccttcacgacccccagcagacggccatgcttgtcgaccactggtctgcctgaaaacccgtcatctgcgtgtgcagtgatggccactgagccaggcatggtgctggatagtgagcccttggagcaactgggcttgttctctgtgcctgtgtaccccagtgcgtacactgacgccatgatttcaagatcagtggaccaaaggctcgtggcagagcgggaacccttcaacagaatgaggtcaggcacattgcctggaggtgagggggccacgacctccaaatcctcctcaaagccgtcggttgggtaccttgccttaaaggccacagccggtgatgtactacctaggggcttgccgcagaacccctgcatgtgtcctgctgccacgatgacttccccatgcatgaagccgctgaactgaccaactaggcttccgtcctgactgaatccaagcagcttcactaccaatggtgacaccttggcatacactgcctggtcgagcatctccactgcagcaccgacatccaccgggtcaacaccatcatccaagtttatccgaaacctggccatgttacaatcagaccggtcaataatgttacagtatattgaatcaattacaattacaactttctatgtacaacttggacagacggtcgattgttgtacacatttacacattaatgggcgttcctgcctcccgggcgatttttttaaatttctaatcaggatttagagcctcctgaacgactcgctagcttgagacatcagcaccaaggaatcacaaatccgctccataccatgtttcgcaaccagtcaaaatcggccgggaggcaggaacgcccattcattgctgaaaagtttgaggagagtggctatacttgcgaatgtaagccacatgacttgatgagatgagagaggtcgccctgtgagtggctcgactcgacgggtgccgccgccgtccttgatgagatgagagaggtctccctgtgagtggctcgactcgacgggtgccgctgccgtccttgatgagagtgtgactgactcgacagtgcattgtttctgttcctgcttgaccctaacatgttccaacctccggtggtcgcgacaacattaggttacaccgcaaggtgtgccgtacacgaagcggtttcatttaagtattccgttgactgtaggggtccagatacagagggaagggaagggaaggggcccacttgcgagtaccttatattaatgtatggaatgtaatttatggaatgcaaccattccaattcgtatccacaacggaaccaatgacccatgatgttttttagccaagcctttgctccgtcatacagtttgtgtttgtctttgtcagaaggttcttgcattttgtttaatgtcttgtgtaattcacgaaccattgaaaacgagggcccaattcctattgaagatgcaacggcgggagtcgtttcctcgtcagtgcaaataagttgaagtatggtattttcaaacatgtaagcacctcgccgaatttgatccacccataatatagccaagattatcctaccatcaaatgtttgtactgattgtatatttgcacacgccataataatggaatgctttattattttgtctcgagccatgacgcaccgatataaatccccaaaagtctgcatgtatgatgtgttttttctgcttctcctttatcctagtctggttttcgaataacaaattttgctgcgcttacattcattcacattcacgacgaattcgaggaccagcgcgcaccaatctgaatggaggagcgcggtgcatggggattcagttgctgactcgcacagtgaatacgtggggttccgccaacacattcaactgattcctgaataccacgagtagactactgcttgacaactcagttggatttatgaacgggaggagcgcgggcaccgtgtagcggtgcatagggattcagctgatgacttcgctcactcagattaaagcaattcacaatgaagatcttctaattcgtcttcctcttgttcagtccagaaagcggtttcattttagtattccgtctagtgtaagcgtacgccgaacaagataagtaaacgtgaacccttggttgagcttgagcccttcatgtcagagccacaagtatacctcgatttatatgaattctggggtgtatacaacacttgtttccgacctgaggatggatattcatgccacgaagtgttcgtgcctgatgttgactgtgcgattggtgcgggcggtacaatggaggaggcttttgcagctgccaaagaaaagctgactgacatggtcagtgatttcatgtatcgcggcgaggccatctcgccgccatcactccccgccgacatcatcaaccgcagacagcaggacaacgagcaatttgccggcttcgtggtcaccttcgtcggagtcgtcattgtttccaccctgccaagtttatgtggcaggccaaccacgtgaactgctgccgtgccatgacgtgtgaacaccatcaatgacatagttcaatccgccatcgatcccgacaaatatgccgtgatgccagtaccccaccgtctcatcccaaaccgcaatgtgatcccccggctcggccttttgtgccagcgtatcgcagtcgcattcgtcacaagtggcaaaataactagcagcccattcgttctttctttggatggctcgggacaaaaatcgttcaatgtccatctgcactgctatgccaccggacggtacaacctgcatttataaggatgtatacctatttataaggatgtatacgccaatgtcaagctgatggctgattaaaaaccgcatgcgaccatgcacaacaccgagacgcgacattggaaatgtagtgtaaacacaatcagatacacattttacacacttacacatttaccaacatgaatcctgaagccgccggcaccatgtccatgagctacttgaaacgccatgtgtacgagctgaggacgtccatggatccgaacatcgttgtcaagctccagagcctcgatcatgacatggcacgcatatgggttgagaatgcggagggcgtttgtgtggacacacatgaggtcagtgtgcatgaggcaactggcgaggagcttacaatcaccaatgaggctgttcgcgtggagaggtcgtatatcatcaagattaacaagtcatatgtggtggcgttcatgggcagcacgatcctcaagattcacaaacagcagcagcatgcactgttcacagcgaatggtgctgatctgaagcgcatttgagtgggtagcaaattttgcctaaaggggtcacagaaacctggggcatcgaccgcgtcgagtcacagagcgaccgacctctcgcatcatgacggaacctgtgtcgagtcgagacccctggcaaaaacataggggtgagatgtattcctaaatcgtttttttataacccacaacgaaacacagtttagcgaggacaccgatgaatacatcgacagccaaggcgacccatgcatgtctttgccagcgggagagcgcaaggattgcaaacaataggtataacgtgccatgaacagggcggagtttcgaccaccagatcttcccgccatctggcgccacctctatccccgttttccgaaggcctccaaagtatatgacaaagaaccctattgctggcacaagggccaagacgcccatacagctagggacatttgattgtgggacaccttttattttggggatttgaccaattcaagctttgtaaccgatcttgtcaatacagatactgtcttcaggagattgatacaaaacattcaaggcctgtacagacacagaagttacatgatcaaagtagcctgacaagtcaacgtgttggcttacatcgtgcgcatcaataatcattttcaaagcgttcctgtaatcaaataattctgctacatctggaattattgggcacgcgcagcgatattttcgcttgagcaaactgaacacattctcaatagtgttgaactctggactgtaaggaggtacaaagagcgggcgtattcctacagaatcgaacgcagagatcgtctcctttgaatgatggaactggatattgtcaaggacagcgacagtaccctgctttacatgtaactctgatacaaactgtacaaagtcgactttcttgcaattgtgatcaaggatcttgtaatgaacgatacctttgacagaaacggcagcgattagcgtcaatttggacattcgcaatgtccgagaaatttggatatttaaacgtttgccacgttggcagtaccctctgcgacaagtgtcaccgatgtaaaaacccgcctcatcaatgcttatcaaatccgatgtcggaacggccagatactctttacaaaaactttcgacagaagatttgtggtcattcttgtgtcgaacagttttgtatgcgcgcttgcgtgtgtagccaagtctgcgtgtgtagcgtccaaacgtttttggagacatcttgatagaggacagagacgtcacaccctctgcaagctgagacattgtcaagaatggattggagtcgatcagtttttttatagcaaccttgatatcttcggtaatgacgctcgcccgtttcttccgatgatgttttatattggctttggtgacccaacgttggagtgacgattttgatactttgtacaacagactaactttcctcaagctacgattatagtatttgtagtgaacaaccgcgcgatgtcttacctctgcatcaatcatgataacgtgcgcgtattagggtataaggaaattgtcagttagtatggtatcaccaaaataataatcactccctctcgatgggggtggtgacaaacaacggagatgacgacgatctggacatcatggtggtcaagaagacgcttaattctttgtgcatggatgtatcgaggcagcagatctgctcaaggatccaaagcatggtactcgtaatcaaccacgcagttgcagaggcatacttattcgcaaattttcacataaccagatgcctagatgatggagactttgatgtcaagcagttgccgcacctggatcggaacttctactacaggtgcatacttgcggtctcgatatccaatgtccgaattgatacgctggaccagagcttgaaagatagcatggttgctttcgacgctctcaggcctgcaggatacgtgaaggtggacgttcgtcattggggacaagtaatcgcagacgtctcaatacaaatggcgacgatggcgtgcaacagcgtctgggcaaacgtggacagggtcgttatcaagtacctgcgcttgaaacatccctctctgaagaaacatttcaagaagattgtcaaagcggtggtccagtatcttgactcggatatcgacaaaatcatcccagcgggtctcgtgcatgcgaacctcatcaaagacgttgtcagacgcctgagagatctcttgccgctgccaagggggaagcagttcaacactcgagcacacctgacaatgagactgtttcatcacgtgcttacagagttgggagcggatccaaaagagaaaacaacaaaaaaacgcccccgtctgttcagtatccttccacgcaagagcggcttcaccatttcttacgtccctatatcgtccatgacactcatgaagcttctcagcatgggcgattcgccgctcgagagcgtccgtggcgatggacgtcacgagaatcattccatgttgtggagaaagtacttcaatgtccaaggacttgagacgaaagggtctcgttttgacaaccgaatcctcagcgacggcaaaggggtctccgtccaaatgaagcatcaggtgggtaaagatatcgctggagaaggaggaggagataatgcggggtatcccaaagacgcaagtatcgaagactgccaggacgcttctttgcgccagggtgcgctgcgtgtcggtatcgacccgggtatgacagatatcgtcactatagcatcttctgacggtcgagtcgagtctttcagctctgcccgctttagcgaagcagctgggtacaataccagcaatcgtcgcacaaacaaatggaatgccaatacgcaagacctcgtgaagtccattccatcgccgactacgagcagtatgcacgacatgcaggaccatgtcagaggttacctcagcgcgctcccgaccctccttcaacaccgagccaacagaggttaccgatggatgcgattcttttgatatgtgggcaaacagaagacgattgaaaaggtatgcgatttgattgctccaaaagcacagaagaaaacgattgaagaaaaggtatgcgatgtgattgctccaaaagcaaagaagaccgttgttggcttcggcaactggtccaaccagggctatggcatcagtcgttcgtgttctggaccagtgaaagagatcaggaagtgcctttcacgtcgtcagaatgttctgttcaaaaacgtcgacgaacgcaacacttcttgtacttgccacggctgcttccagaagctcgtcaacataaaggcagacagcgtcgtctggcgcagagttcaaaacgagcccgccgccctcatcgacggggctcctacaacaacaacaacaacaacaacgtttgagaagcagaagacggtggtgaagaacgttaaggtccacaaagtactgcactgtcgcaacagtgtcaaaagcgcatcatccaatgtgcgttgtggtgcaacctggaaccgagacgtgaacgctgccaagaaccttcttctgcttctgacgacgtggatggacgggaaagagcgaccagcggcattttgtgtgccctcctcatcgcccaccccaaaaaccacagtttccggagaggcaaatgtgggcgctcaaccaaccgacccacctgggtcagttagcagcttacaattgttatcctctgggccagcttaaatgctgaaatacgggatgaaggacacgaaggattgggaccttgatacaaaacctttagctgacctacccattgggttcaagggtcaccggtaagggtgtcccataaattttgtctctgactgtataccttagatacataggtgtcgcgagaaaggcaagaatcacgaaagctgtcctgattcctatgcacccgatccagaaagctatttgtcttgaaatgttgttggccatattgttatcatttaagttttgttttttgaggaagatttcaggttgccttgttccacatgtatctcgaggaaagcggggacagtaaagtggtaattccacaggcagatgaagaacaaggggggcgtaaaaaagacatcacggttgttctcatcctcaaccaaccaacctcaaaactgcttgtcaagtgatatatgtcgccaacacttggatgagaaccaccgtaccacattaaacaagtggcggagcccctttcacctattcccccccagcggagcgaccgggggcgaccggaggggagcccccacaaaggagtccgagaggaaccgagcgggtgggcgaccggaggggagcccacagttcacagttcgaccgcgatgtgaacgcttccaggaacatcctgatgcttacacttcaccaagtctttgggagagagaattccaagatgaggtcttcacatcaagtattagacacactactgtgtaactacagtcggtggaacagtaaaatgaaacatccaaaaaccggtataagacggtaatatactaaaatagttgtatagaggatggacacaaagaccgtatcggagcttagggcgatgatgctcactaatgatgctatcgaagctgatgatgctatcgaagaactctgccgccgggctgaggtaaccgaggcagctgctgctgtgcctcctcagcctgaacatccgacggcaattgttgctcgcactctcttttcatgcgcagctcaagctcgttttttttgtatgaggccgattttgtaaaaccgtttcattttagtattcagtcgagtgtaactgtcaagtcttacacaatgtgtatgttgtttgtaaaagattcacttgtttgtaacacttgggtttattagcactgtaacgcttgagcttctttctcactggaacgcttgggcgttcccgatgtgccgcctcaagtagacttctagggcacatcaacaaagatcccgtgttcttttgtgccacgggatctttgccgcccgttcctcaaaaaacgatataaatgaaatgtgctgtgttcggaaaagcgtactccactctggtaaatgacgtcaaccatgtggaccactgatcgacacttgtacacttatccattctgccccaaatggcacggtttcttttgatttaagcaggaggaagggtgccatgacgatgaatttccattcgaatacgtcctggcgcttacggagcgagttcctgaaatagaaacattgagcatggttgcgtacagcgcacctcagatcgtgagagtccctcgggtcatggtcgacacgctgtgcgaacgacaactgcacaacaatgtagagatgcattgtcttcacgaaatcgtcgatgcgttgactgtcgcactcgaacgtttcaacggcgactctgatacgcactccaagtttcaaacgatcaagcaagacttggagacagcgatatcgaacacacaggcgtcgtgttcgaaaatgcgcatccttcttcggaacaagatgatgaagaaagagctcgtcgaagtcgcgtgggcttctgaacgacatattccctggtgcctcgacgaagaagaaaaaaatgggttgtaacacgattcacgtaaataagatgtacagtagcatgaaaagtcaaagtgctcacgatgtgagcatcaataatattttcaaagcgttcctgtaatcaaataaacacccccccctgattgtgcgccatacgtttgaatcatcatgaatttattgctgtgatattgtagagaaatggatcccccgactcgcgagcaagtcgctaagctgcaaaactgttattgggacgtcttggaggagaacgcagagttaaagacctccgtactggaaaaggatgagctcattgctcgcttgcgccggcaactgaacactgctaaccacaaggtggctaagctccaacaactggtcgacccgaagatgttccttgcctctacagtcggcggaacagtaaaatgaaacatatatcagatggaaataaatgtacgacatcgccgttagaaaattggcgttaagaatggtcgctgacttgggtgtgttaaaaacttcagtgtttacgaacatcagtcgttctactctgtggaggtggaaacgctttggtgtaaatcgaaaacgacgtgaatttgtaagcaacctttttgagacgaataaggatttgttaaaatcgtttttattgtcaactcaatgcacaaccgcaagaggcgtcgttgcttttttcaaaagtactcacaatgtacgattatcaactaaaacagtgtatcgtttcataaaactcattggttttacaagaaaaaggagcaaactccgtggacagtgtaaaggggacttagttccacttgtcaatgaattttgtagtaggtacaaggagactaatttgtgaatagatacttgttcaaatgcaatttatgtttattgcaaacctgaaggaagtgtagttcatctggatgtagtccaaagatgtcaacgtatatgagggctgtttcgatgtcacatggacatgtgtgactcatgttacaaattgcctgcaagaaataactttccttatttaccaacaatctccctggttctccagttgttcgcatgtgaggcagatcaatttctatgtctttgaagtcttcacagatctcattgctcagactcacaggtatattatagcattcttcacgtgaaagaactctatccacctcagcaacacgttgagtggaagcttgaattaccatgagacatttgtccatatttgatttttcatacaaaacgttctgacgttattcgtttattagtgggacaccctttatacaatttggcgagacgtcggagtcatctgattaagatcacccagatgtctgagtttttggcacattcataccaatctggatggtgcccctcaagcgtaagccacccctccgtacgaacgaacacacgcaaactgaggaacactgacgacgacgatcgaaaaacatctgactccacatgcaaacggcggaaacatgtcctcgtctccaaaagacaccaccgcggattaatgtgtgtcgcgtctttcgcaacctcattcactatggtccggtcatccaaagaaaccgtattgtatcaagcaggctcctgcttgagaatactatgggaattcttaaggggggatagcgggtcccgcggagtggggacagtggaattgagctgctgactcactgacttatcccatgtggcaccatcaagcaaggaacccagctgcggcttggctgttccgtatacaaattcaaaaagacccatcttaagaacagaagagagtgtagtataattcaaatataaaacaaaaaaaatcgcgtattgtcatcacctacgtgcgaggatatttagctttgtaatagcatggatcgatacagaatatacaactgcacgaaaagtataacagcaagcagctccagaatgcccttttcctgagcggaagatacccgaatagccttacgtaatcgtccatgtattcccatgcccacgtgtttgccgtgtacgtcttttctatctctacaatcttcttcaatcgagcagcattctggtcgtactcaattttggcaccagataataggtggattgtcgtgccgtcaaacgtgaacatagtcttattcatcacgtttgatgtacgcctgaagtagaatgtctctttgtacaggtcgagtatttctaaacatttattggcgtcatcctcattatcgaataccaccattccatgtaaaataaacgtgttgctcctgtcattccacgtactacctgaaactgtgaaacacgcatacatgcttgtctccaacttcttgaagttatccattgtttctgtttgggtgcgcaaaagcaatatactagatttttttttttcttgaatttttttttttgaatttgtaagcaaactttgtgagacgaacaaaggtttgttgaaattttactgtcaactcaatgcacaaccgcaagaggtgttgttgcatttttcaaaagtactcacaagtaatgggcgttcctgcctcccggtcgattttgactgatggttagatgtgactgttgttgacatcaagtgttgtgatacggttctcatccaagtgttggcaacatatatcacttgacaagcatgaggttgattgcttgaaatttttcatgtcatagcacgcattgttctttctcatcagcacaccatacatcggaaattccttgtgaatgtaagcctcgtacactattcccacgatacttgttgtcttatccaagtcgttgtgcgttgttgggttgtctacggttacaattaccacttcctcactctaggtaaaatcattgggaacttccaggaaaaaggcaacgttgtggtgatgggtgacttcaacgctcgggttggtcttggtgtggacaatgatgataccgagttaggagatgaaccagtatcccaaaccagtagtacagcccccaaccaaaccattcaaccgaggtgtagcatggacacagctccccccaatcgattggggggggccctactccagctatgtgtagtaactggtcttatcatccttaacggtagaacagaaggtgatatgcaaggtgcacataccttctttgcagatggcatggacaagaaatctgtcattgattatgcgctagccgcccctagtcttctcaacaccccaggagtcaagtttagtgtggctcccaagcatgactgccctctcaggcccgggggtggaaagtttgaccacatgcctatcacactccacataccagatgctgcccttaggccttctcaaggtactattagtacacctgctggtggtaaaccttcgcccaaactgaaatggaaagacaactatgtccagatgtatgcacacacaattaagcgtgatccagacgttaaccgattacttgacaatgcactccatagctcatctatggaagattcagagaaggggattgctagtgctattgaactagccataagcaaatgcacaccatgtcacaaacctgtagctaagcgtaagcacgggcccgtgaacgcatggtatgatgatgaatgcaatcgtgctagacaggcagcaagccaagcagaacatcaacatggctctagctctgacttggctggttctatgcacaaggagtacaagaggattctcagaagaaagaagaggaagtggctagaaacacgcatggagaaccttcatacgaatcttcggcataatccgaaaagtttttggaaagacgtgcgtgagcctaacaaggccactacggcagatatcacaattcatgattggactgattattttgcagacctctttgatgtgcaagtaggtattgatccaagtctggatgctagggactttgtccctcaagctgatggacctcagatagaggccgcaccaacatggttatgtcaagactttaccacccaggaggtgttttctgttctccaatccctacggaaaaactcctcccccggggtagatggtatccctgcagaatggtacagatttgcttcccatgaggccaactcccgatttgtacaagctatgactaacctgtttaatctcatctggaagacttcttaccctagccaatgggctgcagctgccttggtacccgtacccaaatccaaaggcagtgtgtatgacaaggacaactatcgaggtcttgcggtgagcaactccataggaaagatcttctccctttgcatgctacgtagactagatgattggtcagaagaattcaacctcagagccgctggccaatatggatttagaagtggtaggggtactgcagatgcatcattcattcttaaccatattgtagataaatatagagaaaagaaaaaccactctttgtggcttttgttgatttcaagaaggcttatgattgggtcaacagagacttgctatgggattgcttagcaaggctaggagtcaaggacccctatctcagtattctgaagtccatgtataatcatgttgttttccaagttcgcctacatggggacattggatcctcctttccatcccttgtaggagttaaacaaggagaccccctatccccactcctattcggtctgttcattgatagaattgaatcgttcctccaatccaagctcccaaatgtaggggctgagcttaggggaaagattctgcaactgttactttatgctgatgacctagctataatggcagaatccccggcagatatgcaagcgatgcttgactgcctgagagatttctgcgaggctactaagatggctgtgaatataaagaaaactgagattgtcgttttcaacaaacaattctgtgatgaggcccgcatggatcctgattacagatttgtctatgatggagcacaactttctacaaagttatcttttatctacttgggatccctctttgtggatggtgactcaagcaatcgtgcaaaagctgctttttctaggatgctcactaaggcccaaaaggcacaccacatgcttcgtaggcgatgccatactatggagatatacaatattgatattctcacccacctgtttgattctcttgtacaacctatcctgaattttggctgtgaggtgtgggctccttctattctgaacaacacacttatctcaaatgaccatgcttgtgagaaatggcatagaggtatacttaaacaaatgttgggtgtttgccaatctactacatctaatattatcatggaagagctgggtagaaccccgttgtgttttgcttggcttaaacaagctttgcgcttctggaacaagaccatacataaagaacctgaggatctcattagaatggctcttgaggaatcttttgactccaacactggctgggttcatgacttgcgttgtgctctccacaagctaggatccagtaaaaacatcaacattttggaggctgtcgatgtcgaaggtattatgtctgaagtttttgagtcatggaggtttaagtacccaagtgacaccaatgcagttagagacatccctgatgagagaagggttggctttaaacgcctccgataccaaaaatggttcgcagccaacagcaatgatgagaatggcttgattccctttacatccgccttacataagcaggatcagattcgttctatagcacagtttagaatgggttcccattggctgaacacagaaagaatgagggtggtggatagagcacacatccctcgctcaatgagacactgtcaaatgtgtgggttccaaaaaactgaggatgaaatgcatatgtttgagtgccctttttataatgatattcgcctccgctaccagaatctgtttacagatatttataggcatgtccatgaggataccgacttaaccgtatggaatgtggaattctgcgattccacattcggaacctttatgaatggaaatggcactaagtctttttggagcaacctagccgactatctttctacttgtagaagagcaagacaggaagccctggactgcttagtggcaccgtaatttattatcccttttttttcttcttgagacttctcatttgttagcttcttacctccgccactgtaagtggttgagatctgggtcctgctctaaggggtttaatacctacgccaccaaaacggtggttgggagtttggtttgtttgtcctcgacacacccctgatgtaatggggttttttgctttgtgggtgctttttctttttgtttaaagcacagagtctcatacaccctcgcggtgtcaagtagactttaacatgtaatgtaatgtaatgtaatgtaatggaccctacagtgtacgtgggattctggtaaggtaagcaatccatgtctgaagatcgtgttttgaaatatacaatataaaccctaaacaattatcagcatggaaagcgcgaaggagtgctagtctcacccagctacgcctgcgacctccgtacgtacagcacgacgggttttgcaacggatgttgagcgttttaaggagtcgctgggagaaggattcagctgcaacgttatgggcggcacttccgaggttccaaaacgggacctgagagccgccatactgcatctcctgcagcccggcacggatgtcgcagttctgctattctgtggccatgggacgtggagtggttcaacgcaacatgttgcccttgtctgttcgtttgggcagcagattacagcacaggagatcgaggacatcgtagcacagcaagggttcaccggcacgtttgttcgtgtgctgaacatgtgcgatgaaggttcaacgcaacacgcatctacagtcggcggaacagtaaaatgaaacatatatcagatggaaataaatgtacgacatcaccgttagaaaattggcgttaagaatggtcgctgacttgggtgtgttaaaaacttctgtgtttacgaacatcagtcgttctactctgtggaggtggaaacgctttggtgtaaatcgaaaacgacgtgaatttgtaagcaacctttttgagacgaataaggatttgttaaaatcgtttttattgtcaactcaatgcacaaccgcaagaggcgtcgttgcttttttcaaaagtactcacaatgtacgattatcaactaaaacagtgtatcgtttcataaaactcattggttttacaagaaaaaggagcaaactccgtggacagtgtaaaggggacttagttccacttgtcaatgaattttgtagtaggtacaaggagacaatcaatgctgggaaaattttagtatcagttgacgaatgtgggtttagtgagcgtctcaagccacattatgggtattcccctgtaggaaaacctgttatcgttaaaactactggtgggtgggtacaccacagtttgttgatggcagttttttcagatggtaggaaagagttcgttgtgaagaaaggatctgtgaagaagacggacttcgttgcatttattgaatcattgagtttgtgcaataactcagtacttccctaatgtattcacggtaagtggggtacccgccatttctccgaggattcagcaaggaagcgaatcatcctccgagaagccctgtgatgcaacatcgtgcaa

SEQ ID NO: 256 - DNA, 21875 bp, unidentified
  misc_feature 1..21875: note = Fanzor polypeptide
  source 1..21875: mol_type = other DNA
tctttgcatacttggtggtagcactcgaagtagtaggagacgacgacaacgtgatcatcttgtacgttgttgtggttttggtcttaggtggtggctctttggtcttaccgctttctacagcgccgcctgtcttaccattggttttcgtgacagtgaccgtggaggaggacgtgtgtgggggaatgatgtactgtttacgacgcgtcgaagcacgtacggtgctgctactactattattataataacgctccgttgcacttgttgccccgagagttttttttagagcagcagacctcttcttcgcaacctgtttatccacactactatatcttggtacttttgtaacttgcggtggtttgttggtgacagtcaccacttttgtggtgggtgcttttaagttacttttcgtgttgttgttgttgttgttgttgttgttgttgttgttgcttttgggtttaccttttgtgtgtgtcgacacccggtttggttctttcttcacaactactagcgtagcagcacgttgtgttgttgttgttgatggctgccgcattaggcaattgtagtagtagtacaataagtttgttgcataattttggagcaatttttttccacttcccaagatgaattgtgattttcactttgctcgtctcttcttgacataaaagacatgtcacgacgcacaagaagaggagcagaccgcatggagatctgatgatgatgcatgatgtattgatgtcccattacattaaaaacaaacgcaagaaaataagtgtaacattattgactagctcgacagtaacgttggtgcgtgcgtaagttgcaagaacaaaaaaaaacgcaagaggaggtaccccgcaagctgagcccccgctcctccgaacaatgcggtttgctgtttgtttgccagggtttgggtcagggtttggcggggggggggggggggggggggggtatatataccggtgaggtgttgttgtgttgttatgaatgaagatgatcactcctcctcacatctcgttgttcttaccacacatcaagcaaaatctggcgcttactacgaccaccaccaccaacaacatttcggtgtcaccgcaccacaccacaacagagcatcagcatcagcatgagcatgagcataataataatggactactccttgttccttgggactggcgtggactgagctcgaacacaaacataactttggagatcgtacaagataatccagacaagccatgggactggcgagcactgagcgggaaccccggcgtggcggcatcgtgggagatcgtgcgggacaaccccgacatgccgtgggactggtatgatttgagcatgaaccccaacgttgcgacatcgtgggaggtggttcgggacaacctggacaagccgtgggactggtatggattgagcaagaaccccagcgtggtgacatgggagatcgtgcgggacaacctgaacaggccgtgggactggtatgaattgagcgggaaccccagagtggtgacatcgtgggagatcgtgcggtacaaccccgaccttccgtggaactggcggaaactgagctcgaaccccagtgtggcgacgttgtgggaggtcgtgcgtgacaacccggacaagccgtggcactggggggcgttgagttggaaccccagcgtggtgacatcatgggagatcatgcgggacaaccctgacaagccatgggactgggaggggttgagcagaaacccgagagtggcaacgcgggagatcgttcgtgacaacccagacaagccgtgggactggtcctggttgaacagaaaccccggcgtggggacatcgaggagggggttgggcgtgcgggacaacccttacgaggcgtggtggaacaggtcctgcttgagcatgaaccccagcgtggtgacatcttggggcatgccggacagcaccgacgagccgtgtccgtggaactggtgggcagtgagtcataaccccagcgtggcgacgtgggagactgtctctgaaaacccttaacaaaccatggtgttggcggacgctgagcaaacgcacagagatgctgttgtcggatttagaaagggagaacatcatctgtaagcacctggcaagcaagcggatccagagggcatggagacgagcagtcttggaccccgggtacaaggcatgcaagaagaggttgaggcgagaatttgaagaaatgtaactcactcacctgtacccgtccgtcctgtctgtacctgaggccaaacaaacgtcggcaatgaagctattacacttacaagtccactctcctccgtcagttcggcggattttttcacacagacggactttcactttatcagatcgaaccggtaaaaacggttcaaggaagtcttgtacaggtaacgaaccagacgatcgtaaacctcttcaggattgctcatcatcatgtggctgctaccaccaccaacagaagaaccacgctcaacgtaggtgcacacgcaattccaaatacaatctacaaagtactcgtgtcgcgaataccactcgtcaagcgacatcacggaggatcaccacgacgacgggggggcccccctttaacatcatgcaccattatttcggatctcaatctcaacatatatattgttccaaattgggtaaacccttatgcaaccccccccaccgtacatttcaacattgagaaactttgaagaggggggggggtcagaaaaaaaacaagtttctttcttctctcaaatactcgaaacggaaacacttctcttgctcctcctccagatgacaaatttactacttcttgatgtagatggacatacccttgcaagttagcacaggcttggggacgaacgtcgggttatcgtagatgacaactttattggggacgaacgtcgggttatcgtagatgacaactttattggggacgaaggtcggtttatcgtagatgatgagagataccttgggttggggcgcaatgattgcgatgaagtcaaagactccaaacatttcttatgataaatgcagacagagagaagtacgaggaaacgtacggtgtgttgttgtgttctctcttattccgaaaaacctttcaattttttttgtctaaaaacgacattacatacattcttaaactacgactccatcaatctcatctgttgctgctgaaaatacgagcttcccgccggggatgtgtgaggattgatggacacaccaacaccaacaccaaagccgccggggatgtgtgaggattgatggacacaccaacaccaacaccaacgccgccgggtgtgtgtgaggattgatggacgtgtccgcttccacatcagaaggggccgcttcagagttgcacgacttctagcaaacactccacattcgcgacaccatccctcgcggcccttttcactagctccttctccacatggtctatcgacgccttggccaggttaatgaacccacgagtgatggaagtgcgaccacaaccagccacaaccttacggtacatggcgaacatctccatgcgagagtttggaacgctgttgaacaacgggtgcgccgcagtctgattgcgatgctggcgcactttgagcacggccgcgcactcccgaagcatggtgttgaaccgtcgtgttgacattgaggtaccccctccgtcgtcagcttcgtcctcgagcacgaagccatcacttgcttcggaccatgcaccagacgtctctgactcgaacgcttcctgcagggggcacctcatggccaagactgcggccttgtgctgtggcgtccccttggcccatccaaactgttctggctcattgacaaaggtcaaatatgaggttgcagtgaagtcaaacggctcccgtgcaactgcacccatggcactgtcttcggcctggctgttgcggtacgttcggccctgccctgatccccaacacttgaccaggcggtccatcaagttagatacctctggcggacccctctgcagagccctgagcaacgccgatttaaagtatagactcgatatattccatgcgtcagcaaccagaagcggcacggtgctcccgccctcttcgacttcgagcgcgatctgtgtcagaacctgctcattgattgagccgtcgtcgctacactcaatccccatctcgccagacttcatgtcgctggcgttcatcaccacgtccgtgtacggccacactcctcctcctgtgtgtgtgtgacctaatgctgtcaccatcctgcagccgctagtcgtgcttcaaggcttgcgatgttactctgcgcaagttgtaaatcggcatctttttcttggatggacttgatcaagtagggaatcaaaccggtatagttcacacgtgctatattcgacccccatgccgtgtaatccggatcgagggatggatccgatgaggatggtatcgtgtagctaaaaatgacgttgctgtcggcatcctcaggaatggtcaccaagtggcgcaactcgggggcgtcatagaagatctcctgtgcaatcaatccagattcccttacaaaagaggcgtcatcgttcgtcgcgaagtcgatacttgaccatttgttgtatgtttgtggtctgagctttttcagagtggatgtggcgttctcgatgaacacttcatctgttttgatccagtcgtcagaagaaggcgtgaacgaggctgccgttgcagaacccgtaacggagagagtcccgctcatgttagcattgactccgtagatgctcgaccatcttcgagcactatttccaagtgggcctgcagttgcagtattattaggatacaaactattcgcataaacacttccattattgatccaattcaagtatagatttgctgcgacattcgacgtgtctctatagtaagaatcgatattcgtaccattatttgtagtatacatatccaacttccatgttgataagatacccccggacatagctattttcgcgcctcgaatttgagaacgttggtctaactcaaaaaacagtgcaccgtttggtgaattttttgtattgaatttagcgtcaactccatcgtcatatacattgtctactccgaccataagatcattcaaaaccgccaaggtccctgtagcactgacgtttcctgtgacagcaacaccagcatcattcacgagtagacggtgtgctccgttcgtagagaacccaagagcgttcgcaccgtacctgtacatgccggtgccggtatcggagttgaatctataggcagggtttattgcagttccgttgttgacctccaatactccttgtaacaccattttattgtagtaaatgctgcacatctctacttgagtattgttgttgctgccatacgaaaaccgatgtttcgagtttatattacgtgacacgtaatcaaacgtgttagatgtgatggccagactataataattgctgtttgcactcgacttgttgtcccacaacacaatcttccttccgtttgcgtttgatccgaagtcgataactttgttattgggaatgatgacattaccaattccgaattccgatcccagtacaataacgcccgctcctgatgtgtgattcaagctgagagtggacgcatttatactgaacggtttcaggttgttggatagtgaaggaagaacttgattgtcattactcaatgtcacattcctagtagatgtaagaaaaccgcgcgtggtattcacgtgcatgagtacacgaggttcatcgtcaggtgcagatgcggaattgcgtgcattaaacggataggtggcaaacaagtccaatgtcccactgtgtgtcacattagacaaggttgggtttacctctaaaacgttcctgccggaccctgtaacagcaatggcgccggtgcggcccctgacaacacttagagtaccagaagcaacgttgttggcgttgagtgcggtcagtccacctccgttcccggcaaaggtgccgccgaccacggtcaggttgctcatggtggcgttatcgctaagcacgttgctcctgctacctgtgccttgggatacgccggtgccgcccctggcaacacttagagtaccgctggtgatgttgctcgcctcggacgcaaagtcttccgtggcgatgggcatgagtgatccctcaggtcccatgacgaagttatcatccgcctcccggaacatgagctgataatctagttcatcacctctatccacggagattcccgcagtccccgcggatacaccacttcctacttgtccggagttcaagatcacgatattgtcctgaacggtcatggtctgcgcgttgactatgaattgggagccattgatggtcaagtccccctggatttgacagttcccctggaccgtcatgttcgaggacacgttcgtctcgggggcatttatttggacgtctgaaactgcgccgagcaccacccgtcctcctgacccgcttgccgtgacgtccacgaccgaattgagtcccgaggttttgatttcgacgcccttggtcgacgtcaccgtggacgttccgagtcccgtcgtcttcatcatgatgctctggtctgtgtcccccttgatcacgacagaaccttcttccgtgcccagtacgggtgtgtccccccccatgtacaatgatgtattttgggatgagaggtggatggaatcgatccatgcctccttgaaaggttgtataacactcccgatgtatagtgtggactgcgttgcgggaataaggttggacgcgacgatgacatcgttttcgacggtcagagttccatgaacgatcagccctttgtcatccacggttgccttgttcacccctcccgacacgacaccgatgctgtcaggggagacattgtatatgcctgtgtccgtatcgtccaaaaacgatagagacggtgcgttagacgttccggagagcgcacgcacacctttgagaggcgggtgcaaatcgttcaccaagttggacgtcgatgtagcccttgtcgcgacctcgctaaagcgtataaaggtcgtcatgatgacgacggcctgtgtgtacccttgatcaagaaaaataataatcggaataaacggaacaacaaccgtgcacaagcaagatacagaagaaagatggtgatggtgatgacaacccaaactggattaaggtgtattgggagtattcttcaccaatggtgcttgtgctgcatcgcttggtgtgtgaagccgctggcatcgaaaataaagatggcacgccatcaaagaaaattgtggttctggcgccaagccacatgccttattgcttatgattgaagcggcgcgtggatgacactcggtcgtcaaagcagacatgtaaattctgatgatttccgtataaagagtttgcattacatttttgtaaaaccattttttgtaaaaccatgtaaatatattttgtcaaggattcaaaaaggtcgcgccatgatatccattttcaattaccgaaccgtaccgctgggcacccccgaccacctgacccatgtgtctcttttctttgccaagacccgggcgcggcgtgccagtgggggtggtagtagtactgaagaagccaagaaggtgacaaagatgtacctcaccacgctggcacacctttcgattgcacgtaagatgacgaatgaaaatgaaaaaacgatagccacccagagcgcgccgcactcctggtgtccaacaacgactttgtcacgcaagagctcctctctacacgacgacgtatgcgaccgaaccaggggggtttcccacacccacccattctccccccactcacgctcccacccccatctctatcattatgtgcggagcatgtcccactaaacgttgccgaatacatggatgctaccatgggtctcgatgtggtgatactcgccgcccccctctgcgacctggccaacaggcctgactgtgccaaggacatgcgctgcacggtcacgctacaactcacataccgccaacccagctcggacgaagtgatggtacaaatcgtcagacgcgactagaagaatcgcgactcttcttcttcaaattttaaggaccgccgccgcccatgaagagaacgtcgcccgggaggtcccctgccacctttatgcagagaggtcgaattgcaacagaggttgaattttcctcctctagcaggtgaacgaacaaacaccgtcctcctgactcatcatctggtagagagaagcatgccaacgcgtgccatatgtgtcggcggggggtacactcctcttcctgagaagaagaagaagaagaagaagaaggagaagaagaagaagaagaccagtgcccctcgatcgtcgcgcgcatgagacgcggtcgctcgttcttcgtctcactgaacgcgtccgaagcgatggccctcagtgcggctactatgttggggtacgtgtttgcatccgaggagactgggtgagctatccacgaaccagcagcggtcttgagaacattggaactgtctggtgccaagtacgacgtacttacttttttttccactggtcgaatggccagctgccattgctttgcaaaagaagaaaacgagtttgaatgggggtcgttgatcgctctcacatcctccatcagcaaggaacagaactcgcggcccacgcatgggggcggtaggagccccctggatagttcgttgtatatttttgtcccctcctcctcctcctttcgtgacatcatggcggagggtgtcgaggagaacccttattttttagtgctactacgaggaggacgcgtgtaatcataatacaatatgcaacaatatgctagtacaaaaaaaagcagcatcgttgccgctagtagtcgtagcacaatctgtaatggcatgatggatggtggagctcagcaacgtgtaatataatcatgtttcattttattgacaaattgtaaagaacgatacgatacaatccgaggctttctttcagaagtcattgaatacaacttccggaccttgacatacagctagggacatttgatagtgggacaccttgtattttggggatttgaccaattcaagttttgtaaccgatcttgtcaatacagatactgtcttcaggagattgacacaaaacattcaaggcatgtaaagacacagaagttacatgatcaaagtagcctgacaagtcaacgtgttggcttacatcgtgcgcatcaataatcattttcaaagcgttcctgtaatcaaataattctgctacatctggaattattgggcacgcgcagcgatattttcgcttgagcaaactgaacacattatcaatagcgttaaactctggactgtaaggaggtacaaagagcgggcgtattcctacagaatcgaacgcagagatcgtctcctttgaatgatggaactggatattgtcaaggacagcgacagtaccctgctttacatgtaactctgatacaaactgtacaaagtcgactttcttgcaattgtgatcaaggattttgtaatgaacgatacctttgacagaaacggcagcaatcagcgtcaatttggacattcgcaatgtccgagaaatttggatatttaaacgtttgccgcgttgacagtaccctctgcgacaagtgtcaccgatgtaaaaacccgcctcatcaatgcttatcaaatccgatgtcggaacggccagatactctttacaaaaactttcgacagaagatttgtggtcattcttgtgtcgaactgttttgtatgcgcgcttgcgggtgtagccaagtctgcgtgtgtagcgtccaaacgtttttggagacatcttgacagaggacagagacgtcacaccctctgcaagctgagacattgtcaataagggattggagtcgatcagtttttttatagcaatcttgatatcttcggtaatgacgctcgcccgtttcttccgatgatgttttatattggctttggtgacccaacgttgaagtgacgattttgatactttgtacaacagactaactttcctcaagctacgattatattattgtagtgaacaaccgcgcgatgtcttacctctgcatcaatcatgataacgtgcgcgtattagggtatcaggaaattggtatcaccaaaagaaaaataatactccctccctcttaatgggggtggtgtcagaccaaggagacgatgacgatcttaacatcatggtggtcaagaagacgcttaattctctgtgcatggatgtgtcgaggcaacagatctgctcaaggatccaaagcatggtactcttaatcaaccacgcagttgcagaggcatacttattcgcaaattttcatatcaccagatgcctcgatgatgtagactttgacgtgaagcagttgccgcacctggatcgaaacttttattacaggtgtatccttgcggtctcgacatccaacgttcgaaaggatacgctgggccagagcttgaaggatagcatggttgctttcgacgctctcaggcctgcaggctacgtaaaggtggacgttcgtccatggggacaggtaatcgcagacgtctcaatacaaatggcgacgatggcatgcaacagcgtctgggcaaacgtggacagggttgtaatcaagtacctgcgcttgaaacatccctcgttgaagaaacatttcaagaagattgtcaaagcggtggtccagtatccagaatcggtagtcgacaaaatcatcccagcgggccttgtgcatgcgagccacatcaaagaggttgtcaggcacttgaggactctctttccgctgccaagagggaagcagttcaacactagagcgcacctgacgatgcgactgttccatcacgtgcttacagagttgggggaggtcggacgagcggagccaaaagagaacaaaacaaaaaaaagtcgcccccgtctgttcagtatccttcctcgcaagagcggcttcacaatgtcttacgtccctatatcgtccatgacgctcatgaagcttctcagcatgggtgattcaccactcgagagcatctgtggcgatggacgtcacgcgaatcataacatgttgtggcgaaagtacttcaatgtccgaggtcttgagacgaaaatgtctcgctttgacaaccgaatcctcagcgacggtaaaggggtctcggtccaaatgaagcataagggtaaagacgatgtcgctgacgaaggagataacgcaggctatctcaaagacgcaggtataaaagaaagtacgagcagtatgtcagacctgcgggaccatgtcataggttacctcgcagccctcccgatcctcctacaccaccgaggcagcagaggctaccgatcgatgcgattctttcgatacgttggcaaacagaagacgatcgaaaaagtatgcgatgtgattgctccaagggcgcaaacgaccgttgttggcttcggcaactggtccaaccagggatacggcatcagttgttcatgttctgggcccgtgaaagagatcaggaagtgcctttctcgtcgtaagaatgttctgttcaaaaacgtcgacgaacgcaacacttcatgtacatgtcacggctgcttccagaggctcgtcaacatgaaagcagacagtgtcgtttggcgcggagattacagagagtcccctatcgacgggactataacttttgagaagcagaagacggtggtgaagaacgtcaaggtccacaaagtactgcactgtagagacagtgtcaaaagcgcatcatccaatgtgcgctgtggtgcaacctggaaccgagacgtgaacgctgccaagaaccttcttctgcttctgacaacgtggatggacgggagagagcggccggtggcattctgtgtgccctcgcctccccctgaaaccccagtttccagagaggcaagtgtgagtgctcaaccgaccgacccacatgggtctgtcagcagcttaccttgttatcctttgggccagcttaactgctgaaatacgggatgaagagcacaaaatgaaatcgcctttagctgacctacccattgggttcaagggtcaccggtaaggtgtcccacaatttgtgtctccgactccgatgaggtttagggttttaagcctgatgaggaagcaaaaaaaaactaaactacactactactaaacatggtcaaactacatcagacaacctatggggaggtggatgattcaccgctggagacagcggatgtggtggcgtcggcgtcagatgcttgaaaagcgcgggctcgagaggtgagcgaggtagacggattcgacctcatctgctcgagcagctcctttctagctttatggtccttgagcgaaaccttgatcttcttctgcttggacgcggtcagcagctctggattcttgaagaaccagtgcgcgtcgcgtttgcagcagaactgcaagatcatggcgtcctcgaacttaaagggcttgccgccgtttctgacagagttagaacaaaagccgtcccctttgacgttgacggcatggcagacctcttcgttttcgggtagcgctcccagccccagaatgaattcagagtagggcatgcaaggctcctttgctttcttcccagcggccaacttcagttcagccatttgcttgttcatgcgttcaatataccttgcctgttccatgatggtgttttccaaattggcaggagaaagagaagacatgttttcgagtaaaatcgagtaaaatcgaggaatcaatcggcaaacagttgtgaaccgtagtagtaagcagtgtttgtggtgtggttgttgtgtgttctagagatccggaaaaacaattcaatttttttctgggcaaccttaccttactcatcatccccacaacatgtgggggggcacaacaaccaccaccaccatccccgctcgtatatctccttatactcccgctcttctactgttttttgtctgggcggtctctcaaagaaaatgactgtctaaagaaggaggttgcatgatctgggcataccagtcccatggcttgtcagggttgtcacgcacgacatcccacgatgtcgccacactgggatttctgctcaacgcattccagttccacggcttgtcggggttgtctgagagtatgcaggacgtatgcgcgggagttcctgcagtgcagaaaattttcatgattatagataagaaatgatgatgtcctccctgatgttgtttaattacggcgcattgggagccgtaattggtctggtcattgcatctgcgggcgtcattacaatgtatacaagtgtccatgtgtatacagaacatgacagaacaatttgacgacccattacggtccatggcaagcaagcccgtccaagtccgtgtatgcccatgcaaaaattgaaatttttgaagttcacctgttctgttccagatttttctcttgtttgtgtgtaagaagcgaagcaatggttctttacgacttggaacacctcattcaaccgacctcagagaaggtgtgtgggccggtacaggactatcagcatgtatagcggtgctctcacgcgttttatgacttggtgactacttatgtactcccttagaactatcggctctcctgagccagcttcccgtgggactgagtcatcttgagatgattcagtggcagcttcctgtcacctacgtctccggtctgatctgtaccctgttaggttcctgtctaccgcctcctttcaccacaggtgcccctttatgggtctcctgtgtctgtaacgttatccttgtctccgtgtatagattggtgcgtctgttccgctgctttaatctactgtccactctaccggagtgatttcaagctgataggttactgggctcctcatcactagcactgctttgataatgcaacttccgcgagggcctcctgccggctttgtgaaacttaccaaacttaatggtgtttcatgggctcgtgggatccgcagtgtcattgtgagcaatggatgcgaccgaatcctcccaacgggggtgaaggttcctctagattggctagacgactgcgcgccagcggcctctgctgccggagaggagggtccttccgccatcaaggaagtaaccccccccgatcaatcctccaactttacggttccttctctcaatgttcgacgcctgtcctctgatgttgaggatgtcctgatgaagctgtgttgtgtacagacacagatcatccgttgtgcatcagacccgcagcctcattgcgtccccttcaattatgatgaagactactctactactactgatgatgaggaggacttgaagagtgctacgagtgctgactccggtggcgtgaccccatctgctgctgccactcgtgtctttgagacttccgctgtttcgccggtgtatgagcctgctgatcagcagatgcctaatcgagagctttcgcctgtgtatcagcctcagccttcgtcggcgcctccctttgagcctgttcccccggcttacccggaggtggctaagcccactttcttgaagggctttgcttctttttcctctgcatctgcccccatggagcgtggcctccctggctaccacactcgctctcgcgaggctgctgtttcctctgcacgcacctctgctgctggtgcctccctggaaccccctccgcctccgccggtggagctgcctcctgcccctggccctcctcctatgctatatacgcggtcatgcgaatcttgggagcatctgctcactggtggatctcctccgactttgaacttgcgggactaccgcctgatcaaccaggatcgacgggatggtgagtccttgaaccgctctttgtacggtcggatggatatgcaggctacgatggcaaatgttagtgtgaagctgaggcatcgccgagtgatggctttctctgagcttggtaccaggtgtcgttcttttcttggtccagtcacttctgggattctgtatcccccagatcatggtgtttcctttggtggtacgaggcgtagtgatcacgagaagcttggttatcagtttgtgcgagtgcctgtccctctgtgtcctgttagcccagatttcgagctgcttatgagtgttgcgaggtccattcctgtgattaggaacatagacgaccagcgcgctcttgacgctggtcttgctgcggagtatttcatggacattcgtaggtccttggctcctgtcccttctgcgaatggagctgggtctaataccctcattcatggtgagtctcggtttgatcctgcactgttggggttcagtgcactgcctctcgaacgtcaggagttcatgtgtttaactatgatgctcgcgaacatggaggacgatatggtcaaggtataccaggactttgccacccctcgggatatccttttggatatccggaagacgcagtctgatgcccttgcctctagagtccctctcatgcgtatcgaacttcataatgcgcacatgggcccttctgaccgtgtcgatgatttctttcgcatggttcgcagtctgtgcactgacctccgcagtgctggacatcctgtcactcagcgccacgccatggaaaccattgtgaatgggatccgtttgatccgatttgaatcgctgcggatccagtacggtatgatgttggctaacagacagactgtagattactggtcttgtctggaggcatatcggtctctcgacattttgaacattgctctccccaggtccgactccaggcatcctggttggtcccgggacgctccccaggttcctgccaatgctgcgtttcagcgtgggcagggatctggttctcagggttctggttccaacaagcgacgtctggattgcacttggggcccatgcctcagcaagacgacccactcggaggatcgctgtttcacgaagcatccgcacctgcgtaagaccaagcctggtgcaccggttaccaatccggtgcccatggccttggcccttccaggtgtgcttactccgcggcagctggcctccttgcaggctcagattgatgggtatgctttggacaagaaataggaggtacgctctgtccttttctcttgcactgcgaaattttcaaatgtctgcagcccgagcctgtctgagggtgtctggcatgttgattctggagctgggatgtcaatcacaggtgatatgtctttgttcactgtgtttcatgcttctgagactgggccagcagttaaatttggtgatggtgtggttcaacggtctgtgggtcagggttctattgtgttatgtagtgattggttaccaacaccaatcactttaaccaatgttctctacatcccacactgtccggtgaacctcatgtcagtaaatgctgttgcccatgctcacaactgcaagatttcttttgatagtcttagttgtactgccacacagggatcttctgttctgtggtctttccctgcctccagtgatggtgtgtacaagtttgcatgtaggccttgtcacacccctcgtggccgtttgtatggtgctgaagattatccagcttttgctcttgatgttgatgaggatggtggagttgtgatccctaccactcctgaatggttgtggcataggcggctgggtcaccctggctatgatgccatgcacaaccttgtaaggaagggtttggttcagaacttacccctcactctccaacaggtgcaaagactgtctaagatcccatgtgatgcttgtcagaaggcaaagggaaaacgtatcccttttcctaaagaaagcaaaactaggatccgtgccccattacaacgccttcacttggacatcatggggccatttaatattaggggcttgcgtggggagttttatgttctgtgtctcactgaccaatactctggctatgctgaggtcttgtgcttgagaaccagggatgaagctcccttagcagttcaaactaccatcctcagatggatgactcagctgcatggatttgttttcaagtgtcttaggtctgacagggctaaggaatttatagtgaagtggttcgaggattggttagaatcggttggtgctgtgcatgaattgtccatggcttacactgctcagcagaatgcgactgtggaacggtacaatggggtccttcagaacgtagctaggagcattcacttggagtctaagctcactaagtccttctggccctatgccttcctcgccgcgtgttacctacgcaaccggctgcctaatcagggtgacaagactccttatgagttgttctttggggttctacctgatgtatcgttattgcgcgtgttcgggtgcccatgctatgttaccttagtgaatgggaagaagcgcaataagcttgacgaaagggcgttatctggtagactggttgggtattctctggtgagtaagggttattttgtttgggttccgaagttgcgccaggtggtagagagtcgtgatgtgctcttctatgaacagtttagctataactgtatccctgggctttttccctatgatggatctcagtatttttctcgcacccctgccgctatcatcggtaaagggcttgatactactgacaatgtcctgggccctttaccaaccccgattgttgaccgctttactggtcatgggatgacgatgcgtcccaggccaggtaatgatggtgctgtatcgcgtgcggcggcattgggccagggggagtctgatgttccttcaagctctaatttattcgaatctcagggggtcgccgggccttcctctgcgccacgtttcgtcggtgaagtcgtaggattaggacagcctcgggtcatagtggaacctagtacaggtccactgcccactagtcgccaccccccgtccacctattcggatagctcgcgggagttgttgatcacttcaccccctgctatacctggtggtttataccggaccaggcattgcgacgatgtggccgtcacagatgatgtgagtgatgacctcgaacactggtccgggtcagatactgcgtatggctggggtgttccagtgtacccaggcttcgacgatttagaggcaaaggaggccggccttgttcaaccacgcatgagtgctgcgctgggggctttattaccggttactgctgatactgctgatatccccgctgcccatgtacaagtacactgcttgtgcgtgggggcttttatttctacctctactgaactctcttataaagctgcaatgttacctaccaacccagacagagatctctggctgcaggctatgaaggatgagatggcctccctccatgctcatggcacttgggtcctcactccacagcctcctaggcagaggattctatctggcagatggttatttgtcaagaaacatggggctgatggttctttgcgttttaaagctcgttttgtagttcgtggttttctgcaacgtcctgggctggactaccatgatgtatatgcccccgtctcctctaaagcaggtcttcgtgtgctccttgctgccatcactcatagaaaaatgtttgtgaggcagctggacatcaagactgcattcttgaatgccaagctggaacctggtctggacctgttctgctaccagcctgagggctttcatgaacttggtcctgacaatgttccccttgtgtgcaagctaattaaatctctttatggtttgaagcaggcacccagggcttggagcaaagatgtaaagcaggttttggttgcccacggttttaccatgtgcaaagctgaacctgctctgtatttcaggagggattctactggtgggtggagctatgtcctgacctatgtggatgactttatctgtgattttagtgagctgcataggtatgccttgctgatcaaggctatggaagcagctgggtgggaagtcaaggaaatgggtgtacctgtccagttcctttcattggacatgacttgtacacttgattctgacggcaggtgtgttaagatcgacctctcccagcactcctacattgttgagctggtggagcagtttggtctcactgctgctaccaagcccaagttttcagttcccatgtccaagtgcactgtcactgatcctcctggagaacctctggcctctaatagccagtacctctctcttgtgggggctttgctgtacctggctacctgcacaaggcctgatatttcttttgctgttagctacctgtccaggttttctgctcaacccactgcccccctgtgggctgcagccaagcgcttgcttttgtatttgagagaacattcccatctgggcctcacttacactcacagccctggtttctcttttactgtctttagtgactcatcctttgctgatgatgggtctgacaggagatctcagactggctatgctgtgcttgctggaggctgccttgtgacctggatgagcaaaaggcaacccactgttgctgttagctccagtgaggctgagtatcaggccctgtctcagactgccagggaggtgcaatggttgaaaaagttgagaattgatctagggctgccttgtgacctggtcaccattcagggtgacaacttggggtccttgagctgggccaatgactgtcagctgctccctcgcaacaagcacattgatgtcatccatcactatatccaggagctggtggaggatggccaggtggatgttgcctatgttaacactaaggacaactgtgctgaccccttcaccaagccccttgatcctatggtgttctggcgtttcattcgcatgtttggaatgactgcttctccttaaaccattttttttggttacatgtattctagaattttggttacatgtattctggaatttttggttacattttagggtttctttggttacatttaaagtttctttaagttattattgattggcattaggttcctattcccggatcgggttttctataccgttgttacccgactttgatatttagttgtcctcttatatccacttggcaaattttggttctttgccttgcttcataccttcccttaccccttcgggtttcatttgaagtttctctcgattttttttttccggagttctttgattttttttttttaatttgttacatatagttctatgtcaccagtgccataggtggagtagtacttttgtatgtcacctgtgtcataggtggagtatcagcatgtatagcggtgctctcacgcgttttatgacttggtgactacttatgtactcccttagaactatcggctctcctgagccagcttcccgtgggactgagtcatcttgagatgactcagtggcagcttcctgtcacctacgtctccggtctgatctgtaccctgttaggttcctgtctaccgcctcctttcaccacaggtgcccctttatgggtctcctgtgtctgtaacgttatccttgtctccgtgtatagattggtgcgtctgttccgctgctttaatctactgtccactctaccggagtgatttcaagctgataaggacactgaagccctgtttctgtacgccaccgtgcgcggcatgcgcatgaagcgcatcctggagatcggtggtttatccgggtactctgccaccaatttcgtcaaggcgttcgccaaaccggaagagagcgtgatgtacaccgtggacattcaacccgttcctaaaatcgcgcaaaaccacattgttctgcgcaaagatgctcgtcacaataaatcgtcggacgtgggagacgccccactcgacctcgtgttcttcgattgccatcattttgacgtccagatggacgtgtacgatcggctggcggctcaaggtttgatcacggatgccaccgtgatcgcgttgcacgacaccaacacgcaccctgccaaattcttttcctttgggtacgctttgaacggcgatccaggcgaatgggtgcaccaggacgtcgaacggagaatggtcaaccaatttgtcgaatcgaacgggtaccacgcgttctcactgcacacgccactgtcctcccatgatgcagagatgccttatcgacatggtcttaccttgttgcaaagattcaagcgcctcgagacgtaaaagtttcctcgcatgatgagcgagaggcgccacagaaaatcgaacagaaaatccctgttcttcgtaaaggacagagatgggggagggggggggggagttgaccccaatgatacccccccccccccctcaatcaagtaagtggtggtggtgtgcaagtgtttcttgatgacaagtactgcacggtgcggtcgctggagcgcacaaggatagtgctaccaaaaagaagccctgcatccagagtgaacgcatctataccatctctctgtacgagcatcagaacatcattcatggaaaagaagggtggtgaaggcgcggacaggccatagtacatgccagtggtggacttgaacaccaccgagcacggagcggaaaggaacgcaaaagagagacgcggacacagcatcgcggacacaaacgctgtgtccagcacaggcgccttaacgatcacacgcatcaacaattcggaagaaggacccccccccgatgaagggggaacaacatacggactcggatgaggcggtggtggaggaggagacgaccctactactggcggcggcggtgaaggaggaggaggaggaggagacgcccctactactagcggcggcggcggcggagtaggaggaggagacgaccctactaccggcggcgtcggtgaaggaggaggaggaggaggagacgcccctactactagcggcggcggcggcgactcaacgtgtgtttctcgagaaatgacaaaatcgcatgtgggacaccatgcgtgtgaaagggtcgtatgtggagtacgtgcatacaaagttgttgccgcataatttgaatggagtattgcaagggggttgcaggtgtatgcagaaaatgctactcaatatactattgtagttagactggatgtttgtcacgacaatctcagcgaaacccgtgtagttgcgaaagtaaattccgccacccttgcgaacgccgttgatagacacaa

SEQ ID NO: 257 - DNA, 21005 bp, unidentified
  source 1..21005: mol_type = other DNA
  misc_feature 1..21005: note = Fanzor polypeptide
gatgtgagacatcggggtctgggcaatccccatctttgccgttgttgagcaagagaaggttgcaacaggagcgaacgtcttgaggcgcaataccccacgttcagtggaggtacttgcatctattctgtgccctgagctgcagcgaccctttcgtggcgtgccgttgcaccccgagtgaaaactttttatatataatatatatatacatttcaatgataaagacgtcgagaaacggaatttgcgatgatgggaaatccggagtattgtacaaggatgatgatgtgcgaagtaaaactgttggccaattttttgttaaaaagaagaacaaaacagggaatatgaaactagtactttataagccattggacaataaacgggctgcaaataaacaaaagggtggggcttttgaaacaaaaacaactagtagtgtaattgtacggaactcaaccgaatttaatgcctatattacgtatatagaaaaaggtagtggttggggtgattttaagattgttaaaatgggccaaggcataaaatatttcggtaatcgatttcagaatttggtagatcacattaataaccaaaaagaatacccgtacaatataatgagtgggtagtaacaatcagtcatcctacaagtagggctgacaattgccaatgaattcgtcaattcaaacatgagtgcttgacatgacagtaacattacaatcaagaacaacctatgaatttgacaaggaaagtacttcacaaaaaacaaactcactaggggttgtcggtcgtgttcgaaggaagagagaggagaacaaaacaaaaagaaattatgcagtttcggggatcgtcgggcctttatcatgtccggcgatcgattgtaccgccgccagcactacacaggatttgggtgagggggcttaggccactacgtttacactcgtttttagaggaacggcgaccactctcatcaaggacggcggcatctgtgtcgagtcgagtcacatggcgacctctcgcatcacggcggcacgtgtggaagatgcgcacccaagcgcttgcgatatcggcaccgactgtcgtcgtgtcatacatcgcattttatgcaatttcattcaagaagtacggtggtgctataggtgataaagcgtgtgctttgtggaacgcaaatttattcatcctaccggtcttcttgattacattctcttggcttgatgacgatgaaccataccaggcatacatttcatattccgcacatatgtccctggtgttcatttcagctgtgtgttttggtcgttaaggtctgggttcaaggtattgtcaaacagtttagaagatggtgtgaccataacgctggcggcggggcacttgttgtatgggagctgtttccggcatgatcagtctgtaatccacgatctcaatctgagtcccactacaactgtcgggtcatatccatatgtcgagaccccttcctttcccaacagagtgataaaaaaattgtcaaagtgatatggcagcggaacacaatgcttatgcatgtactgcaaaaaagcaatctttaaaattttgtaatccatgtaggcgcctgacttcttctcacattgctcgaaaaggcagcaattatgtcgtttagttgttttcttgtctccataatgtgtagttacacacagaccggtcaataatgttacagctcaaagctttatacagttgttcaatttggcctgaatttattttttctcatttcaggatcgaagcaaacggaacggaggaaacatgtcgcatagtcggtgcattagatagataggataggataggatagatagatagatagatagatattatagatagatatgatagatagatagatatgatagatagcgcactctatcacgacacaggcggcggcttgcgtatcatactcgtccatctggtatccacggaggcttgcgcactcactcactcacagggtgcgaaggccccccaaaatacagaacgaacgttttttgtaaggttcgagagatacgtgaataatttatctcatacaaagaaagaatgtcggcactgttcgccgcccctggtcatcgggaccgttgcgggcacgctcatcggcacgatcggagccggcgccggcgcgctcctggtcccgtccctcatgttcttcgccggccagtccatgcagggcgcagtcggcgtgacgctggcgatgcagactctcccggtggggatcggcggggcgtacttgtactacaaacagggactcatcgacctctgggtcgttgctgccgtcgccatcggcatgctcgctggaatcctcggcggcggggctctggcgacctcgggcgagatcagcccggtgaatctcgagctactcctgggcgtcgtcctggtcgtcctcgggggcgtcaccatcgccaagacgctcctcggctacaccactgttcaccctaaacggaacagctaatgtacggatgtacgtgcacgaatacactacgcatccccagagccccgcctccccatcggaatttgtgctcgttgttgcttgtgttgctaccacgtcagatgccacacagctccatcacgtgtaggcgagcgatcgtcacggcggcgttctggagagaatcgcaggcctcgaacctcaatgggtgagccgttctcacgcctcgccgcagccgttgcgctgtccgtgacagctccagctctcactcccactccaacacataactcatcttgggattgcggtacaccgccgtcttttccttgccagtctcccacgcaaacttgaaaaataaacacaaccatttcgccagctctggacgtggggcgaagaaaggagtagagtcttgtatcatcgagtgtgtggcgcaggtacactcggacaagggaattatgttacataatatcccgagtcccccaaaatcctcttgtatgcgtttatcttctacacttcgctcgacactgcgttcagtaaagaacctgtcagcttgtaatcaattttgcgtcctaccacaacttccagtttgcaatatttctttggcctcgcaagaattccggggcggattgggtacattgtaaagcaattgtggatgtttacccaacaccagcttcaagattatctcgggcaatggctgtggcttcagtccccataccccgtaggcgtcctgatgcacgaatggagcgaagcgcggatctctagattgcgtctccaacacagagtacagactcggtttagccattctgaggagttgggctgtgttggtgctcaggagaatcgtacagagaatccacctactttagatgctttgccacgaccttttttttcgactcagtactacctcatactttttgatatgactttttgttcgcaccaccagtttgatttgcgttagctaatgcatcatctatacgttttgtttatgttgcagtttgacttgccttactttgttctcatcctcaaccaaccaacctcaaaactgcttgtcaagtgatatatgtcgccaacacttggatgagaaccaccgtaccacattaaacaagtggcggagcccctttcacctcttccccccagcggagcgaccgggggcgaccggaggggagcccccacaaaggagtccgcgaggaaccgagcgggtgggcgaccggaggggagcccacatttcacatcaagcattagacacactactacacactactgtgtaactaactgtcaagtcttacacaatgtgtaggttgtttgtaaaagattaactgtaacacttgggcgtttccgatgtgtcgtctcaagcagacttctagggagtatgaaagaggaatcgcgggacacacggcggcacctgtgtctacatcagattggtattacaccatcccacaattgctacctccatgaggtgagctgagtccacaaagagcgagcggaggagttcggtactgcaccactcttcaacgtgactgcagttgcatcatccacctccagcatggtcgtgctgcaatttctcctcacaccagtgaacatcccacgcacaagaccattcatggcatcaatattttgggtggtggcaccgattccaaactcttccaggagcgccttggcaaattgctgctcatccatgggagagttcacaagagtggcaagagctcgaatgacaacatccgtccaagtgcgcgtcggactgcaacagcaagagataaacgaatgttgtgtgtcatttgctagcatgtgctacggcaagtagtgtggcgtaacacatatcgttcggctatcatcaggcaagcatgtacaaaccttagcctctcgatgcgacgctcatatgccgctcttgcagccgggtgttgtgcaagcaaagcatctagttcagcgtcgccatccatgacctgcaataaagaacatgaatggatactttttatcccccatgcagtcaaagccatcaaaaaatccgctatcgagcctccggcattcttcagtatttattttttgttgaaataattgttgttaccgagatggagagtcttttcagaggtgttcatgtgaacacgttgtcacactcgcatcatgtcgagaccactcgcatcacggcggcacctgtgtcgagtcgagtcatgtctttagtttgctcaagcgaaaatatcgctgcatgtgcccaataattccagatgtagcagatatatttgattacagtaacgctttgaaaaggattattgatgcgcacgatgttagccatcagtttgacttttcagggtactttgaacatgtaaattcagtgtctttagatgccttgaattttttgtgtcaatcacctgaagacagtatctgtattgacaagatcggttacaaatcttgaattggtcaacttttcagaatccccaaaatagaaggtgtcccaatatcaaatgtccctagctgtatgttttggttgcgcaagttgtacatagagaaatatatgtgattcaatattaacaggtataagtgtaacccccacagatgcagagacaaaagcgtgccatgctggtcagccccagttacgccacgcctgggttggatatcaggactcgatacgtgatggagaaagcaggagtgctcccccgtgacctgggcaagtatagcactgagggttttgaacgcgcgacgcagcagtgctacgccgccagttagggccgggtttcagttttgaaacactggagggcgaggtgttgtccagcgctgtattggaccacctgaagtggttgttgtcccacgacacagaggtggctgtgttgttgttctgcggccatggcatgtggcaggggtcgccgcagcacggtagtctcgtgtgttcattcaagcagctggtcacagctgaggcaattgagtgcgtggcggcgaagttcaaaggcacatttgtgaggttgctgaacatgtgcgaggccgagggggagtctatgtggcaggatgggaaaggtaccagggacgcagtaaggctgcgaggtgctccgatgcaagggggggcaggcgcgccaagcacctactacggcatgacagtggcagccacgcagcagtttggcaagaccactggtaacagccggggcagcaagttcggtgttgcactggggcgcacgtttgatcaggaggtgctggtgacgtacgatgggttcgagacggcattggacaagtattggagtggggcgcaagtacggatgacgcacgcattccggggtgtgttcgggacgcccgctctcccggtgggttcttgttgcatcactaatgatgatgcgggttctgagtctgagtctgaggtggagttctgagtctgaggtgcctggggaagggttgcaacagttgactcgttttctttccgaaaataagtaaacctaacagagtggggagtgaagtgacgtccactttcttggataccccatcaacgtctctacccactctgggtttaatgtattgagttttctcgcctctttcacatcagtaaacccaaattgagcttggatttctttgtcaaaaaatacacgcgtcactagcattccattccggcgaccatctaacgagttctttggataccaattagataaactatgtagtggtgtaggccagtaattctttcgcacccccctgttcgtccattcattctcacacacgcacggcattcttcagtatttatttgttgttgaaataattgttgttaccgagatggagagtcttttcagaggtgttcatgtgaacacgtttaaaatagggattgatgtgagcctccggaagaattcttcagtatttatttgttgttacaagtacaaaggacatttgcatttggagcataggatttagaattcttcagtatttatttattgttacaagtacaaaggacatttgtatttggagcataggatagtcaacaattgctatgtatgtagcatcccgcttgggaatggaggacatgtcgaaaatcattatgacatccaacatgatgctccctgatatcaaactaagagatgatgatgatgcaacaagcgtcatacaacgatacttggagtacatgaagcacatggtaactcatattctccctactgcgttgccggcttgacacgaaaactgagaatcttatccaaagtacttttcgttgctttgacgtcaagggacccccttgacgcactctatcacgacacatcatgcggcatcatcctcacacacgcacggcggctttcgcatcctcctcggtgtccacacatgccaaggcggcggctccatgtacacgcaaacggcggaaaactgtcgcatccacacatccattcatgatgtgtaggggatacctcagttacatcttctggcattgtattgtccagtcgatcgggttcaacacttcaaacatttgttgatcggtaaagacattgataaaggaagtgcatttgcacgttcactgtgccacataatttcccccacatacatggaaagcgattgcctttcttttcctcgcaggaggtcaacaacatgtacccaacccttatagcggttgcaacaaccattgcgcttttcatatacttccaccgtcgtgcttaggcctatcgtgctgaaaatgaagctaatgcccggcgtgaggctgaggaccgtgccgacaatgaagctactgcacgtcgcgcggaagctactgcacgtcgtatggaagctactgcccggcgtgcggaagctactgcccggcgtgaggctgaggaccgtgccgacaatgaagctactgcccgtcatgcggctgaggaccgtctcaggcaagagttgttgtcgttctcgcctgatgacgttgttgctatgactcctaaacatattgcggagtataggacggcgtgtgcttcggttggggtagcatctcatttggatcagcatgtatttcccagtagcagtcaaggtggaggctaggttgtcgtggactgttcaccgcgaggagcacctgaagttcattgataaaatagaatctgcgttcaacgctcgtgcttagcttggtagttcagagaactcgcggacgaggcgccttcggcacaacacatacgtgggatcggagatgctttttcgaaattgggtttggatgagttggatagcgtttttacgcctaatatggtgggcacgccacgcttgttggatctttctacagtcactctcatcgatccggatggttcttcatgcatgtctgatctcatgtgacaaatgattcacacgaccccacggtgctgcgatctttttactgtcacccaaaatgggggagggggcgtggcctggtgttgttgcgggacatttatgttggcgtttgctgacaaagattctcgagcttgatgatttggataacgtgtgggccttcagcatcacctcagaggatggagccaatgaggttgtccgtgtcacacttgcccactattgtgacatggaaactacccacttggcagtgcagcacaacggtggggctgtgcctgtggatgtatttccagaaccaggcacatttgcagctagttggaatgcatacgtggccttcaacatcttcacccagtcagatccgtgatggtcatgatactgactgagttgtaagatggtgtctcgaccggctaggggaatgctgcacgggtgagagacagacacgatgacggcacgacctttcaactgcatggcattgtgtaacaattggcggccttgtacattaaaaatatggatgtcatcaaatgctagcacattgaaaccgtcaagtgaaggtgattctgattcagacagtttacacaacgttgcctctggtgtatgtaaagcatggtactccttgttatgttctgtcatgaccaatattagagtggttagtgaatgttgagcaataagttgagtgatagcgtgactcttcccactttccctgcgccctaaaatgtacattacttgtggcttacaagttgtctgtgtgatgctcatttactcatttttattttatttcgaataatagaatttttttatttcgaaaaaaaaatacgccgacgcatctgacgcaaccttattcactgtggtacaccaaagaaaccgcacgatcacaagcagactatattggattccttaaaggggcgccacggagagggccagagggattcagttgcagattttattaaacaagcggcggagcccctttcacctcttccccccaggggagcccccacaaaggagtccgcgaggaaccgagcgggtgggcgaccggaggggagcccacaggtcacatcaaccagcagacacactactgatttacacacacacacacacacgcaacgccgcggatgatagatgcaggcaggaagggaggttgttgtcagttgtgcaggggagggacagcaagacgccgccgtcaggagaacaagagacacacacacacacgcatggaacacacacgcacgcaaacggaccgcatgcaaattcacagggttttaggtacatacagctagggacatttgatattgggacaccttctattttggggattctgaaaagttgaccaattcaagatttgtaaccgatcttgtcaatgcagatactgtcttcaggtgattgacacaaaaaattcaaggcatctaaagacactgaatttacatgtttaaagtaccctgaaaagtcaaactgatggctaacatcgtgcgcatcaataatccttttcaaagcgttactgtaatcaaatatatctgctacatctggaattattgggcacatgcagcgatattttcgcttgagcaaactaaagacattctcaatagcgttaaactctggactgtaaggaggtacaaagagtggtcgtattcctacagaatcgaacatagaaatcgtctcctttgaatgatggaactggatattgtcaaggacagcgactgtaccccgctgtacatgtaactttgatacaaactgtacaaagtcgactttcttgcaattgtgatcaaggatcttgtaatgaacgatacctttagcagaaacggtagcaattagtgtcaatttggacattcgcaatgtcctagaaatttggatatttaaacgtttgccgcgttgacagtaccctctgcgacaagtgtcacctatgtaaaaacccgcctcatcgatgcttaacaaatccgatgtcggaacggctaaatactccttacaaaaacggtcgacagaagatttgtggtcattcttgtgccaaactgttttgtatgcgcgcttgcgggtgtaaccaagtttgcgtgtgtagcgtccacaagtttttggagacatcttgacagaggacagagaagtcacaccctctgcaagctgagacattgtcaagaagggattggagtcaatcagttgttttatagcagccttgatatcttctgtaatgacactcacccttttcttccgatgatgttgtatattggctttggtgacccaacgttggagtgatgattttgatactttgtacagcaaactaactttcctcaaactacgattatagtatttgtagtgaacaaccgcgcggtgtcttatctctgcatcaatcatgataacgtaggaaatgtgtataaggaaatgtgggtgcaatattatatcaccaaaagaaaaagaatactcaccccctcttaatgggggtagtgcaagacaaaggagatgacgatattaacatcagcgtcgtcaagaagacgcttaattctctgtgcatggatgtatcgaggcatcagatctcctcaaggatacaaagcatggtactcttaatcaaccacgcagttgcagaggcatacttattcgcaaactttcatatcacaagatgcctcgatgatggagactttgacgtcaagcagttgccacacctggatcggaacttttattacaggtgcctccttgcggtatcgacctccaatgttcgaaaggatactctgggccagagcttcaatgataccatggttgctttcgacgccctaagacctgcaggctacgtgaaggtggacgttcgtccttggggacaagtaatcgcagacgtctcaatacaaatggcgacgatggcgtgcaacagcgtctgggcaaacgtggacagggtcgttatcaagtacctgcgcttgaaacatccctctatgaagaaacatttcaagaagattgtcaaagcggtggtccagtacccagaatcgaaaatcgacacaatcatcccagagggcctcgtgcatgcgatccacatgaaagaggttgtcagtcacttgagggctctctttccgctgccaagagggaagcagttcaacactagagcgcacctgacaatgcgattgttccattacgtgcttacagagttgggagaggtcggacgagtggatccgaaagataaaaaaacaaaaaaaagtcacccccgtctgttcagtatccttcctcgcaagaacggcttcacaatttcgtacgtcccgatatcgtccatgactttcatgaagcttcttagcatgccatgccatgaatgggcgttcctgcttcccaacggatttccaattttacaatcactttttgggggtcttttgatgctttccaaatgcaatcttacgataaaatcgtaagattgtagtcaattttgacaaaatatgctcgaaatgagcttgaaagacggagaaacgtacagattgcgaatgttacaacgttgaaatgccatattttgtaacaaaaggtgttaacatcaattcgtgtcttacaattataattgtaagaaataaagggaaagcggacggttataagtcggcaggcagaattcagcttttacatcttacaataaaaatcctaagtataattcattagtaaaaaacggctatgtgtcaaacatcttcctcatcctcctcctcctcccccccctcctcgtcctcctcttcctcctccttctccacctccatgcccccatccccatcttcctcctcctccatctcctcctcctcagcaatgtctacattgtctccatccgattgcacagcctctgccttggtgtccttctcaatggattgacaagctaggagcatgcttgtgtggtactttctcttgatcttcatactaatgggcgttcctgcttccgaacggattttttattttactgaaatcttacgataaatattgtaagatcgttttcgcaaattaattgattttgcttttttggtggcttttacgaaaatatcttacaatttattttgtaaaattgttttgttgtattcctgagaaagagactattcccttcaatttcaattgtaacattgatttgctcgtttggagagagagaaagtattggaatacaaaatcaattgtagaggacagtcaagaggaaggtgaaagctgtttacaaagtcttgaacgcattgctcataattatttatctcacaactcacaactcaacagttcaaaattacaacttagtacttacgactccgaaatctgtacttatgtgtacctcataatttataactcacaactcagaacttatatgtaccttatacaagtcagaactaataactcctaacgcaggacttattattcataatttcatacctcatagcctcattatgtacataacacaaatttatatccttaaatctgcaaactgccatcctagaatcctgaaatcactcaaaatgtgtgttggatggtgcaaacaagtacactcgtgaaacttgtgcacaatgctaatgttgaactgctgccaacaagtccattggtgctaacttctgcacttagtgctgacagatcatgtgctaactgactcgtcttgctctgggaacaagttggcacgcaacccaacgagggctaaatctaacttcttggtcctcatcagcccttttactgttcctgcactgatgcagctttccagaaccttctccttgcaggcctcgaactcgtcctcaggccaatctgcggctttcttctcgcgatatgtctggagacacgtctctagcttttgcatcatttcctcactgggctcagcagggttgtcgcgaaactctgtgtcaatgtcttcctgaaccagtaccgccgtcctcacccttgtttcatcatctgcatcagtacaggcttcgagacgtgatagaatagcctgctccgtttttgcaaacatgttcaaacgccatgcagcagccccaagcttctgagtgatacagtccaagccaatggcgttcctcctctctagcaaagccgctagcatgcccgaggcatcgccagcttgcatgcacatcacatagttgccaacggagctaagctcccgcacaaagtgacggaattcggcgacacttctcctgcggtatccaacttgtttgggactcatcgagcagccgctaatgtcggggcgtccaatggcacttttctgtgcgtcaataggcggtaggaagaccgtgatggcagcggcaagaccagaagaagaaatggaagctttcgaggacgggcccgcttgtcccgcaccttgatgcaagatcccagagatggcgatgctggtggaatgtgtcttgaagtctggccccatgcgtgtaatgtgggtaaggcgaatgtcagccacgccagcttctttgaagccacaaggaacctgctgccttcctcttggttggtgtacacgaccacatggcacactgaggcaaacttccgattctggcctgctaagttccgcagcatgttgatcacatcagtcgaactccaagattcttcatcgacgagccacaacggtcccttttcatcgccagtgagacaggggtcgatgatcaccaagtcgatcagtttgccaggcacctgcaagagtaaacgaaatatgtacaagtcagttagattatgggttggaagacaagttgaacaacgtgatgctcccgactgtgatcggaaggattatgtgtaatggattttgaagtggtgaaaagacatgcttaacacatcatcctcccgattatgatcgggagcgtcaacttttcaacttgtagtctatcattttaaacatctacgcaccttacggatttcatcacactggaatgttttcgccttcatgttgtaaaggtgcgcgctgactgttgccgtctctagctggacccgaccgactccaatctggtggtcagcgtccatgaacactgctgtagctgccgacatcaggtgtggatacatctgtccaccatcgtagagacggaaaaagcgttcggaaggctctccccttttccacactggcaaatcaccgtactttactgccaatgacaacaagacctcctctgtcaggttcaacatcggaatccctgctgctccatctttcctccgccttgttaagtccatgacgaggaaacccacgactcccctgatggtgttcaacgcatcgagatggatactgcgaggcggaatggggtgtgcgaaaagcagttcacggcaggcctcgaggaacttggacatatcatcacagattggttgttggaggccgtctgtcgccattgggtactcctggtcaggctgaactagcaacttcatgtcgtcaatgctagcggccagggtactgataatctgtgcctggtttttttgctggacccttgtcctgatcacagaaaaccacctgtcgagaagctggtttagcgcttccttgtctgtcgcgaaactcagcagacctcccacttacgtgacctcggtgatggttagcttgggcatcaaaacttcatccctaggtggtataccataccaatcccttctctgggcggtatagtccctcagccacccggagaagacctgatgtgcgggaatcgaagcatcggatcgaatgcccccgatcaagatttcagaagctgccttgctgctgaaggcgatgccacccagctgaaggggtttgttggtaacggcgggttccgcgttattgcccaagaaggcgtgcatgtgcgtgaagccctttgcctcaaggtcaagcggcgaaccagaattgaagcgtaacttcaagtcgtcacgaaaggacacaggcgagacattgtgttgcttgagaagcctgtcgatgatgtagatgacgaagcccgctgacacttctgtcttgtaatgaaccaacgaagccttgtatgccgatgcaaacgtctgcgaataaaagagttttcttgtcatgataacgatcatactaggaagcatctcccgatcataatcggcagcatcatccaatgcaagaagggattcgccttggtggattcgccttggtgggttcgcagctaaattgaaatgcgtcaatgggaatatcgcccgtccatgttgcttttctcctaacccccacggtaataggcacaagcttgtggtccatcctatcttctggccaagttgggtattgtgttttagtgtacaccaacttctgagccccagagtacatgggctttaaatgcacacattccacttctccatccactggtagtgatttgacctccaccacgtcccatcctctcaatccgctagattcatccatttgtaccttgaccacagcgacatgaccaacaaacaaatcagtagtgggttcgtatgctattcttctatccggcttcgtcccttgtgaagaatataagtacaacacatcatcctcctcttgcctttccatatcagtctccaaagtgtgtgcgaccttcatagtcttggcaatctcgttagttgcttgccagtgcattcaattcgatgtagcatcgacgttgcctttcggcaggttcgagctcggcgaattcatttcgtcgttcgcgaattacatcctgtgggagtaacacgtgacatatgttcttgcacttacaggtaataagcttgtcgaatttattcgcggtatctgagttggtaactgtgtcgatctcttcggcttgcacggtttcgatcgcatcgttgccactggaattctcgaaatctagtggtcgacgtcgagatactggcaacgtaggctcaagtggcgtatgcccaattctattcccggggaaggggtagcgtccattttgccccttcccctcaaagaaactaagcctgccaagatgataagaaggaatcaactgtgggcctgccgtcgggtgagtgatcgcagttcgtgaatagttagaggccataattcgacgctgtccaaagtcctataatatccttgctatgtcggtagtatgccaccgaaggaccctaacgaggtgaattcttccaagaaaccctttcttcctaaccaacctccgcaaaccgactcacgtcataaacaaacgcggagagacattttctccaacttcgtaacaacccatgcacgcccgggttgttctcgggaaaatacctgagcagcaacctgtgcaacctaagcctttacgctttggtgctgtagcgctaccgcgacaagcagatacccagcctgcgcaacctcaacacccagctacagtgcctgcgcaacctcgacaaccagctgcagtgcctgcaaaacctcgattgttggaacctaggactctgtccttcaattcagttgagagctttgcgaacagtagcatgtcccctccaaaaggtggtggtgtcacaagcaagtctaaaccagtcgtggcaaaagataagggaactcgttttacggagttacctaaggaacgtacaccagcagctgatgcggtaacaggtaaagaagtacctacgggtccagtacccgttgattgggatgacagacctcacaagcctgatggaccccttggatttaccgagatcgctagagatgaaagtgatgtagactccaaattgtattgggcaccatatgtcaacttcggctacatgagtaatgcacaggagcgacatggtgtgcacaagataggtattgtcgcatgggacagtgaacgagatgcgcttcttcgcgagagtatgaagtccccctatcagctctgcatggatgacttgatgaacattggaggagggacagcaaaaggtggaaagcaaatcttaattccgtccccccattcagtcaagtaagttcagatgggtgttgcttatgaatttggactgtgagtatgccgagtacatgatttctgaatcattcgctcgttgggtttgtcaatgctcccgattatgatcgggaggactgtgtgtattccgagtttgtttttctcaatcatttgctcgttgggtttgacaatgctcccgattatgatcgggaggactgtgggtattctgagtttggtttttctcaatcattcgctcgttgggtttgacaatgctcccgattatgatcgggaggactgtgggtattctgagtttggtttttctcaatcattcgctcgttgggtttgacaatgctcccgattatgatcgggaggactgtgggtattctgagtttggtttttctcaatcgttcgctcgttgggtttgacaatgctcccgattatgatcgggaggactatgggtatgccgagtacatgttttctgactcattcgctcgttgggtttgtcagttctcccgattatgatcgggaggactgtgtgtattccgagttttgttttctcaatcattcgctcgttgggtttgtcaatgctcccgattatgatcgggaggactatgggtacgctgagtttggtttttctctaaatctgaatcttattttgaatctgaatctgaatctgaatcatttgctttaccaacctatttgtcttccgcagggtctacaatgacagtactgtggaagtaaaactccaatcggacgggaaggatttgggatgcggcgtcatggacgaatggaccaaggagcgcgaagtgccaatgaacatcgaagtcgttgttgttggaccagacttctatgttacggctacgcacgctcactggttgaggtttcgcggcgaatgcaggcatatgtgcggagcagatgcattctggtcgacactcacccttgcggaagtcaagacagcccagttgcttgaagtcactagcattcggaggcccatgtcaggagccctatcatggataccagttcacattcaggctcttgggttggtggttgacaatgcgcagcaagcctgtcagggtcggcgagggcgaatttatcgccgacaaagagcttgaggaaactagggcgtgggttgagacatgcgaaggaaagctcatgagcgatttcgaggagtttggtcctagcgacaggaggacgtcacctcgatgtacaccaaaagggccttcacctgacgccggtaagagagcaatcgaacggactgtactgctgcacaggtcaaattttcaaatctgacatgtacatttcgaatgttacgtacgcggtgggatgtacaccgttcgaaacaaccattgtatgctgaccgcacttgccgctttcaattttgataggatattgcgtaacttctgcactctttacatttccttcaggctgcgcgaagaaggcaggaaggaagcaacgatatcagcccactacaatcaacaaagaggacagatcgccgacaactttgtaagttcatcgtattcaaattgttatctcctttcgcaatcgatcacttgttcgcgtgaatgaaccattgcagtcaagtctgttccctgcatcgtattcatgtcgatcgcatcaacttaaacacgcgcgtcactgattttgtataccatcctccttatctcgaaaatagtcgatgcgcattgtttactccgcactatgtatatgtcctcccgactataatcgggagcattgacttagttgattagagaaagattgcggaagattgaacattgaacatccgatgtcctccggactatagtcgggaggacatcggatgttcaatgttcaatcttccgcaatctttctctaatcaactaagtcaatgctcccgattatagtcgggaggacactggatgttcaatgctcaaacttccgcaatcattcactaatcaagtatgtcaatgctcccgagtataatcggcaggacactggatgttcaatgctcaaacttccgcaatcattcactaatcaactatgtcaataatcccgagtataatcggcaggacgctggatgttcaatcttcaatcttccgcaataatttaccaatcaactatgtcaaagctcccgagtatagtcgggaggacatcggatgttcaatgttcaatcttccgcaatcttttctaatcaacaaagtcaatgctcccgattatagtcgggaggacactggatgttcaatgctcaaacttccgcaatcattcactaatcaagtatgtcaatgctcccgagtataatcggcaggacacttgatgtccaatcttcaatctgccgcaataatttaccaaccaactatgtcaatgctcccgagtataatcggcaggacactggatattcaatgtttaatattccgcaatctttctgtaatcaactatgtcaatgctcccgaccatagtcgggagacactggatgttcaatgttctgacccctcactaagtcaaatatgttttatcaatcccttcaggtttgctgatcccaagaagaaccctgctggacccaagggcaaaggcaagcgtgctgaatcgcaggctgcagacaatgcaccagccgcaaagaaacaaactcctgtacccgaagccgagattcattcctcggaggaggattcagacttgaactcaagaagttctgtcgaccctgtgaccgggccatctgacgacgatgatgcacccaaaaccgctcctaagaaaagaggtcgcggtcagcctggttctcagaagaagactaagaagaaggcgaagagatcaccggcaggagagaagaatgaggacagcattgtaaacatcgaaggtaatttggctaaggctaaggctttcctgaccgacaagcattttggtggagagcattcattggactgcaagaagttcctccctccaaagctacctgtcagaacccgtgtgttggaccctgttcgagttgatcaactcctcgccaattttttgaaaaccacaatggccactgggaaggtattgttcatggacatcagcaaggacctgaagaaggtatctccaggttgggctaatgtggatcaaagcagcctggccctgacgttcaacaccatcaccaatgtgaaagttgagttaggcgagccatgggtcatcggagggtaccacagctcccaagcctttatcaagtgggcagaaaaccgccctaatgaaaagcctctgcgcaattgcttcgtgtaccggttgtcagaggtggagggtgccacgtacataaagaagcttcaaaacgctcgcattctttcccttttggacaacacaagcggccagtcgactaaggggtacgactctcagccatttttggtttctaccttcttgtggcgtgaattgtaccttagggcaggctgtcccgctatcttatcacgtctcgaatcatgtgttgttgcagacgaggcaacgcaggcgaggacggcggaactggtccaggaagacatcgacgcagagtttcgccacagcccagctcagcccactgaggagataatgcaagagctacagacagatttcaagacctgtcatgagatacaagggtggatagacgagcagttcgaggcctgtaaggagaaggttctagaaacctgcatgcagcagtgcagcgattgtacaggcgatgttgttacccaacaagttagcattggccctctttctacaacgtgatagcctgttcccacagccaatctagagtagacaatattgtgtcaggtagcaccatggcgtcagttagcacatgacctgtcagcactaagtgcagaagttatcaccaatggacttgttggcagcagtgcaacattagcattgtgcacaagtttcacgagtgtactagtttgccttatccaacacacattttgagtgatttcaggattctaggatggcagtttgcagatttaaggatataaatttgtgttatgtacataatgaggctatgaggtatgaaattatgaataataagtcctgagttaggagttattagttctgacttgtataaggtacatataagttctgagttgtgagttacaaattatgagttacacataagtacagatttcggagtgataagtactaagttgtactttcgaactgttgagttgtgagttgtgagataaataattatgagcaatgcgttcaagactttgtaaacagctttcaccttcctcttgactttcctctacaattgattttgtattggaatacttcgaaggaactttctctcttcccaaacgagcaaatcaatgttacaattgaaattgaagggaatagtcactttctccggaatacaacaaaacaatcttacaaaataaattgtaagatattttcgtaaaagccaccaaaaaagcaaaatcaattaatttgcgaaaacgatcttacaatatttatcgtaagattttagtaaaataaaaaatccgttgggaagcaggaacgcccattatgggtgattcgccactcaagagcgtctttggcgatggacgttacgagaaccatacaatgctgtggcgaaagtactttaatgtccaaggtcttgagacgaaaaggtctcgctttgacaaccgaatcctcagcgacggtaaaggggtatccgtccaaatgaagcagaagggtaaagaagaggtcgttgaagaaggagaaaacgcaggcta

SEQ ID NO: 258 - DNA, 3201 bp, unidentified
  misc_feature 1..3201: note = Fanzor polypeptide
  source 1..3201: mol_type = other DNA
ccatccatcaacgtggtcagcccatgcgacatggacaagtatatctgacgtacaaggatcaaggtgagaaactcaagccttgccaaattagggcgctcaagtcacgaaaatcgcacaacatgcagttagagctatgggcatgtggagcccacctacatctgcagcatctgagtgagtgagagtgcatggatgccaacgtgcacaacgaccagcaaataagtgaccatcgtcaaaaccgtcaacgacgaccaagcgttcgttctgttggctgcagcgtaccccgcgcgccgcacagtcacaacgcccgatcttgggaggaggccatcgtgtcgcgcttcctgcaagccttcacccggagatgatcaagacgggcaatttcttggagcatgaaacgataagaaagcgggttcaaccgttcaagtcctaaacattactgggcagtcccaacaaaaaccagataaataaataaacgagttttcatagacagccgtcggaccgaccaaaacctacacatagcatcaggcatggctttaaatagtcagcacctcacaaagaaacacaacacttcacaccaaaccaagtcacagacagacacctatgcaaggccctctgggtgagaccaatgaacgcccgtggctccacaatccacgcaacactgcaatcgtcaggcaccggacccgccagctcattgaggctggtggagacacctacatgccatcaagtgaggccaccaaatactttggcgtgacggcagcctgcctgcgcaagttggctgatcggggcaacctgcgcatgcgccgcattggcgacaagggcaagcggctctaccactgcggcgacctcctctctcaattccccgcagtcacgcgctctgaggatggacgcaccatccagaccacgatgaggccaccccgcaagcgcatcgcctacgccagggtcttgagtgagaagcagcggcccgaccttgagcgccaaatcgctgagctccgacgcctctgccccgaccacgagatcgtctccgaagtggctagtggcctcaacttccggcgcaagggtctctgcgccattctggaccgatgcttcgcgggcctggtcgacgaggtcgctgtgctgcactgagaccgacttgctcgctttgccatggagctgctggagcacgtgtttaagcgccacgacgtccggcttgtggtggtcggccagggcgatccagctgcggccgccactctcgacgccctcgatccacagcgcgagctggccgacgacctcatcgccgtcaccaccttctttgtggcgcgacaaaatggcctccgctctgcggcgcatcgaagagcacgccgcgatcgagcagccctggaggaaggctgaggaagcatgacaagcgagccttctgaggaagaaagcgaggaacgaggcggcagcgaggaaagcgaatgagatgagacagacggcagcagcagcagcagcagcagcagcgacgacggtggcgggaggcgaaaaaggcaaaggacgagtaggaggcggcggcggtggagggaagtggaagtggaagggaccgcctggcgctgaggggggtggtgatggggagggtgggatggtggctttcgacggtaagacgcggaagatatgcgtctttccaacggcccaacagaagacgctcctcaagcgctggatcagcaccgtgcgctggacctacaaccagtgcgtcgccgccgtgcgcggacggcagtgcgcgccgaccaagaaggcactgcgcgctcgcttcgtgaccgagtttggcctgcgagaggcggaacggatcaaacgcgccaagagcggggtcggcggcggcggcgacgacgacgacgttggtatctcgtgggtgttcgagacgccccacgacctccgcgaccaggccgtgggccagttcgttacggcctacaagaacgcggtccaggcacacgggcggggcaagttcgacatcgcctttcggtcggccaagcgcctgcagcaggagacggtggtcattcgctcgagggactggaaccggacccgaggcgagtacgcgccgatctttggcaacaccgtgcttcgctcgagcgagtcgctcccggccaagatggaccacgagttccgggtcatgcgcaccaagctcgggcggtactacatctccataccggtgccactggatgtgaagcatccgatacagcaacagcagcccgacgcggtgggagggggtgataaccaagcccccgccgtcgcgccacacgctgctgccgccatcgatccgggcgtgcggacgcccttcacggtctatagccccgacgaggcgcgcgtctacgagctgggtgccaacgactttgggcgcatcaggcgactgtgccaccacctcgacgatctcgtcagccgcacgaccgaccgcgacgttagaaagaagcggcgccgccggatgcgtcgggccgctgcgcgtatgcgccggcgcatacgcgacctggtcgacgacctccatcggcgggcggccaagtggctgtgtgagacttttgagaccatcatctacctgcactacgagaccagcaacatggtcgtcgggaagagcaagcggcgtgggctgcactccaagactgtgcgcgcgatgctcacctggtcgcactttcggttcaagcagcacctgctccacaagatccgtgagtacccgttgggatgccgcgtggtgctggtcgacgagtcctacacgtccaagacatgtggtgggtgtgggcggatcaaccacggcctgggcaagagcaagctcttctggtgcgagcagtgcggtttccgcacggaccgggactggaacggcgcgcgcaacatctggctcaagttcctcacggaatggtgcaacggcagcagccgcggcaacgacgatgacgacaaggagcagcagcagcagcagcagcaataagcgtccgaggcaaaggcggtggacggccgatcctctggactttggggcttacacccctccgccgagcgaaccaaaaaccgctcggtggtgcatggatctggtgcaggacgaccgcgggcatgcccgcgtgaagctttgtattaggtttaaatttaagcgttctccttcgattagcgctgatggcacgcttgacattcccaagcacaacacaaccagcgggggcaatttgggttgggttggctcggcaaaaatcggttgcatttttgttccggcgcctgaagctt

SEQ ID NO: 259 - DNA, 16512 bp, unidentified
  misc_feature 1..16512: note = Fanzor polypeptide
  source 1..16512: mol_type = other DNA
cgccggcacggccgagtgccgcaacgcgtggttcgacgccgtgatcgggctcgagcaggccaaggacgagctgcgcaacggtttcatcttcccgctgctctaccccaacctctaccccaaccgcagcaagggcgtcctcctctacgggccgccgggcaccggcaagacgctgctggccagggcggcggtgaacgagctcaagagcgagggcgagggctgcattgcggtgcggttctttgcgccgagcggcagcgacatgaagggcaagtacgtgggcgagaccgagacgcggctcaaggcgctgtttgactgcgcgagcgctgctgcgcgcgagctcgctgccgagagcaggtcgcgtggcgagggccgacgcgccatcgccgtcatcttcctcgacgaggtggagtcggtggcgggcgaccgcgcgcaggacgcatcgggcaccatgtcgagcagcgtgacgacgctgctgcagctgatggacggcatccgggcctatccggacgtgatggtcatcgccgccaccaacctgccgtggaagctcgacccggccttcctccgccgcttcgacactaccatccacgtcggcctccccacgttcgacgacatacgccgccaggtggacaagctactcacggcgcacgtttccgattacaagagcccctacacggtttctagagacgagggcggggattcgtcgtcatcttccgaatgcaatgcggaatacaacgaagccaacgacaacgacaggctgtggctgacaccggcctacaaggagcggatgccgtacctgagcgacgcggaggtatcggtggtcgtgaaaaggtgcgcctccgagaactactcgggtgccgatatctcgcgcctggtcaaggacgccatacggcgagcggccaccgacgccaaggccgacgggcgattcgtgcgggttatcaaccccgactacgtcagcggcaccgcccgtctccctgagactggcgtcactgtggacagcctgtcgagcacggtctttgtcgatagcgatgggtccgactactttgcggccaatccgtctctgcgtccctactacatctggcttccggtcggctgctggggagccggtcaggttcttccgacgagcaacgtcgccagactcacgaaccaggcgacggccaatggcgcctcgttcgacaagctcacgctttacggcgagcgttcgatgcgggattccccggtatacgattcttacgtgagctgcctggacgaaacgctcctggccagcagcgggctggtctcgctgacccaagcgttccgcgaccgaggcgccgaccggcgcatcagcgatctcctggttcgcgaggacaacgacgggtgggtgaacgcgttcgccaggctcgaacttccggtggtgcaggaggcatccaaggctgtcataccgcccgctttcgagggctggtcggccgagtctctcgcggcgctgaacagtgcccagctgtgggatctggcggccgactacgtggcacgcaccaaaaccgcgaaaacccccttggatgatgtcaccacgattctcaggggactggtgcttcccggcaagagggacgtgctcatggtctatgtggacgtcgggcgcataggcacggtatcgcagaggaaagcggtgaccgtcgaagacgtctggctgctcgtgaagaacatgataggcctgggccgctgggcgctgcgcctcggcaaggcctggttcggcatgggcatggagccccggtcgcgctacttgggccaggaggacaccctgtatatcgaggacggccctggcctcgagcgcctggttaccggatacacgaccgtgagcgagcactccatttacgacgtccgctaccacccgctgctgggcagggacggtaatgccaccgcgagcggtgacgtggacaccgtctggtcgtcccaaacgacgctgcttatcaagaactttttcgttccgccggcgaggttcaagctctcggccgccggcagggtgctaaaggtggcaaagaaggacgccgccgggcgcatgctcaaggtcaaaaaggacatccccgcattcaagcacacttacgagagctaccggatcttcaaccgcaccttcacgctcgaccaccgtctcagcgacctcttccttcgtcagaccgcggctgggttcagcgcaatcgccgagctctcgtttgccgtggagcaggcgggcgacgccgccgtgataccggatgcgttcatcagcgcgtccctgaccctcgggaccctgctgaacaggaagatgaatgacgtcgcgctggccgaaatcgaccccgatgcgctcgaagacctcgtgttgccgggcaagggggacgcgctgcgcgtctacgtcgacctgggcatgatcggcgcgttgaaggacggctggatatgggcgattcccaagaaccagcagctgaaacaggcggtcattgatgccatgacggccgtggccgacgacgcgctctggaacctcgtaatcgccgcgccggtcaagagctggtacgctaatatcggcagcaaatggtatggcatcaagccggcgctgctgaacccgatcatcgccatcgatgacgagggtacgatctcgccgaaggtgctcaatgcctgcattaccgaaaccacgtcgatcgccgacggctccatctacgaccccgaactacacccgctgtttcaaccggctatgtggtcaggtcgctctttcgacatcgacgtcaccgacgccatcaagggcgtgcgggccactgccgacgaggacgcgggttcgacaacggcgaccggatgcgacaagcgcatagccgacaacgcgcgcttctactcgtggaatgtgacctacggacacttcagggcggccctcaatgccgtcaagtcgaccgccgacaccaagctcgtcaaggcgctggccgcctacgcccgagaccccaacgatcccgccgtagtcgactacaagcgaaagtcaatggcgtgagggaatcgctttttttattgacattacgaataaaggaggtcgaccggtgtgtgtgttgaaagatgctcaaatccacctgtaggcccacgggccgcgacccgatcggatgctggagtgccagcgatagaatcgtgtcaccaccgcaaccgccaacgcctcgaactggcctcagcatcttgacgctgctgggagcgccgttggaggagcccgtccgcgtgtttcgcaggcccgcgccacggccccttatcgccgccgtcacaacaccggtcatacaacggctgaaccaactggagctggcgccaaaggggcgcatcaaccattttctcgccgtacgggaatacctacggctgcttgatcgcatgcgctacgaggccgagctgctgcgctacgagaactttgttgtcgattgtataactgtcgagccaacggtagacgatgatgttctggccgctcgcatccggctgcgcaatgcctacgaggacgcagtgtcacgcgtcgcgagagctcgccagaacagtgcgcccgagacgaccgacccttccgcgaccttgcgggatcgtctgatctctctcgtcccgcccatagacgtctggcccgtcgacccatggcgcggcatcgccctcgatcccctggtgaacgagagcgacctccccaaggatctgggtgacacgagcggaaggctcatgacaatctcgctcgaggctagcgaccagcagcgtcagagcgacccaccgactctgtcggtgctcgtcaagcaggtaaaaagcgccatggccgccattcgggaccgccacacgatggcgctcattcagcgagccctccttatcaagttgcgaactgccgccggcggcgagaaacaccggctgctcgtgtcgggcctcgcctttgccgcaggtacccccatgccgacctactttaggcgtgtctacgttgatccctacgtttaatgaaaaggatctgaatgtaaaagagagatagagaactctacacaaaacgaccctcgctattgacgccgctcgcgtcctaaacattactgggtagtcccaacaaaattcagattaatgcctcagactgacgaaaacctacacgcagcatcaggcgtggctttaaatagtcagcacctcgcaaagaaacacaacactttgcaccaacaccgagtcacagacagacgcctatgcaaggccctctgggcgagaccaacgaacgcccgtggctccacaacccgcgcaacaccgcaatcgtcaggcaccggacccgccaactcattgaggccggtggagacacctacgtgccgtcaagcgaggccaccaaatactttggcgtgacagccgcctgcctgcgcaagttggccgatcggggcaacctgcgcacgcgccgcatcggcgacaagggcaagcggctctaccactgcggcgacctcctctctcaaatccccgcagtcacgcgctccgacgatggacacacagtccagaccacgacgaggccaccccgcaagcgcatcgcctacgccagggtctccagcgagaagcagcggcccgacctcgagcgccaaatcgccgagctccgacgcctctgccccgaccacgagatcgtgtccgaagtggctagtggcctcaacttccggcgcaagggtctctgcgccattctggaccgatgcttcgcgggcctggtcgacgaggtcgccgtgctgcaccgagaccgactcgctcgctttgccacggagctgctggagcacttgtttaagcgccacgacgtccggctcgtggtggtcggccagggcgatccagctgcgaccgccactctcgacgccctcgatccacagcgcgagctggccgacgacctcatcgccgtcaccaccttctttgtggcgcgacagaatggcctccgctctgcggcgcatcgaagagcacgacgcgatcgagcagccctggaggaaggccgatcaagcacggcaggcgagccttctgaggaagaaagccaggaacgaggcggcagcgaggaaagcgaacgagatgagacagacggcggcggcggcagcagcagcagcaacaacgacgacgatgacggtggcgggaggcgaaaaaggcaaaggacgagtaggcggcagcggcggcggcggaggacggaagcagaagcggaagggaccacccgacgctgaggggggcggcgcgacacacgagcctagaaagggcagtggcggtggtgatggggcgggcgggctggtggctttcgacggtaagacgcggaagatatgcgtctttccaacggccgaacagaagacgctcctcaagcgctggatcggcactgtgcggtggacctacaaccagtgcgtcgccgccgtgcgcagacgacagtgtgcgccgaccaagaaggcactgcgcgctcgcttcgtgaccgagtctggcctgcgagaggcggaacggatcaaacgcgccaagagcggcggcggcggcggcggcgacgttggtatctcgtgggtgttcgagacgccccacgacctccgcgaccaggccgtgggccagttcgttacggcctataagaacgcggtccaggcacacgggcggggcaagttcgacatcgcgtttcgctcgaccaagcgcctgcagcaggagacggtggtcattcgctcgagggactggaaccggacccgaggcgagtacgcgccgatctttggcaacaccgtgcttcgctcgagcgagtcgctcccggtcaagatggaccacgagttccgggtcacgcgcaccaagctcgggcggtactacatctccataccggtgccactactggacgcgaagcatccgataaagcaacagcagcccctagggggtgtggtgggcgggggtgataaccaagcccccgccgtcgcgccacacgctgctgccgcgatcgatccgggcgtgcggacgcccttcacggtctatagccccgaggaggcgcgcgtctacgagctgggcgccaacgactttgggcgcatcaggcgactgtgccatcacctcgacgatctcgtcggccgcacgaccgaccgcgacgttagaaagaagcgacgccgccggatgcgtcgggccgctgcgcgtatgcgccggcgcatacgcgacctagtcgacgacctccatcgacgggcagccaagtggctgtgcgagacctttgagaccatcgtctacccgcactacgagaccagcaacatggtcgtcggggggagcaagcggcacaggctgcactccaagaccgtgcgcgcgatgctcacctggtcgcactttcggttcaagcagcacctgctccacaagatccgcgagtacccgggatgccgcgtggtgctggtcagtgagtcctacacgtccaagacatgtggcgcgtgtgggcggatcaaccgcggcctgggtaagagcaagctcttctggtgcgagcagtgcggcttccgcacggaccgggactggaacggcgcgcgcaacatctggctcaagttcctcacggaatggtgcaacgacagcagccacggcaacgacgatgacgacaaggagcagcagcagcagcaacaccattaagcgtccgaggcaaaggtggtgcgccaccgatcctccggactttggggcttacacccctccgccgagcgaaccaaaaacgctcggtggtgcatggatctggtgcagggacgaccgcggcatgcccgcgtaaagctttgtattaggttcaaatttaagcgctcctcttgatcagcttgttcatgctctcgttgaaacatgccacccgatcaccgccggtcggatcctggcagctgtagagcgcctggtgtgcgaccagcaggagctggcgcacgggtatctgggtgttgacgcgggcctgtgtgatggctgcgatctgttcgtccgtataggccctctcccccgtgtgacccttgaccgtctgcagcacggccttcatctcgccctcctccatgatgtcggtgagcccgatgaccgcgtcaaacacgtccgtcagaccgagcgcgctcatcgcctccaggtgactggtggtggccacgacgagcagccggttccgctttctggggtcggtgcccgacggcggctccttgcgcacgagtaccatcagcgcctgcaggatggcgttggaatactgctcgcccgagtagttgagaaagtgctcgatgtcgtccagcacgatcatggccgtttccgacttgtaggcatcgaggaaggcgtcgttgatcagctggtaccgcgagaactcgtcgtacgtcatgcagtccttgggcgcgagcaggcgcgtgaagtcgatgccgctcttgtcggccaggtcggcggccagggccgtcttgccagagccagccgagccgtggatgagcacagacacgagcttggcatcgccctcgcgggcctgctgcacgaaccgctcgatctcggctcgtcgcgtgcggtagttggcgcccgtgtcgatgatgccgtgcggctggtactcggccaagctcgtccgggacctgccaaaggccggcttcgtgcgctggacggccctgtcgaaatgccctctcgtgatcttgaccccggcgccgtcgatcctcccctccgtccggtggcgctcgatctcggacatgctcgcaaagccggcggcctggttcaccacgctgcgcagctcggctccggtgaagttgcgcgtggcctcggcgaccgtctccaggtggtcctcgagttcggcctctgtgcgcccggcctccctcatgcggcgggtatgcaccttgaggatgcccaagcgcgcggccctgtccgggaggccgacctcgatgtggatctcgagacgccctgggcggaggatcgccgggtccaggtcgtctttgcggttggtcatgccgatgacgagaaggttgtcgagcttctccgggccgtcgatcttggtgagcagcatgttcacgatcttctcctcgacgccactgccgcccggccgcattcctcgcctcgaggcgatcgagtcgatctcgtccatgatgaggatgtgcagcgggctctggtccccgagcgtgcgctgtgcggcgatggccggctcaaacagactggccaccgccttttcgctgtcgccgacgtgggactcgaagagctccgaggcgagcacgtgcaccggcttgacgtagttggggtcgctgggatcggtgaacaccatggtggccagcgccatggcgatctcggtcttaccgcaaccgggagggccgtacagcaggatgccccgagccgcgtggatgcccagctcccgccgcaccgagggaggtatgacccgcgaggcaaaggactcgcgcacgatctgcagctgctcgtccatgccggcgatgttgcacttctcctggaaggtgaagtcgggccggaaggcggccggcagtggcaccgaatccttggccctaccgccatgcaggtttgtgggaaccgcggcgtgttcgaggagttcgaacgcggatccatcgtaggcgatcaggtccacccgcgtgtcgccgggcaggaagcggccgtatacggtggcatcgtcaggcgccccgttcaagagtacctctctcacacggaacttgaacgggatgccgtcgtgtaccagcgacaagatctgtccctgcgaaaggtaactggtttcgacgagtttcgcgaacgcccggacgagtccggcctttctcacggcgggccgtttcgaaacgacgccggggagcaagtcaacctcgacgacgacgctggcgagcgtgctgtcgacctctgctcgcgtgcagatgaccgccgtaccaggagaagcgcgcagcgagtgtcgctgacattggttcatctcaatttggccacacggcactcgattcgaaccggcctcgacgacctcgaagacgaacagaccgccgacgcagacaaaggcatgctcgggcttgtcgtcgggccacagttcgcgaacgtcgcttctgttcaggtagacgacgttgggggtggtcgtgggcagtgccggcgagagatcgccggcggtaacatgtagcaatagagatcggtcggcagctgctgtggtcatgctgcgagggcgccgagtcgatgtgaccggatgcatttcttcctgttgtgtaaggttggtttatttcaaccggtagcttgctcccataagccaggccaagaaggccaatcgccaggttccgcaactgacgccgggttttattgcgcctcgtgttgatgagagataaacaggacccgtaggtcattggtatcttggcgacctattcgcgtgggatggcatcaaacgacgctacggccaagctcgtcctcctgcgccttcgccttgcccgtcgtcatgccgtttctttctttcgtctaaccgtttgtagtccttgttcttatgaaacagcaaaggcgatggaccttgaggactctcgggacgaatccggaatatgagctggacgcattgcgggcctccaacgtttgcatagctggggctgtaggcgagttcgtagcccgaaacgtcgaaaatgtcaagcatcaactggatgccctctgtccacctctcggccgcaacatacgccaagcgaaagagggatggatagtggtgtgcagggatggaattgatagcccacggatcatagcagttcttgggctcaacgctgagccatgcgatcaggggagagcatggtttcgggccactatcattttgctgctgctgctgtaccacttcgatgtgtttctcgagcgatggcatgcagaagaaagaagcttctctactgagtctctccctctccattgtactcattgccattagctcattgctgatatccgagtcgcggagaaactgtagcacatagcgaaagaggccgccgtcgcgatcgatgaatacccggccgtccctctccctcggtgttacgcaatggaggttgtcgtcgctgaacatccttgacaacatcgactcgcggctcaatagagtgctccgtgacgtggtgtacttggacccaccgacgttgagatcgatcacctgcatcgtttggtcgtgtcgcacggcggtagagcgagagcgagagcgagagcgagagagagagagagaaagagaaagagacttgctcaaacaagactacgaagcgaaaacggaccgaaattagtgccggtcagaatttgaaactgttgcaacaaaaaggaaaaaccctttgtgagctcacttgacgtttaaaaggtaaaaataccctggccaccggtatataaataccgctcattctcacaccggcaccaacaccagacagaatcacacacacacacagagagaatggcaacacaccaccaaaaactctccctacttgccaagcagcgtgtcgccgttgcgtgggccctcaaagagcggcgccttgcggaggacgtgcgcgtccgcgttccccaataccgctccaggcgtcccgccagcctcctgtggagctccgccttcagcgcatcactcctgggccgcagcgcagtggaacacgttgaccacaacctgctcgactacggtatcacgcagctacccctctcttgcgacaggctgcagcgccttctcgaacccgtcatcacccaagcccccggcagcggcggcggccgggagatccctgaagaggaaccggcatctatgggcaggagcgttgaagagctccaggagaagcctagggaagtgcagatgtcggacgtggcccacccgtctgttcccgaggccccaatgccgaccgaacacaagaagcggagctccaggaccatggtcgtcgaagactcggacgaggaggacgtcacgacatgcctcaagagacggagatacgcggtcaatgaccgctggctcccacgtgggtcccttgacgtactctggtagtcgtatatgaaaacataaaggcttaaaaaatcaaacggcgggcgttagttttgtttcactctgatcgatataaaccgggcgacccgcgtggacgattacgctctcttcatacacaggaggctggccggagcagtgacgctgatcccactgaagccgaagctccacgagttggcgctgttggtgtgaagaggagggcatttgaaacaacaaaaaacaatgccaacccgccattcgtttcagatgcgccatggagaattctcgaaggcaatcaacacattacacacttgacgcttgaataaaacactaggcgtcctccgtcagggaaggccacagatgccaaaatcacccgtggcgccctccccagttctggccacatgaccatgaccagtctttcggatgcgtttgggtccggttatggcccccagtatttcacgatacgaagcagaacacacggcaatgatatttgcaggtgcatggcgaggataaaagagttcagtaggggcgtgttggactgggacaacgccgcctactcccaatcctatccgaacgtcgagatacgcgtgcccgtgctcgcagctgacaaggtggatgccttggaacaccagctgagaccctacctgttatgcattgaccagatcggaggcgcccaccccaacttcccgcctgcttgccagaacacacgttaacctccagccactcgagcagctcccaataaaagggggtcccatctccttcgggtgtacgaccgcctactccacgacacgctcgacgaaacgcagagacaaatggtattgtcgctgagctctctgcgggtagagcgaggagtcatgaaaatgctggacgccgctatggtggtcccagaaaacgtcggttagagtggaatcaaacgcaatacatgctttatttctttgcaaagaaatggggttttcagagctctagtcggcgccgactggattgaaacgcctgggtttcgggtttcgggcgtctcgtggcggtgccttgtgctttggcgattcggtatatcagcttgatgttctccggagaagaggcacggacgagcctgtcgctggaagggtgtacgcggggtggggtactcgcagtagtaacgctgggagtgctggtggtggtagccgattcgtgatagcgagtggactgcatgcggtactgttgtttagtagggtggttgttaagctgtgtgcttgtgtgggaggaaaatatggaactctactgtctcctttatatatgagacttttgttgtcccatgtgagctcgcatcaaccctttttccgtggtagtccacgtgggagaacgtttagaaacaggaggacgattcatacgcacgcaggcacgcttgctgtaaaagtcagcgtgggcccactccatcccctgtaaagccccccccctgcccttaactctctacctccaatgaaacgtgcgcgtctctcatcccaaatatagatggggtctcgtgggttaaatacccgcctctctttcgcattcatccgtattgttttttaaccctaaggacctctatccccatacatacggcaacaaacgccatccataaatgaaggcctgcgctaccacaaacccgtattcgtttgaccagatctctggtgttgtgtcggggccgccaaagtgcgctgtctgtacacgccgttgtcatgtccaccaattgccactggccggcgagaccgctcagctctttgcctgctgtatcgcctgcgagagcagatggacggccgtccccacaccggcgtctctcgcccaagcagcaccaccgcgagcgccaacactcgccgtcaggcgaggcaagaaccaacgtgtggccgctcccattcgcgcgcgcatcaccagcgtccaacaggggttgaagacgacaccgcagctggctgcccagctccggtcggccgcttgtttcgtcgtcatcgacaccaacgcctggatcgacgcaccggacgcgattctgtcgctcaagcactaccccaacctcaccgtgatcgtgccatcggccgtcatacaggagcttgacgggttgaagcaggacacgggcaaggaccagctctccggtcgggcccgtctggcgatcaaggttatctacgacgccacctccaatggagagcggtggataagaggccagcgttacgacgagcacctcgggtcggcgatcaggatcgcgaaccgggacgacgagatcctctcgtgtgcgctcttcttccacgccaaggtctcgcccagcgtgctcatcaccggcgattatggactcgcgctgaagtgcaacgtaaacggcgtgcccacgacggacatgcgggggctactggagagcctgccggcaacgacgatgcgcacctcggtgccctatgtccaccctgaccacgagcgcatgggtgcggtcgtgccgccgccgtataagagacagaagaccacaaacgacatacctggtctgagcttcacctccgtcgcaaccaccaacaccaaccgcattgcagtaccggtgtcggtgccggtagtgcctcctttgttggaaacagggctgttggcgctccccttggatctgcagatcaaggtggcatgcctgctcactccccgtgcactccttcaggccgaagcgacagccaagggtctacgccgcctgatctcgccagacggggacgacgaggagcgaggggtgtcgacaagcgtccgtatatggagagccgtccttgagcgctcccatggacgcaggcactttggtcgcttcggccatcccaaggagtggtatctggcctggagacgcggtgttgttccgcctcgcgatagatgaaaggcaatgaaattggcatctttttttgtatgtccgaacgtacaggtgctgggaaaagttgggcgaggacaagaaagtaaatgatcactttcgatctattgcccgaggaggtaatcgtcgatatcggcatcttgctcgatctgaaaagcgcaacggcgtcggcacgtacttgccacaggctggcccatgccctgtgttccgacgtcgtgtggagcgccaggatagggcgaatcgagccaacgctgctttccaggcccggtgttagggccgtcgtgagcaacctggcaagggccgctgcggaatggcgacaggtaagcgagagcgtggcccgatggctgccgggctttgctgtcggactccacccagccccattggacgaggatcgctggggagtgttgtgccgcggccctggctctgaaaagggacgtgactggacacacgccctccgggacctgaaacgccaggtggtagagctgcgtgcagatgcgcccgacagagtgcaccgggtcgattcggtgctctttgttccggggtgcgcgagcgtcctcaggtacgccgaggccatgatgacggactggatgctctacgcgggaacgtggagcctcgcgccattgggctggtacgccgattatcagtgcggcgacggccagagtcggtggaaggaggaggacattcgcgacgtggccagatccatggccatcatggccaggacgagcgctcacaacggcataaccatgtacgccccgctgtttcatcgccgcaacccgtacgtcgtggagctggtgccttgctacccaaagctgcatcgggtcatgcttgcgctacgccaagagtctagcagctcccaataaaaggggaagattcccaaaacgggacgcgccgcaaaactggacgtaccgtgttcggctgtaaaattggagcgttccgcacgaggacggtggcacgtgtgttcggctaaacggcaatcttacacgatgggataacgccataacgccataacgttttctatgactggctcaaacacgccagttttcatggctttcatggctcgcccttaaggtggctggtggttcggaacggaaggggtgtttgtaaaactctgaccccgccgcctgccacaaatcctccaacgacattccccgaccagataagaagagccccggcgttgcccccccccctcccgccagcacttgtctaccccaggcgttgttttggtttgtaagagagaggagagatgacccagagataggtttcttatttggcctcggcgtcggtccacgttttagttgggaacagacgctgcttgaggtcgtccggcaggtgggacggaggtcccgagtagtgacagcacggcacggccgaggtgccggtagctagcttgcgcgaaaagcatttttgccgtacgccgtcgggactgacgtggaaccagacgttgttgctggtgtgctcgtcgcccttgttggcacaccatctgcccctggagacggcggcgtagaatctgccgtcggcatcgcgcgtgacccgtgccagctcgcagttgtgtttgcccccaggcatggcccggatgatggcctccagctgggtcgtgacgccgtcgagcgaggcgtccagtggccgcatccgtccgtggtaggttgaacgccgacacagacccagttcgctgttcgtcagacccatgaggcccgcgatggccttggtcgagcgcgtgccgctcttgccgccggcagctcgcgcgctagcgttcttggctgcctgggtagagtcgagctcttccgggaccggctccaccggtatccagcggggtcgggtcagtctggctcgaacaaacgtcgtgcggcgaagcatgcaatcggcaaacagcctgacaaagtcggcacgcagggcctcgctctcgatgtccagacgctcaggtagcctgtcctgctccttgcgcgagatgcgctcgcagagttctgtatcggacagcccgtcctcgtcctcgtcctcttcaacttcatcttcatcttcatcttcttccgcgtactcctgctcgccctgttcttcttcttcttcttccttttcgacaaagaggggcgccaaactcagcattcgcgcctcctcccgtgacccgagttggccatcgccgcccagtatcgtgtcgaggctgtagatgcgaccaatgtcgaccttgccgatctccatgcaccacgaacagaacagttgaggaggcggcttgggtgtgggggaggtcttcttgacggcgtcgacatctgccgggtcgcgccgtcgacggatcttggggggcttggacttgcccttgcaggccgggcacctgtctgttttacgggagcctaccatgcggaggccattgggcttgtagatggtggtgtcgagcacgtcggcccagctgttgtgcgccggtctcgcgccaaagcgctgcgtgatgcggatgagaaacccgcgacggatgaacagcgcgctctcctcgtccgtgtggatatcgggccagacaaagtgaatgcccaccttggccatgagcacgccgcagaccgacttcatgcagaccggcgccgtgaggacgagtactcggcgggtccatgcgtctgtgcgcggatagcactcggtcatcacctcctggagcagccggccgtaggcgacgatctgggccatggacggcacctcgggctcgtacatgtcaaagtccacgatcatcgggaagagcctggccatgcgtcgttccaccacgtacagcggcacgtcgttggcaacgtcgatcgcgtagttggcacagaattcgggcaaaagcacctcgggcacgtagagcaggccgccattgagcagcaggtgtgactcggtggcggcgtccctgtccttgtacgtgcgaaagactcggtagggcacggtctttcgttcgactccatccaggcacatgcgatccactgcctcgggg

SEQ ID NO: 260 - DNA, 21767 bp, unidentified
  variation 21349..21767: note = n is a, c, g, or t
  variation 17934..18548: note = n is a, c, g, or t
  variation 9606: note = n is a, c, g, or t
  misc_feature 1..21767: note = Fanzor polypeptide
  source 1..21767: mol_type = other DNA
acacagacaacgggttcaaccgtcacctgctcaactcctgtgttgctttgttgctcagttgctttattgctttattgctatattgctcagctactttgttgcttagctactcagctaactcactcaagactccttatatggataaacatgattttgctaattaaggtaatgataggttggagaccggaatgggttcaaggaaaccgaaatattcaacctataaatggttatttatccgatatgcggatatatcgagtttctttaagatcatttaaaataaaaaacaagattttgatcttttcccaattggcgggcgactatgagaagccacgactgattgggcgcggtaccgttctgttgctggcacaaaacgctgcttgtggaccggtctggcacgaggaaaaaaaaacaagtcgttgctatatatgcaagcacagcttacagggtttaagaggcatagggaagcagttcactcaataaagaagatgggctgcatatgacactggcctggcaaggacctggaaaatcaagcagaacagtgaccaaaaactcgaacaagtcaagtttaggtattctcaatatatgagactcgaaacattagaacatttctttgaattctcttatgctgtagttcgaacacaaagaatgagtgactatgaaataataagtttacaccgtttagcatttaaaatgtcagctccgctgcctggcgggtcaaacgtttggtctttttataccgttgtgcttcgcacaaggctttcctaaagggaaaccgtgaaaatcatggttttgtgatgccgacactgagagatacaatgtatcagttttaagrtcataaagacctatacattggttgttcaccaaatgtaaatggtttgtcgttaaccaggaagggaaaacatctagttctaattataaatgttaagaagtctttaagtagtttatttgacccgccaggcagcggagctgacattttatatgctaaacagtttaaaatttagatgtgcggtaagaaaaaacattaagagaatagtaaatgaataaattaatttacagcaaactaatgaaatttcagcataaatatatcaaaccatcatatccaaaaacaattccaaaggcagaaaaaaatatagaattaaaacaataaaataaattacctttgaaattggttaatagagtaccaagtgacgaagcggattggaaaaaaaaaatggatattgaagttcaatggttggctacggtacatcctaggatttcaatacaaaggagaggaaattcataaaaacgatttgaaagaattctttgaaagatactttacatacggagtcaatgtcgattttaataatgaagaattaataaagccaaaaaatataatactttcgagtccattttatcatgaatttgagtacattgacggtgattatgttgttgatacgacaaatttaatgactctagagcataaaacaaattgtaaaaagctaggaagcaagattaaaatagatggagaaacatttgaaccggattgtgatgaagacacatggaaagatatactgataggcataatactcaaatttacagttagagaccacgcatggttatgtcatgtttaagtggctcaaaatttcgcaacagcagtccgaacatgtttatctgaagacaatcctttaaaagaaagtctttgggattttgtatatggtgcaatagcattgaataagtacgctattccaactttatttgatgaaaaaaatggattttttacattatcattaccatatacaaatcaagggattaaagaaatgacaataaaagcttctaaagcatacgagtcaggttggaaagcaaaggtgtttaatcccaaagaatcagatataacaattgaaaatgatttgaaaaagatacaagatgtcttgagaaattttgtctataaaaaagtacaagaaagcagcagtatctatcaaaatgagtttgaaaatcttcttaacacaatgaacattttaacaggctgggaatcagacgatttggtagatgcaataacaaagtgtttgtatacaacatcatgtttgcatgaattatggggaaacaaaggatatatgtacatttttaatttgggtttaagtagattaaaaaatgggaacatttttgaaaattcatatttcataatatgtgtattgatgttgaacacatcaacaaaagctagaaaaatttatgattataaagacaaggagttggtaaataatttgaaagcattaaacatacctgatgagataggaagaatttgcccggcaactcttgatacagctgttcaaatgtagaaataaaaacgtttgctctcaatgagttggaattgtgtctttaacttttaatttcatttgttttctttttcatctatgaagaaagacattcaacagagaatcatatttacgatatgaaaggttttagcagttatttgattgtacttttttaaactttacttttttataacaatcaaagattaaacaggacaataaacatttacttcactcaaaaaacattaatttattatttaggactcattgacatcattgcgatcgcttaagtgcggctgatggttcccattaggaagcttttattcacaggaaggcagctaggtgctccgcacgtacctgccaaatgcagctaggcccatagggcgtacaatctaggcaaatatacatcagggagtattacaaagagaagaatttttgtcaccggattggttgttcctaattaagatggaacaaccaagactatagttgttcgttaggatttgcaattggagacgctccaactgtcgtcattgcgaagcaaaagcaagagtcttcaagaataaagattgatgtaatggaaaatatgtagaaaaatatttcaaaacatttgatactatttttatcccatttgtataataactaaaataaaatgaaaagaaaaatacaagcctcctgagtcaaaacttttacagggaaaacgctatccttataatatgtgccgctactttaaacctaataatacctgtccacataattgtggactagtatctctcaatgtatcatcgaagccatatcaactttgcatagtttttatcctagtacaaagcaacacatcttctccacactgctaggttatgcatgaagggcctagaacctctccaaggccgtagcgtagcaatgttggagttaccttccacactccaacgcattcttgatgaagatatttctggctccacaaacatctcgatcaacttttaaatggcaatggtcacaattgtagacttttgatcctcctaagttctctttcatcatcaagcaatgtgtacatgtcttggaagtgtattcctcaccacgttcatacacatttacaccatattgtaaagccttttctttcagacgttgcttaaactcataatggcgccaagtcagcatgctccgcacacttttcttattaagcttgcgttcatctttcttcaccatttgactcacattgaaaggaggaatgatgatgttgctaaaattcttgagcaagaaagtaatcgctttacaatgaacttctgtcacaaggtttttgatcttcattttaagtctggtcatagatttctctttccttgttttcttaattgtcttcatgccaattaatttgtcgagatgtttacaaagccggaatatttttgaaatgtcttgatcaccaatcttatagcactcacccaaagtggggctatagattgtaagcatggtcctgacaccaggatcgatggcacaccactcctttttattgcagcttgcttggttctcacaagctggctcataaaatggtatggctaggtagaaacgacctagtttatcaagtaccagcttacaatcgttctcaatattgggaatattgcatctattttttcgaacatgaaacttgatcttgtttttgagataagtaggatacatgctaaaatcaccattttgtttatcatcacgtagtacaaatcctttgattacacttgatggaatggttatgctctgtgtatctttttttgatcgaaactttaggtcaaatgtgtgcgatggatttaattttctctttgcaaaattagatttatatgcttcagttagatctttgatagcagtgtcacgcacatgtttaggtgtatcaagcaagaagcctttttcttttgggatgttgcaactattgatgaatctttttctcaaggaaatcatatttgtgcatttatggacataaggtttcttcttgacacattcaagagtccagttataagtgactctcacgcttccaaaccatttttttaattgatttactagttccaaagatggagtaatttttatttttttgcatttattcgctggcaatttcttcctctgactgacttttccttttttctttgtatttcctttttccgttgatcctgcaattgaatacgttgatgatggccaagaggtcttcaacaagctctccatgttctgagccttccatttcttgatggagaaccatgatttggactccatggagctgaaagatcctttccaccagttcgaatgcaaatcggctgatcctgtcacggaaggcagccacaacggtgcctccggtgagaaggcctttgcttgacaattccagaatggtttgcaatccttttcgtttgaaattgaggcctgatccgatgtcggagatgatttggtagccggggaatttttcttgcatgtattggatttgtctctggaggtcgtctttttggctatgggaagagactcgacagtagcagatgtttttttgctggggttcttggtattgtttgtttggaggtattttttgatgcagtagagcctttggtttccaggagttcggatggaggggaagactcttttgtcggcccatcttctgagagtttcttcggagaccccgagggcggctttagcttctttggtggtgatgaactcatgcatgttattactatatataaccttgtcatatctctttaagtagttttcattgatttgagatataaaaagttttgataagaaatgacaagggatttaaagaacagttactaaccctgtataatctggaataaaccaggggctgtcacgattttctaaaaacacccaaagatatacgaaaacatactatttttgagcttttcaaaaaagggtcaggccctttaaaaaggattgggtaaaccaatccttgcactgtgattttgcagcatctgtaccagctacacttccaaaacctgcgcaatgtgcggaaaactaaatgatatagtgagacttagaagtgcaactgtcaaaagaacacttggaatagagatataaatggtgcacgaaacattttgatgaaaggaatttctgtctccggattgttctgaagaaggacatttagagactctacgtgtgtgcttgcacccatgtagttgttcgttaggacttgcagttggagacgctccaactgtcgccatagcgaagcacaactcaagaatgaggagtgtcctccaaacaggactctccattatatggagattagtactctaccgaatgtttcaaagcgtgtgtaaattgtggattgcgtcattagattgtacttttcttccctttaaaacgcactgcgccgttaaaaatttgaaatcaaaataaattacaaaaaaactcttaacctaaccggcttgaatatataagatgaatatgaaccaccagttgtcggagctatgcgaaagcgttttacacaagtctggcaaagttttgtcattgaatcagcaggatgtccataagtacaagtgcacacgaatacctgtgtacaagtacggctttagaaaaaagtacaagtactatttacccttgcccggtgaaaattattgcctaatgataacggataaatccatactcaatggagaattaaagtatcacggcaaggcgttgaagaagcttgtgacggatggaaaagaaattgaagactattaccatatatgattgcatattgttaatagccaatgttgcaacccatttcatggacaaggttaggcacaccaagtatgttgatgagtgggacactgacatcatgcaaaaatacgctgcatcaagagcatgcttggacaagattgtttcgtaagcgctataaagaatgcaattatgaagtttttaaagacttaaataattatagaccacggttgcagcgatttgttgttttgttcaggaaaaaagagtacaatttttatgcacaagagattcagaaatctacgaaaaaatgtcaaaagacggaacaaaagatgatcaatgattttttatctctttacaataaaaggaaaacatattaatttttatttctaattattactttttattgtttttactatacattttgtacaatatcaatgagtattttcaaagaattttaatcttcatacagtaaaaggaaaacatattacttttaattttaataactccttattttcttttagggactctagaatgctgtctctgggccttaggaggtgtgcagctgtggtctgaggatgtagtttttgtgtcgcacactttcaatgctacttggtaagaagagggaatggaccagcacactcattgtggttcttcatgtggccaacacacttcactttggttcttcacttgaaaggagaaggaggtgctggcagcttgcaggcgacaaaactgagctaattattactcttattgtttttactatacattttgtataataccaatgagtattttcaaagaatttttaatctctttacaataaaaggaaaacatattaccttttatttctaattattactttttattgtttttattatgcattttgtataataccaatgagtattttcaaagaatttttcatctcctaacaataaaaggaaaacatattacttttttattgtttttactatacattttgtataatacactctcaaaattttgaataagtagttattaatcatcattgtatatgtttttatagtgtacattgaaatactagcaatttgaatggcaagggtttaaaaatttatcttattacttttcatttctttttattactttttgtgttaaatacacaacttaaagatacgttgtttagattatggaagaaaatgacacgattgtatgttccatacacatgtccacggtgcggttatacaacaaacatgaagccaaatatgagaaaacacttgtttttgagtaaaaaaatgtgtgcaacaaaaatatcgccaattgaattaacagaagaaattaaagaacacatcattaattatagagtttatcacatggttcagaacaatagtcaacaaaatagaaatcagacacaaaacaataatgtcacaattaattataacccaatcaacacatttgtttcaaacatgaattttggatcaaagttagataattatttacaatataatattaaaggattgacaaattttgaagaaagtgttgaatctcgttataatgagaatttatgcaaattagaaaattgaaaacatatgaatacaaattttatgcttggtcatgaagatttatttcaaatttttgatgaaattagtaaagcacatgacaaaacagagctaaatcttttttatgactctgaaatgaaccgtattaatatatacgatgatggatgctgggaggaaatgctattagtaaaaggaattaaacgaatgatggatgtaattcaaggatattatttgaatgcatatgaatgttatttgattcgatgtttatttggcgataattattcttgtgtaatgaaaaacaaaattcgtgaacatttgattgaatattatgaattcattgcagcttttgatattgatccatatatcatccataaacctgacaatgaaatcttatttaattcggatgatgatcgttttttttgcaatgataaaatttacaatattgaagaagcattgtttcctatgtacaaaaacattaaatctaaagtatcacgagcaaatgtagacaggaaaaagaaagaggtcttagatattttgaaacgaaattctaagaggagtttacatgaattgaataaaaatataatggatttaattcgtgttgatgaagaatttgtaaaacaaattggatacatgtaaataaaatactaggcttcgcagtgatatttatggcatcgccgtgctgcttgtttgataattgaacacacctccattatgaataactaatgcatacaatttcatgaaaattttagtgtttcatttctacttaacttgggtacatagtgatccaaaatatacatcagggagttatacatatgctcttttagggaataatttttgtctccaatggaataaccaaaataataataaccacatacttatttgcatcaggaaaccagcagcattctgccataaaaaaaaaaagatctataagacagcataagcagctgcggggacagaaacagttaggagggtccttggtaggtgcagtgcagacgcagcacagagataggcgcagttacaggtgcagtgaggctggtgaagggatacatgtgcatctttgcaccagcttctttgtgttataaacttctgttaatgctggatccttgattgcaaataggcatcacaggagggttgatacagcaaacgcgccctgttatgaacaacacaagggtatcaacatgctgctgtttgctattgctatgcaactgcaatagttattcgttaggacttacaaatttgatactatgtaaaggacttgaaggcaaaagctgcgcaactcaatattcttcaggactttgagtttcatctgcgagaagcacaacaaagcaagacactttaactttattgagtgttaactcttcttctctttaccttgcacaatctgccgtgttgttatacgtcattgccctaacaacacaaacaaacaaaacatgctaaggcaatccaaagagcaaagttttcattgactataagccaaaggccgagcacaaggcctgctagccagctaaaagctggtagcatcgcctggttagggaaaggaagagttgaaagttaaacataaggatgttcccgaagggagcttcgcgttccttgctgcgcaaactcacttcaatcataacataagtcaaaaaccctatcaggagagcagctgctcaagatgtcttggatctaaattccaagtttcatttatttacaatttatttattacaatgtgttattacacacagcgtggggtaactatccccaactgctgctcagcttggtagcctcttggacgctgcaattgtaggccaaaacgatccaaggcaatttggtgtcccgaggttgttgggggtccacgatcaaatgcttgcgcaacgcctgcttgatggtttgcaccgccctatcggccaacccgttattacacacggcagtattacaattcatttatttacaatttgtttacttcaaaaagatactaagttgagaaacgttttttgtatttttcaaatatttctaaaaaagttaaattgccttttaaaaaaggaaaacacattatttttaatttctaattattactttttattatttttgctttacaatttgttacttcaaaaaagatactaagttgagaaacgttttttgtattngaatgataatgtccgatggtcgtagggccatgaggtcattgaaaaacgcctcagctgcaatctggcgatgtactcaggctcatggtctatgacgattaggcatgaggatgccattgactgttgttaaaattagtaaccccatgaattgccttgctaactcaagtcaaatagtatctacctaacttatctttgcttagcttacaatcgttttcaggaaggccacaacagttttttcattcattgtactttttttaaaatctattttttttgatacatcacagttttacattgtttctgtttaatgagatatatatatttttaagcttacatgtgatattcgtcattttcaaaatttctaacaaaattaaattacttaaggatatactttattaagaatataagaaatggaagaaaatgaaacgcctcaaaaaatcaccatccgagaagctgccaaactcttcaccgtgcacccacaaaccatcasagaatggacagatgcargaagaatcccatttgaacgtacgctcacaggacaaagaagaatactcttgtacaaaaatccaacccaagaaaaaagcaccaacgaaaagttcaaagccatctactgcagggtctcaagcaacaaacaaaaagatgaccttgaacgacaagtcaagtccatgcaagaaaaattcccgaaccacagggtctatacagacatcggatccggtatcaacttccagcgaaaaaactttctctcccttttggacgcatcactgtcaggatctttgtcagaagttgtggtcttctcaagggatcggatgctgctgttcggattcgagttgtgtcaatggctattcatgcgccaaggaaccaagcttatcgtcttggagcaaacggatcaatcaccagaagaagaactgtgttccgacgtcttatccatcattcacgttttcagctgccggagaaatggctcaagacgttaccattcacaaagcgcataaagtcaagctttgtccgacaaagcgacaaagacaagctttgagaaattgggcagcaggatacagattaagttataataaggcattagatttcaaaaaagaaaatacaaagttaagcaaatttgatttgcggactttaattgtgacaaagaaacaaaatagcaagtccaaaacacgattgtttggtgaacacaatattaatccgattttccaaaaacacccttggctttccaaagttcccaaagatatacgacaacaagctgtttttgagyttttcaaaaattggagacaagaaaaaggaaacgtcagctataaagatagactaaaakacacatcaaytataagtttaraaaaagaacatgtcaaagttttggataatggtaagattcgattatattcagggaaattaaaaaataccttacgtacatttggtaaaatgcccaaatcactgttaccatccgagtttgaggacgaagttaaaccaccttgccaggttttgttacaacgacaaggtcgttcttattatatgattttcccgataaaagaagaggwgaaagytgtwcctacaayttacaaaggacacatggtaggtgtagatccagggatcaggacttttcaaacatgttatggtacagatggtaaagttgctttcttgggaaatagaaaccctatgagaaaatttgcaaggacacaatggtacctagatttattaaatattcagataaacaatctagcagkaatgaataggaaaaaatctaagaaaaaacgaattaaagtccaacaacgyttagaaaatataagaaaagatttccrtcataaatcarcaaaatggcttactgataattataaggcaatcattatcggaaaattaccaaaaggtataatttcaagagacaggtcccttcctaaatcagtgaagagggcattcaacarcttgggtcattacaagtttcgttgctgtctcaaagataaatgtcaaagaagaggagtagtgtaccatgaaataaatgagagctacacttctaaaacgtgtactatgtgtggtaagcttaacgatattggaagtagtgaagtttaccattgtaattgccaaaagaacacttggaatagagatataaatggtgcacgaaacattttgatgaaaggaatttctgagagctacctccggattggttgttcctaattaagatggaacaaccaagacgctatctttagagacgccacgtgtgtgcttgcatccacatggttgttcgctaggactcaatattcttcaagaaattgaggactactaaagattgatgtagcggacattgtttatctacttttttcatcatatatatcatacaaggtaggtaggtaatcttgcgggaaacattgtatgtcatagaccacactatcttctttgaaatttattcgaggtgtttttgctcatcgacccatgcgtgataaaaagagtgttcaaaagatcattttgggtttaatacaactttcattaattttccttgaaaatctggacaatacttttgatagacgtcttgtttgttttgtattggtcaggtggcttgttcatattcatattaaataaattaagtattaaatcaaatttaaagtgtatatttataattttcttagataaaccaacattttaaatctccaagggttaaaaaatgtattttaaatgctaaacggtgtaaacacacattctatctatctatttttaatccacatttctcacaattgaactcaattcttttaaaccttccattgattcaagatgaccgcaagggccacaagttttggtggtgtagtgttcgttaacaaagtttagattacaatgcttggttcgcataataacccaacctgtcttttaaccgttcattctgccaacaaggctcccagggcctccsgatagcatctccctcttaagcacataaaaaagggcttttaactgcaaacaacaccattataaagttagcctgatcgcatgtttacctcagttttttttttcaaattcaaaacaaagaaaaaatttgaaaatatataataaaatagatttgatttggtaagaaaaaattgataaattaagaaatgaaaaatattccagaattttgttctgtcattcgtaaaaaatatattcctggatatttcactgtaaataaaaatgcatgtgggcgaagrtatcttatagcatttgaaaaagcgtcaaaagcaaaaagtatgaaaaaccttatttttgaaatgaacacayatatgaataagcatccaaaatatatcaaacccatagaaccttygataattgaaactttatatttcgaaaaactccatcttgtttgtaaaacatctggtttagatatcttgttatttagagattgtgtaaaagattgtacattatttaatgcattttctgaaaatgaagatataaaccaagaaattcaaaaaaatgaaaatagatttgtatttcaaaatgatatgataaatgatgcacgttattttttagaggaattgtacaaattttgaagtaaatatgagataataataaacaaatgtaatattgaaaaacactgtcaatttcgagtttatttggcacaaacggcatggaacaggcacaagtagacagagtacgtgtaccctgcgcrgtagtgtacaggttggtgcaggaactgttattggtcagttggttgggcgtattacactgcagattgataccattatggcgatgcggtgatacatttagattgcagcttgaacagcttcagcagggatttacaacgagttttgcaagtgtttttgccatcactttgtttttttatttagtgtgtcatatttttttaatacatttgattttcataataaagatcaaacaaaatttttttctatttgttcaagtgattgcctcatctcaagtcaacaatttaaaacaaaaaaaaatattttgatccttctttgatattccatattgataataaaaaatatttttttctctattgaagtattgcattgaatagtgataacacaattttttgctatggtatttctcaatgattactcatcttmattattaattagaaaacacaataggaaaggtttttggaaaagagacatacattaaaatttttctaacattacaatattatgttaaaacttgaacaaaaattgacaaaagagcaatgtgaagactttttaagaaatatgacagtaaatcctttaacaggatataagatagatcctgaaaaaaaactttctcagaacattaaaaagatatgcttgacaaaaataaatgaackaaacaataacagtgaagtaaagaaagatggwaagaataaagataaaaagatgaagagtaaaaataatgaaggtaagaacaatgaggaaaagatgaagagtaaaaacattgatggaaaaaacaatgaggaaaagatgaagattaaaaacagtgatggtaaaaacaaagatgaaaagatgaagagtataaacagtgatggtaagactaaagatgaaaagatgaagagtaaaaataaagaaggtaagaacaatgatgaaaagatgaagagtacaaacagtgatggtaagaccgaatatgaaaggatgaagagtgaaaataatgaaggtaagaacaatgaggaagagatgaacagtaaaaatgaacattataaggatttaggatgtgatatgcacaataaaatcgcatatcatttaaacgatccaagaaaggcatttgaattaattaaatattcctatggtagattttcaaaaaaggatatttcgaaagaagtgacacagcagtttattaaaaaaatggtttatggaaagcgtgttgtgaagtgttaagaaaaggagaacccaaacaattggatgttgtctttgatggaaaacgtgaagtcggtgatcttacaaagattgaattacaaaataataatggactattaattgattgttcaattagtagattagtttgcaacattatttttaaacccggagctacgaacgatgagaagaaatttatccaactattaaaattgttgtttgatgatgtaatatatgctgcggaagacaatgtaaaacaaaaagacattgaacatttcataaaaattcttgatttgtggaaaaaaactttagggacttttgctccatctctaaatggattyttacacccgtcaaactcatattttgcaacaagcgcaaaaccaacctctgtatttggaaatcaattactaaaatgcatatcggtcatcactaagagtacttttatggcaatgagaagtttagttcttcttacaagagagagtgatgattttaatcttgaaaataaggaaaaaattgtaagcatttataaaaacatttttcacgtaatawacattccttctatgtatgtaattgactatgattcaaaatttgaaaaagatgaaagatgcaacttaaattcatatttagccygattggaataactagcaatgaactaagcwggcaatttttcaaaatagagtatttttawttttgttttcttgtttcatgatccgctacrtcaatctttagttttgaagactcttgattttgctttgctagacagcctaattcacactggcttgatgcagcaagctaaacccgcgaagcaaagtgycgttcaagagttaccagcaatggtgacgcgaagctccctccrggtctgtaattccggatttttyggttttacgagtctgaggttagacacataacgattaaaattaggactgtacaggaaaagctcaaacaacgtacttacttgtttcttgctcagctggctcttgcttctgctgtgctgctgtaatcttcttatttgccactgctgctgcagkttgcttgtcactgtggttgaataaaattactataaaacatgctttttttttyyymmcccmawycmwwmccskksmrgkkkyyksyymrsmaaammrscccmrggrarsmmcaaaaaaaagaggatttcttgcaagcaaacgccgctgacttgtcttatcagactgtttttcttttttttttgcggytrctaaagtggtgctgccgtgagtgcaagttgacaatttaatgatgaatttctaatggattgttttgattaattgttacataattataccagcgctgccattagtacaagctgataggttaaaaagaaagatcctagtttgacccgagctgactaacggggcctgaaaggagcttcgcttccgaaggaaagctctgctgccttcgggtcatgtattaaagataagccaaaggagtaagtaaatgacaggaagcgtttaatcaacaaatgtaacagaacaaaaaatactccaaaagaaatcaaagagtgacctagctcaagcatacacgaacaactttgcaattaaaaagaaaaatctacatttgatataaagtttaggaggataacctgttgggrtatcaaaatggtatcaaacaatgggatcaaaaaataaagatacaraaacaagattaatttccacatcaggaaaaatcaaagccttcctaaacaattagagaatgattgtaaattgactaaagataatttaggacgtgaccatcgtttatcaccaagtagcctgtgataaccaaacaggcccaaaaagtaatgaatggtttggtttgggraccaatccccaatcaatagaccctggagtaacaacaatgttaactatttatagcaattcaaatggactagaggggagaatgacatgataaggatatttaggctttgtaaatgtttaracaaacttatatctagggctaattgtataaaacgcaagttcaraagaaagatgtataaatctcatcgttagtcgtacmaagacgacattcgagacstttgtgctgcgagttcatyaaaaatgtgagccaagtcaattagactaggcgatgctaccagctttcagctggctagcaggccctrtgctcggcctttggcttgtctttaaatggacccgcakggaactccgtraaaagctttgctgcctatcgggtcgcggaaataggattattaaactatcacgcttctttctgtcgtaggctttgcagctctggtgccagtaccattaggtctggtattggagttgtatcaattatcttaataaattgaattggattgcattcttagattcccagtgtatatgcagagcttatgtgcaaaatacttttccctttgtcaagccttggcaagtacatggattaatctaaacaagtattatcacaatttaccaattgaatttttacatttttaatgycttttaacgcatcaaaaagaatawtgtaaaactcttcattataagcaaaaattaagaattccatarctgtgaattttggattagtaaatactaatttcaattgttytatacgctgtaatggttttttycmrggsskkrwysktsrwttkktkgrwtttttwwactccattcyaaacttaatgctttacgcatatcaaaattttcatcaagagaagagatagataacatgtatttccaatgattaggatcttttgtctttttttgttgggaatttgtatacttggctcctccttttatttgattattatgttgtcgtaatctccttatcatatttcttgtgtaaycattatatgtttttccaaatttgtcaaaaagtatktaacaaaaatgagtatattccataagttaataaggcaaaaaaaatattttttacctttgtcttaaatgtttttaccgcaaataaattttaattatrtacactgagtccactgagtccactcagtccatctatcwatttatactcatgacctccttggtcgccaatacttgccgtccttggtcaggtcgtacaacttcgtatttcatcagcataattttgactgrtcaaaagcatttcgtcccagtggtggaaaaaccgctgcagggccgctgcaaggccacggtaacccttagtaaggtaaggttacatcgctatatccgcatttctgtaggagccctttccttcacaaagttgcacctacacatctgctgcargtgctgcattaaacagagtaatgcagacatctccacaaacacagcacctgctcatgttgttgatgrgatttgagtacacagcaataatgagcctaacaaaaacagctgccagtggttaggcagtgatttcgattgcaattttttttgacgactctcaattccaccaaaagaacgattatgttcatttgcactgtcagcaatgtccgctacatcaatctttattagtcctcaaattcttgaagaatattgagctcttgcttttgcttcacaatggcgacagccttgcaagtcctaacgaacaactatagcagcaacaaagtgttcctcgtcttggttgttccatnnnnnnnnnnnnnnnnnnnnnnnnnnnnnnnnnnnnnnnnnnnnnnnnnnnnnnnnnnnnnnnnnnnnnnnnnnnnnnnnnnnnnnnnnnnnnnnnnnnnnnnnnnnnnnnnnnnnnnnnnnnnnnnnnnnnnnnnnnnnnnnnnnnnnnnnnnnnnnnnnnnnnnnnnnnnnnnnnnnnnnnnnnnnnnnnnnnnnnnnnnnnnnnnnnnnnnnnnnnnnnnnnnnnnnnnnnnnnnnnnnnnnnnnnnnnnnnnnnnnnnnnnnnnnnnnnnnnnnnnnnnnnnnnnnnnnnnnnnnnnnnnnnnnnnnnnnnnnnnnnnnnnnnnnnnnnnnnnnnnnnnnnnnnnnnnnnnnnnnnnnnnnnnnnnnnnnnnnnnnnnnnnnnnnnnnnnnnnnnnnnnnnnnnnnnnnnnnnnnnnnnnnnnnnnnnnnnnnnnnnnnnnnnnnnnnnnnnnnnnnnnnnnnnnnnnnnnnnnnnnnnnnnnnnnnnnnnnnnnnnnnnnnnnnnnnnnnnnnnnnnnnnnnnnnnnnnnnnnnnnnnnnnnnnnnnnnnnnnnnnnnnnnnnnnnnnnnnnnnnnnnnnnnnnnnnnnnnnnnnnnnnnnnnnnnnnnnacttcgtatgtgacagcataaattgaagttcctcatcattattctttttctcgtctattaaatcatatgcatgatttagcaactctgtataacgttcaaaaatattcttatcccaattttgcttttcataattttggaggaatgatggtttcttcgcatctaaatatttataagtatttattctgtctaaaaatctaatacgcatttgagcacgatctaaaatttgtaaaatagcaccccaaaatgcaattttttttattttgtattttagatgcacccagaacattgacagatcgaacaacaaatgcagaacacttcatgatgtcgttatttggtacgactaggtccaaggcaaagtcaagtatttcatgataaggaccatcatatttttattggtagaatgaactggattcatcattgattacctttctagactttgattttaaagttgtcttagatattttgttcattaagtctatttgtctgtctgtattatacagttgtttatcatgaaaaaaaatcaattatattatgtggttgtgtatattgtttaagaagagtaatgtctaaagaagcttttaaaatatcaataactttgtttaattcatttttaagcattttatccggatcattatgttgctcaaactcaattttgatataattttcaatcataaaaatgttaatttttctagctaaaagtttttctagaataaagccaattaaatgattattttgtttaataatttcaacaactttgctctgtttatcattttcagatattttgcgaagaattttgggtattttttttttaagttaagaattgaagaaatgaatttaagaagtcctatacgtagagaaaaagggagtttgtttggattgttatcaaccaagtgtgaccaatcagtgctatatgtgcatatatcaccaaatcgcgccatttcgttactagaaggaagatacacctgtgtactaggttcaaagtataaattaatttcatcatttgttgtattgaaatgcatgtaaaagtgtgagagtactttgttaaatccataccaagccagaggtgctttcatatttattgacaatccggtaagaatttctttctcaaacaaaaaagttacctcaaatgcaacatcttcggaaggtttatcacttgttgtatgatgtttaaattggccatcctcaataatcgcgaattcaatatggtttgtacaaaaattttttataacatcaccaacaatgttgtttttaatttcataaataaggtcagatggtaartcattaaattcagtctctttttggttttttttcatttggcttttttttgctataacaacatttttctccgtgtttattaattttcataaccgagtgttcaggacaattgtctttttcatctrgcctacgtttttttggacatttgctttttagtttttttggcatgtccatatttttacattttctttctaaaattttgtgtgtgtattttccaatttctatccttttgccagtcaacgggtttatwttaggattgtttacaaacttttgacaatcatctttgctcaattccttcattgttgatgtrtaaaaagataattttttatgaaatctgtgctattatttgaagcgaaaagccttgacgtggccygttctttgctttcttggctattatgaactytaktccttgataaccaccgtaatagagtggtactactacggycttggagaggttataggccctccatgcaagaatacttygcgagcgaagcatagctgcgcgaacctagcagtgtggaggagttatattgcttyagtaaaacctgtacgccaacaaagttggcctaggcgcttcgcgcgtacgggctttgccctaggccgccaaaggcasctagcctttagggtacaaagttgatataattccaatgacacattgagagatactcckcaatgttgaggtatttgtaggtttaaagtagcgcataatgcgtcgaattcaaacttttttcgcgtaattgcgaatttgttttgtcaaacgggcgaatgacccaaccctgctttcaaccaaacttgatatgaatcctgccaaaagctcatccaaacagctgggggaaaagyatacagaatgtcaagcgtctttttgggcgcatgsgtcccgtaaggggcaccgtcagtccctttgcatgcagcatagcatgttaagcttgcatmatgtgcttgtatcagtcagtccctccccacgctcaagtgcttctgctgcttcttcttgctctttgaggaccaagtttggttaaggaagcgtttcatcaacaaatgtaatatacccaagaacaaaaaataccttttagacactctaaaagaaatcaaagattgtgctttgagtgacctagctcaagcatacaagaccaactttgcaattaaaaagaaaaatcctaaccacacatttgatataaagtttaggaggaaaaaggataaccaaagtattacgttggggtatcaaaatggtatcaaacaatgggatcaaaaaataaagatttatctaacgtatttacaaaacaagatcaatttccacatcagaaaaaacctggaaaattagagaatgattgtaaattgactaaagataattttggacggtactatctgaccatcgaaatgcgtaagctaacatatatgtggagtatacaagcaaatgttcagaataggttgtaaagtagagaaatgtaaaaaaaaaattacataaattttcaaaagagctaaatgcaaggaataaaaaaaatgaatttgaatacttaaaataaaatctnnnnnnnnnnnnnnnnnnnnnnnnnnnnnnnnnnnnnnnnnnnnnnnnnnnnnnnnnnnnnnnnnnnnnnnnnnnnnnnnnnnnnnnnnnnnnnnnnnnnnnnnnnnnnnnnnnnnnnnnnnnnnnnnnnnnnnnnnnnnnnnnnnnnnnnnnnnnnnnnnnnnnnnnnnnnnnnnnnnnnnnnnnnnnnnnnnnnnnnnnnnnnnnnnnnnnnnnnnnnnnnnnnnnnnnnnnnnnnnnnnnnnnnnnnnnnnnnnnnnnnnnnnnnnnnnnnnnnnnnnnnnnnnnnnnnnnnnnnnnnnnnnnnnnnnnnnnnnnnnnnnnnnnnnnnnnnnnnnnnnnnnnnnnnnnnnnnnnnnnnnnnnnnnnnnnnnnnnnnnnnnnnnnnnnnnnnnnnnnnnnnnnnnnnnnnnnnnnnn

SEQ ID NO: 261 - DNA, 21767 bp, unidentified
  misc_feature 1..21767: note = Fanzor polypeptide
  variation 6882..9606: note = n is any nucleotide
  source 1..21767: mol_type = other DNA
agggagtggctttgcttgcaaacaacaatcacatccgccttatcttcgtccgaggtcatgcgtttgaatgggctagcatagcgataagaggcggctgttagggcttgcaatatccacatccatgttgagaggcgacaaagtgcacagttgtgctttcatgtgctctgcttgacatgtcatttcgccctgcatcaagctcggcagagggagggttagggtttaggggccagcaggcacagcgaatcgccgccaaaggagtataaaatgacaggaagcgtttcatcaacaaatgtaaagaactctccaaaaaaaatcacacacacacattggcattaatgtaagcatgcaaactggctagacatttgggaggcacgcaggcttccaaggcgttcatgaaccaaatctctatcagactccttagatttgtttcagagctcgtttcactttttgatgctggttgagcgtgaacaaatcaaagattgtgccaagtatacaagaccaaatttgcaagaaaaatcctaaccacatatttgatataaagtataggagttgggatatcaaaatggtatcaaacaatgggatacccaagatcaaaaaataaacatacagatcaatttccacatcagagaaaaacgaagccgctacatcaatctttagtcttgaagagttgcaccatgcaactacatccacaagccactcaacagatcccatactttcccagttgcaacaaatgcaacagcagcactcccaacaaatcaaacacttctatagaaattcaaatggcctagcttataaagtctatgaaacctccttgactccttgtcaacctcaccactccacgcagcaacacaaacagctgctagataggccagatgctctctaacaagcaagttgcaacttaactgttaaagcctcttttatttttgcttgttcatttttaggtctcattttactatggttgttaatcaatacttaaataaattttcatttgactaaacacttgctttaattctccaaataaatcatattcaaattatatgaaacgcaaaacacaattgaatgttatcacatggtttgaaggaatctctgcttgaatgaactcattttcattttttgaaacaacattgataaattcagtacctgtttctatatctatttcaacatcaaattcaggatttgataaataaattctgtatagatctcctatatcatcacattttgtttcattactgttttttgtttcaattgttttatactcacttgggataataacttcaaacccatcaccaataaagtgttcaacattattataaaaatggtaaaaaaaaacttttgcgtttgtaagaggtaattcagatgacctaacaccatttcaaattatcttatgttcaagctttaaattgttttatcatttattcaaaatatatgtcaatttttaagcaatttttcaagttttactcaaaaaaaatcattatattctgcacgcttttagcatatcaattagatcaacaaccgttaaaactttggtgaattgcatcatgtaaacaaccaatgtaaaagaaattcaaagattttcattcaaaatatatcattgtccaatatttgagcagtgctttgcataggtagagtagcttgtgttaagctttatatattttgattaaaacataccgttccgaacaaacataccgtttcggaacgtgaaactttctctgggtttcaagggttttacttctcctccttacgtcccctagccaagcacattgaaggcttaatcgtgttcaaaaatgcttttggagaaggaaagtgctcgatactcttagacaaaagtgtctgcttcctcctgttatgtgaatgatgtgcaactctattatcaatgcacattcacttctagcaatgctagcatgggactttgtggattcgaatttggtacggaagtctctaatgagagaataaaaacgcattgttgcatatttatttattatttttatcaaaggtgtttgagatgttgtgtctgttgtcgagcacaataatctgccaatgtgacaagaatgctgggatcgcttgaaggtgggtgacagggtctagatctgtctcacagtgtgtgctttgccttgcagacagcttagaactacaacaagtcatccaggttaatatgtgaaagaataaaatagttacaatgatgcattgatagctatactaaatgtctttaatgaaaaaactttattttcttatattttgacattttccttttgttatcggaaaaacactgaactattttgaactttttgaaactttwttgaattattttcaactwtktatttctattaggatttattattctttactttttttgttaaaaatttaattaactacattattcaatgcattgatagctatactaaatgtctttaatgaaaaaactttattttcttatattttgacattttccttttgttaccggaaaaacactgaactattttgaactttttgaaactttattgaattattttcaactaattaaaactctatttgtattaggatacattatacactttattcttttttgttaaaaatttaattaactacattattcaatgcattgatagctatactaaatgtctttaatgaaaaaactttatttttttgtattttgacattttccttttgttatcggaaaaacactgaactattttgaacttcttaaatctttattgaattattttcaactaattaaaactctgtttgtattaggatacattatacactttattcttttttgttaaaaatttaattaactacattattcaatgtattgatagctatactaaatgtctttaatgaaaaaactttattttcttatatttggacattttccttttgttatcgaaaaaacactgaactattttgaactttttaaaactttattgaattattttcaactaattaaaactctgtttgtattaggatacattatacactttatttttttggttaaaaaagttaattcacaataaatgttattcaatgcaacatgtcaacaaattaaataattcaacaaaaaaagagagtaaagttgtggtaggtagaggattgaaggaatatctctgtgctggagggggagccagcccgcgcatggtgactcgcacgtcgatatcacacaatgatgatttacggtgtaaagctaaaatagcaaatcaagtctgaataaatgatctattaaaaaatgatgtgctccatttattttttcaaatcgatcaaaggtcacaacagttatttcattcattgtacttttttacaatctattttttttgtcatatcacacttttacattttttctgtttaatgaatccacgtggttgtttgttaggacttgcagggctgtctagctaagcaaaagctagcaagagctgcgcgacttgcagggctgtcggcatagcgaagcaaaggcaagagtcttcaagactaaagattgatgtagcggactttgagatatgaaattatgatagtcaccatatcttttgaacatatcaatgttacttttctgtctatgtcaggaattggcaccgaaactccataagtaaaagtaaattatcaattttgaataaccaaactcataaattagttaaataaatattggttatcacgttgtcaaattaaagcctaaatttacgagaagcttgaacttacggtttcataaacttgttcatgttgtttttaacaatggaaggttttaacagttaattgatttattcaatgatatttaaggaatgaaaacattgaaataatttaaagccttgaataaaaatagaatcttgcagctataaatcgtctctaaaatatgatacatatgggtaccctaaaggctagctgcctctggcaggtacgccgcctttggcggcctagggcaaagccgtaccaactaaaaagaattgccctgatgtttgccaagaacaaagtaaaggtgactttgtgcaattaccaagcaactgttggttttctttgaaacattgggtggaaataaagaaggagataaaaaaagaaactcacacaatcaaagaagaaaaaagaaaaaaagcgaggaaaagcaacctgtctaaaaagtatccaaaaaaagaaatcaatgtgtcgaacaacttacaattgggcgctgtcagctacgctgcctaacgggtcctgaaaggagctttgcttccgaaggaaagctacgctgcctaacaggtcctgaaaggagctgacatttaaaatgctaaacggtgtaaataaacaatgataaaaatcaagcaaagacgaaatctaagttctcatatgcctttatataattatcaatataaacaggagggtaaaaaaaaaaagtagtggacctcatgtgtaaattttggttgggacccccttgacccacccacccaccccaaaaccccccttcccgtgctccaatccagacaaaaagggtaccaatctgctccttttcaaattccctatccatctgcatactcacagcaagcaaaaacaggatttgcaaagagttatggggcaaaaattgatgcttggacgctcatgcatgcgtgccctgtcaggcacccacagctggcttggaagtcaacaaactgcattttcaacttcataactcaagtaaacatcttgtgttatcaccatcctgtaagtttggtatgatttgcagcagctttgcactcacacacctatggaccacaccattgagcgtatggccttgacactctaccacgcatagagacccccccttttatccaatttgcaccaaaagggtgccaatcgacagttcttgagctcaggagtccgacgatatgtttaaaattatgtagaagtgtcccagaaaaattctggagggggggtcccaaaaagtccagaccccccccagacacccacccctaccgaccttcaccgttcggacccatacatataccaatcgatagctctcgatctcaggattccgaatatgggtgtcccgatcggattgacacatgaggtccaaaagttatgcttcctacaccctcctgatataaagaaggaaatagttttgaagacgacatattgtcactttatcattaagtttttctgcaattttttttgcatattcatccaaagatgtttgtttcgcaaggttgtttgagtcaatattatcagcataaaacatacaagtataatcatatatttcttcaaatgaagccaaactgaaaggaacacgtgtttgtatacgacctggtcgtaacacaacttcagggataatattcacattatttgtagtaatacaaataagacaaccatcaggactatttaatccatccaaaaagttgatcattttattgatatcaaaaagaggcttataatcaataatacttgtattttcagtatgacttcgaattaggttcaaaatagcgatcaagatcttcaataatgatcattgaattaggaaaaattttcgaaactgagtcccatattttttcattttgaatatccattatgtaaattctttgcattccaaattcaccacacaatgcttttgctaaagatgtttttcctgttccatggattccttctaagagaaatcaaaatttatattgaattcctaacctattgtatttaagtttatttttatgatgacgatgaatggattctaatatgtttttttttcattttgttttaatacaacttgagacaaagacggaacttgcacagtttttttaaagcaacagtcttttctctcagtcatagaaaaaagatcaacctttaaatttttttttttagatttatactctttttttgcatctattataaaatctaataaaagatcaaaatttttcttcataaaaactgatatacacatttttttatcatctttatttgaataagatactataaataaatttcctttatgttgaatataatactttccgtgtgcgagtgttaaatcactcgatttggtttcagtatcactatcattgtttttttgtattcctatatcacaatcttcttcatctggatcaaaacttgattcatctaaattaagtgtatcaatataaagagcttttttgcaacaaaatatataatagcgcaaaagtttggattaaacacagaaatcttaactgttttataaaataaccttgaaaagaaggtatttaattcataccatacattattcaaaaatggaagtaaaactgataaccataagaaggttgttacatcaaatggcatcattgttgttacaacaatttatttttccaatctttataatccaattgcctaatgttatatgctataagttaaatagaaattgttcaattttttttgtatataaatttttaaaaaaattaatagatcaacataccaaaatactgctctttaaatttccctaaattcacagataaataatatatacttattatgaacaatgaagtcttgtacgcaaagctacctactgctgccrttggcagtctaggcgcayagygcgtacacacctaaacaacttgccaaaacattcaatgtcaccaacgaaaccctgggagaaatctggaaaaatcaaagtcaagaaaactgaaggtggacacttaagatacatttgtacactaccgtgcagggtacactaccgcgcagggtacagtacactaccacccgtcatgcctaacaaygaacaaaaacaatctatcatttatgccagagtatcctctgcaaaacaaaagagtgagacaaactcaattcctacaaatatggcagatatcttgtaaaatcaataaacgcagggcaagggcagtttccatctcgcaactgttttgttagaaagaaaacaacgtggtgcaaaaaatgcacggaagtttggcagcagaagtgtttattaaaaacaatttaaannnnnnnnnnnnnnnnnnnnnnnnnnnnnnnnnnnnnnnnnnnnnnnnnnnnnnnnnnnnnnnnnnnnnnnnnnnnnnnnnnnnnnnnnnnnnnnnnnnnnnnnnnnnnnnnnnnnnnnnnnnnnnnnnnnnnnnnnnnnnnnnnnnnnnnnnnnnnnnnnnnnnnnnnnnnnnnnnnnnnnnnnnnnnnnnnnnnnnnnnnnnnnnnnnnnnnnnnnnnnnnnnnnnnnnnnnnnnnnnnnnnnnnnnnnnnnnnnnnnnnnnnnnnnnnnnnnnnnnnnnnnnnnnnnnnnnnnnnnnnnnnnnnnnnnnnnnnnnnnnnnnnnnnnnnnnnnnnnnnnnnnnnnnnnnnnnnnnnnnnnnnnnnnnnnnnnnnnnnnnnnnnnnnnnnnnnnnnnnnnnnnnnnnnnnnnnnnnnnnnnnnnnnnnnnnnnnnnnnnnnnnnnnnnnnnnnnnnnnnnnnnnnnnnnnnnnnnnnnnnnnnnnnnnnnnnnnnnnnnnnnnnnnnnnnnnnnnnnnnnnnnnnnnnnnnnnnnnnnnnnnnnnnnnnnnnnnnnnnnnnnnnnnnnnnnnnnnnnnnnnnnnnnnnnnnnnnnnnnnnnnnnnnnnnnnnnnnnnnnnnnnnnnnnnnnnnnnnnnnnnnnnnnnnnnnnnnnnnnnnnnnnnnnnnnnnnnnnnnnnnnnnnnnnnnnnnnnnnnnnnnnnnnnnnnnnnnnnnnnnnnnnnnnnnnnnnnnnnnnnnnnnnnnnnnnnnnnnnnnnnnnnnnnnnnnnnnnnnnnnnnnnnnnnnnnnnnnnnnnnnnnnnnnnnnnnnnnnnnnnnnnnnnnnnnnnnnnnnnnnnnnnnnnnnnnnnnnnnnnnnnnnnnnnnnnnnnnnnnnnnnnnnnnnnnnnnnnnnnnnnnnnnnnnnnnnnnnnnnnnnnnnnnnnnnnnnnnnnnnnnnnnnnnnnnnnnnnnnnnnnnnnnnnnnnnnnnnnnnnnnnnnnnnnnnnnnnnnnnnnnnnnnnnnnnnnnnnnnnnnnnnnnnnnnnnnnnnnnnnnnnnnnnnnnnnnnnnnnnnnnnnnnnnnnnnnnnnnnnnnnnnnnnnnnnnnnnnnnnnnnnnnnnnnnnnnnnnnnnnnnnnnnnnnnnnnnnnnnnnnnnnnnnnnnnnnnnnnnnnnnnnnnnnnnnnnnnnnnnnnnnnnnnnnnnnnnnnnnnnnnnnnnnnnnnnnnnnnnnnnnnnnnnnnnnnnnnnnnnnnnnnnnnnnnnnnnnnnnnnnnnnnnnnnnnnnnnnnnnnnnnnnnnnnnnnnnnnnnnnnnnnnnnnnnnnnnnnnnnnnnnnnnnnnnnnnnnnnnnnnnnnnnnnnnnnnnnnnnnnnnnnnnnnnnnnnnnnnnnnnnnnnnnnnnnnnnnnnnnnnnnnnnnnnnnnnnnnnnnnnnnnnnnnnnnnnnnnnnnnnnnnnnnnnnnnnnnnnnnnnnnnnnnnnnnnnnnnnnnnnnnnnnnnnnnnnnnnnnnnnnnnnnnnnnnnnnnnnnnnnnnnnnnnnnnnnnnnnnnnnnnnnnnnnnnnnnnnnnnnnnnnnnnnnnnnnnnnnnnnnnnnnnnnnnnnnnnnnnnnnnnnnnnnnnnnnnnnnnnnnnnnnnnnnnnnnnnnnnnnnnnnnnnnnnnnnnnnnnnnnnnnnnnnnnnnnnnnnnnnnnnnnnnnnnnnnnnnnnnnnnnnnnnnnnnnnnnnnnnnnnnnnnnnnnnnnnnnnnnnnnnnnnnnnnnnnnnnnnnnnnnnnnnnnnnnnnnnnnnnnnnnnnnnnnnnnnnnnnnnnnnnnnnnnnnnnnnnnnnnnnnnnnnnnnnnnnnnnnnnnnnnnnnnnnnnnnnnnnnnnnnnnnnnnnnnnnnnnnnnnnnnnnnnnnnnnnnnnnnnnnnnnnnnnnnnnnnnnnnnnnnnnnnnnnnnnnnnnnnnnnnnnnnnnnnnnnnnnnnnnnnnnnnnnnnnnnnnnnnnnnnnnnnnnnnnnnnnnnnnnnnnnnnnnnnnnnnnnnnnnnnnnnnnnnnnnnnnnnnnnnnnnnnnnnnnnnnnnnnnnnnnnnnnnnnnnnnnnnnnnnnnnnnnnnnnnnnnnnnnnnnnnnnnnnnnnnnnnnnnnnnnnnnnnnnnnnnnnnnnnnnnnnnnnnnnnnnnnnnnnnnnnnnnnnnnnnnnnnnnnnnnnnnnnnnnnnnnnnnnnnnnnnnnnnnnnnnnnnnnnnnnnnnnnnnnnnnnnnnnnnnnnnnnnnnnnnnnnnnnnnnnnnnnnnnnnnnnnnnnnnnnnnnnnnnnnnnnnnnnnnnnnnnnnnnnnnnnnnnnnnnnnnnnnnnnnnnnnnnnnnnnnnnnnnnnnnnnnnnnnnnnnnnnnnnnnnnnnnnnnnnnnnnnnnnnnnnnnnnnnnnnnnnnnnnnnnnnnnnnnnnnnnnnnnnnnnnnnnnnnnnnnnnnnnnnnnnnnnnnnnnnnnnnnnnnnnnnnnnnnnnnnnnnnnnnnnnnnnnnnnnnnnnnnnnnnnnnnnnnnnnnnnnnnnnnnnnnnnnnnnnnnnnnnnnnnnnnnnnnnnnnnnnnnnnnnnnnnnnnnnnnnnnnnnnnnnnnnnnnnnnnnnnnnnnnnnnnnnnnnnnnnnnnnnnnnnnnnnnnnnnnnnnnnnnnnnnnnnnnnnnnnnnnnnnnnnnnnnnnnnnnnnnnnnnnnnnnnnnnnnnnnnnnnnnnnnnnnnnnnnnnngaatgataatgtccgatggtcgtagggccatgaggtcattgaaaaacgcctcagctgcaatctggcgatgtactcaggctcatggtctatgacgattaggcatgaggatgccattgactgttgttaaaattagtaaccccatgaattgccttgctaactcaagtcaaatagtatctacctaacttatctttgcttagcttacaatcgttttcaggaaggccacaacagttttttcattcattgtactttttttaaaatctattttttttgatacatcacagttttacattgtttctgtttaatgagatatatatatttttaagcttacatgtgatattcgtcattttcaaaatttctaacaaaattaaattacttaaggatatactttattaagaatataagaaatggaagaaaatgaaacgcctcaaaaaatcaccatccgagaagctgccaaactcttcaccgtgcacccacaaaccatcasagaatggacagatgcargaagaatcccatttgaacgtacgctcacaggacaaagaagaatactcttgtacaaaaatccaacccaagaaaaaagcaccaacgaaaagttcaaagccatctactgcagggtctcaagcaacaaacaaaaagatgaccttgaacgacaagtcaagtccatgcaagaaaaattcccgaaccacagggtctatacagacatcggatccggtatcaacttccagcgaaaaaactttctctcccttttggacgcatcactgtcaagatctttgtcagaagttgtggtctcctcaagggatcggatgctgcggttcggattcgagttgtgtcaatggctattcatgcgccaaggaaccaagcttatcgtcttggagcaaacggatcaatcaccagaagaagaactgtgttccgacatcttatccatcattcacgttttcagctgccggagaaatggctcaagacgttaccattcacaaagcgcataaagtcaagctttgtccgacaaagcgacaaagacaagctttgagaaattgggcagcgggatacagattaagttataataaggcattagatttcaaaaaagaaaatacaaagttaagcaaatttgatttgcggactttaattgtgacaaagaaacaaaatagcaagtccaaaacacgattgtttggtgaacacaatattaatccgattttccaaaaacacccttggctttccaaagttcccaaagatatacgacaacaagctgtttttgagyttttcaaaaattggagacaagaaaaaggaaacgtcagctataaagatagactaaaakacacatcaaytataagtttaraaaaagaacatgtcaaagttttggataatggtaagattcgattatattcagggaaattaaaaaataccttacgtacatttggtaaaatgcccaaatcactgttaccatccgagtttgaggacgaagttaaaccaccttgccaggttttgttacaacgacaaggtcgttcttattatatgattttcccgataaaagaagaggtgaaagttgtacctacaatttacaaaggacacatggtaggtgtagatccagggatcaggacttttcaaacatgttatggtacagatggtaaagttgctttcttgggaaatagaaaccctatgagaaaatttgcaaggacacaatggtacctagatttattaaatattcagataaacaatctagcagkaatgaataggaaaaaatctaagaaaaaacgaattaaagtccaacaacgyttagaaaatataagaaaagatttccrtcataaatcarcaaaatggcttactgataattataaggcaatcattatcggaaaattaccaaaaggtataatttcaagagacaggtcccttcctaaatcagtgaagagggcattcaacarcttgggtcattacaagtttcgttgctgtctcaaagataaatgtcaaagaagaggagtagtgtaccatgaaataaatgagagctacacttctaaaacgtgtactatgtgtggtaagcttaacgatattggaagtagtgaagtttaccattgtaattgccaaaagagcacttggaatagagatataaatggtgcacgaaacattttgatgaaaggaatttctgagagctacctccggattggttgttcctaattaagatggaacaaccaagacgctatctttagagacgccacgtgtgtgcttgcatccacgtggttgttcgctaggactcaatattcttcaagaaattgagggctactaaagattgatgtagcggacattgtttatctacttttttcatcatgtatatcatacaaggtaggtaggtaatcttgcgggaaacattgtatgtcatagaccacactatcttctttgaaatttattcgaggtgtttttgctcatcgacccatgcgtgataaaaagagtgttcaaaagatcattttgggtttaatacaactttcattagttttccttgaaaatctggacaatacttttgatagacgtcttgtttgttttgtattggtcaggtggcttgttcatattcatattaaataaattaagtattaaatcaaatttaaagtgtatatttataattttcttagataaaccaacattttaaacctccaagggttaaaaaatgtatttgactgaattgaacgaattcaaatataattttggtgacccattacctcatttattttatttcttgcttaatttaccaaattatgatacactcccaagtatccgaaataaatatggtaatttaaaagaaatacgtgtttttgactcacaagattgcgtattgattgactgtaatgaaaaacttcgaacaataacaacacctaattatcatgagaatgaatccaaagagttttttttttcattttaaggaaagaaaacaatttgaggcctcttatattaattccagttttgattaaacataaaaattgtatgaaaaatcacaaagagaaatcattgcatggtcttttattgctgtataatagaaatatggaaagaatgcaatttattgacattaaagcttaccatttatcaagattttgggtgagtgtgcgaaaaatgttaaaaaagaagtatttgagaaaaataaaagaaattaataatgatattaaattgctgcaatatttttatgtacctatttatttgcaagataaagtgaaaatgccaaggaaagaagtgtatcctttgttcgttttgaattatttcttcaatttatcaatcaatccatctcttacgtttactgaaaatgttttatcaattttgaggtttttacaataagcacactttttgaattatgagggacatatgtcgagtttaggaaaaaaatgaaggaaaaagattgtaaggattcacttagaattcttaatccggagacgaacatgtgtgttaaaaatatgtcacgattattgaaacaattaagggttgataaggaagaaaaatgtaagaatggaatgtattatgacgaagtgagaaaagaatgtgtacgaagtagaaataaagcaatgatagatgtaaatattttgtatgataacattaaaaatgttgtgtggttaggatataacgttgataattcaaatgaaattcaaaataaattaatgaagcacattgtatcaaaatatggtcacgcttttttggtattaaatcattctgaagacaacgcaattacttggaaattgccattcgacgaaggtgattttgattatccatatcaactaacaacaccaaaaggtttttggaagtcttttcgtgaaggaatgaaagatagaagaataaaattcatagttgtcccattggaattgggttgtcatgccgaagatatgtgtcattctgggaatttgatatacaataagataacaaatgagttggaacgctttgatccacatggacttaccatacaagaatttaatccggaattccttgacaaattactaagagagtatttttcaaaacatattaaaaacgttcaatatttgtcttcaatagaaatatgtccatctaaaaacatttttcaatcgatcgaaacacatccgtatgtaatgaagtccatatgccgcaaattgttttatatggaatatttggtatattgaagtcaaactaagtaatcctgatgtttatacaaaagacttgattggtttagcaatgagaaaattaaaaagattatcatcttttcatacttggattaaatcttatcatcagtttgtatttaacgagatgctgaaaagtcaaaagcgtacgccaacaaaattggcctaggcgcttcgcgcaggtatcttcgcatgtacaagctttgccctagccaaaagcgtacaaaatggcagtttggttaatgcatcaacaaatgtaagagcacaaaaagtaccttttccatgtgctttgagtgacctagctcaaacatacaataaaaaaaaagccatagatttgatataaagattaagcatcaaactcaagagcaaaaaattaagatatatttacaaaacaagcagaaaccgtttgtaataatttatttattggatttgcccctttgtattcggaaaaacagtgaacaattttaagctttcttgaacaaatttgaattatattgaacttttcactatgtctttatttcattttgtgttggaaaaagtgtttaacaaaacgttcatcagcagaggttagggtttaggggttttaaagaaaagtgtcgaacaatttggaaactttcttgacttattcaatttgaaggttctaacaattaatacgtttacttcataaaattgaagattgaaaaaaaatgtcaaacgtttggtctttctgttctataagataatatgttggagctgttctgctgatgtttgcaaggttaaatgcaaaattgtgtaaaaaaagttcgatttaaaaattattttgtaaagtgctatcatgacaattatagccattaacatttcaaatgacagttaaaatgctaaacggttacaccgtatgtaaattaagatagttaagaacatatcattagaattaaaatgactcttatcgtatatcctgagtctacaatgaaatttatgttatacgaaaaaatgaaaatggagaattatcaaaatgtatcatttttattcagagataaaattgaacatcaaaaatattttttggccatcttgatatacaacgcattgaatatattgcaaaataatgatgaattcaatcagaatttgacagcatatgctatccaatacttatggattgttgttgcctcagtctttgaaagacatgattacgtaccatcaaatgtagaaatatcaattcttaatgatattgaattggatgttaaaaattttctctttccagagtctagacaataattttagtcatttgctttcaaaatttaacattaattataacaactgctccgaaaaatcgcacactgttaatgaaaatcgttacatgagaatattctacaatgtttgtagaggtttgctttagcaaatcctttgcctgtgccgttttacagtcattaacatttcaaaacccagcgtttactgggcatgaattatttctcgccaaaatgctaatggtcgttcttttctttcaaaagctgttaaagccaacagggtctcgattcccacacccatttgcagtctggcctaacgtcttcggacgttttgatctatccatttttccgctttttcatgacccgccagacgttgtctattccattttagctttctaatcaacagtaaagtgcgttgagaacaagtgccgagctttataattgtcaaatgaacattattatttattatgctgtgatagtatagtctcccattctttgatacttttattgtctaccatagtctcttttcgggtgcttagcttttgggattgctggatgtatcattcaatgacatgtaacgacacggaagatggtaaaaagatgaaacaggttaagagtgatttatatacttgagaagactaaagtgccaaaaaagtagattgtcatgcttcaatcatgtatttttaaaatcatcatccagacaggaaataatttgtgaaaaaagttacaaaaaaaatatatatataataaatgataattaaagatgaatctgcaatgttaacttatcgtgaatatcttcaaaacaaaaaaaattcgtataccttcttgtttagggaaaaaaataaagcatctgatgaattacaagaattcattgataattttaaagaaattatgttttatcaaggatctaaattggcaaactatgtaatgtgtatggttttgttttatcacaagcaatacataaagatgaaaaaagcctgtctttatatgaaaatgtgaagcaaaaagacgtaaataaagaagaaaaggatatgctctggaaaatttttacttctataaggcttggaaaagaagatttttttttttaaattctgaaacagagcaggaaaaaaaacgagataaagaaatcaaacaaaataaagtaaacattggatgccaaaaattaagtgatcccgaattccaaaaaatgctgaaaaataacacgatggacaaggagtgtatagagtatgttaaacaagatctaaagaaacataatttacttaccatttttggaaataaagacagtgaaattgtagattttttcaaaaaactcaaccccgttttgtgcaaaaatgaaaatgacattttaattgacaaatcatttctagaattcacaattgatgatgccttgaaagaaccgtacgtcaacattaataatgaatgtttgttattttcattaattgcaacaaatttggttataaataaaggtaataaaaaaatgtataaaataggatcaatacccaagaatattcgaccatttttttttaaaaggtatgacattagcattagtaaaaggtggaaaggaatctcaacaagatgttattatggaatacccctctcaaatgtaccaaagatcaaaaaaaaatttgctttctggaacacctctggaagacgaagtgcatactaattttaaattaaaacaacctttatcatctaaagaaatatacacatttcttgagttccttataaacaataaatccgataacaattttgacataattgcgaatcttgtaaaatatacatgtacttcatttatagaattgataggtcttctaggatacatatgtttttcagatatgataactgaatcacagcattatttcccaatatcaaatttttgcatccaaaaatattatcaagttgcacatgaatttaaaaaattacaaattaacggtacatcattgtttgaacttatcaaagacttaaaatataataacacaacactcgaagatctaacagaaaatttatcaacaacatgtattcatggaattggaaatcaattactttctttctatatacaagccaaacaagatataatcaaatatgttgacaatatcgaacacacatgctgtcccgcacaatttaacttgaatatctttaaatcatatttgccttttattaaaataattgatgatcatgatattcgtttcttagttgtttttaaagatgattttcttgaaaaccataaaaatcccttggacactaattttagaataagaggatacgacaaaaacgacaaagcttttataaattcatcatctggatatagattacaagtcggtgaaataagtttaaaagattcagggtttactaaaaaaataaaaagagaaaatttagaagagtttgggtttcattcctacatgttgactgattttttggaatttttacgatttcattaacttcatagataagacaacttcattctgttttccaggaggtcaaatagaagaaaggataatgaatattttaaaaaacaacacaaatatgacacaaacattatgcgcaattgctgacatatatcagccaagaagaagcgcaatttttagcacatcgtgtgaatattgcttatacatttctaaaatcatgaaagatgataacaaggttattaacactctaaaaaaggaaaggtttaatccaattacaatgaatacagaaacaagcattccatgttcactaactataattgactttaagaataaaacagatttaattgaaaatgttgcaacagatacatcaaagattaatgttgaaaatgttgatacttctaatcaatgttacatcgataattttgaaacaattagcaagcttgaatatttattagataaagacaaaaatgcttttgttgttgatccatattcacgcaaagatattaccaaaactttcgaaaaaattcgtttattatctataactaaagagatttcacgcttgaaaacaaattattacacatttgattcatattgcaaaaaacttcatcaacaatcttctaactttgacatatttaaggaaatcaaaagaaaatacaaaaacccattgattcaaaacttgacttttgataacatgacagaaaattgtaaaaagcttttgcaagaaaatataaggagaaacataattgaagaaattgcttttactgcttatacatttatattcggtcttttatattacttgttatctttttggatgcaaaaaagggttcgatcaaaattagcagttatgctaatagctcggttgctaaattttaataaaattcgtgcaagaataaacacacctgtagatatgaaatacattgatgattatttacttggtttgcataatgtttttagtgcaattgttgaaaatttaatgttttgggaaggaaacttagcaccatcaacatgtaaatatcattatactttattaggtaaagatattgcgttattcttatctagaactcgtgatgaaatatttaacgcaaagacaaaaacggatgcatctttgataatggagacaccgcaattcaactttgaacaaatgtttgttaagtcacgtgatgtgttgaatgaaaaattttatttcttgaaagaaaaccctttaaagtcatatgatagacaagaatccattccatttagatttgaattttaaatgaaatgtcaaataattgatcagcacaaaatcatgtccatatattatgcaaattatgaaacaatatttcccatgttgatcctaaacagagaaattaacgattttgtagcttcaagaaatacaaatttcatacaaatgcagcaagcttttgaaaaattcttttgatcatttgcatgttgctctcaatactgactcgaagctgacatttcgtcgttttacctagcagatgtgaaacacagtgcagttgcacctccagcaacaaacaaaaaaatgaccgtcaattccatgcaatcccacacacagacatcggatttggtatcaacttcctcgcccttattgacgcatcactatcaaaaactttgtccgccttaaagacatgtgtcaaagaagaagcatgaaataaatgacagcttcaggtccaaaacatgcacaatgtgtggaaaaatcaatgatgtgctgtttatcacttttttattttgttagctgaattacttaatatttaggctttgagttaaaaataaactacacttactattgcgagggcgtggaaggttttaacagttaattgatttattcaattatatttaaggaataaaaaattgaaatgatttaaagctttgaatggtctaataaaaaaaatcttgtagttaaaagtacttaaagccataaatcgtctctaaaatatgatacatgtggttaccaaccaaaaagaattgccctaatgtttgccaggaacaaagtaaaggtgactttgtgcaattacctagcaactcttggttttctttgaaacattgggtggaaataaagaaggagatgaaaaaagaaagaaactcacaatcaaagaggttgacaaagagaaaaaagaaaaaaagcgaggaaacgcattgaggaaaagcaacctgcaaactattataaaacagtgtccaaaaaaagaagatttttaatcaatggtttggttgttgtcgaacaacttacaattgggcgctgtcatgcattaaacataagccgaaggagtacaaaatgacggaccttgtttggttaaggaagcgttttatcaacgaatgtaatatacctaagaacaaaataggatactccaaaacaaataagagattgtgctctgagtgacctagctcaagcatgcaagactaactttggtattaaaaagaaagatcctagccacacatttgacccggagctgacataaaatttaggaagaaaaaggataatcaaagtatcacattggaatatcaaaaaggcatcaaacaatgggatacacaagagcaaagcataaaaaatgtatccaacagatcaatttccacatcaaaaaaaatcgaagccttctaaaacaattagagaatgattgtaaaataactgaagataagttaggaaggtactatttgaccatcgtttatcaccaagtagcctgtgatgattggggaccaaaccaaacaggccccaaaggtaatgaatggtgctcaatagaccctggggtgagaacaatgttgactatttatagcaatacaaacggccttgcttttaaagtaggagtaaatgacttgtcaaggatatttcggctctgcaaatttttagacaaacttatttttacagctaatggtaaaaaaactaaatttagtaggaaaaagtataacaagaaaatacttagattaagagaaagaatcaaaaacctagcaaggcaattcatttattggttactaactttaacaacatcatcattcctccatttaacgttagccaaatgacaaagcgtttgaatagaaaaataaatgccaagtcagtgagaggaatgatatgttggagacattacggctttagacaacgtttgctacagacagcccaaagatatgacgtcaacgtctttgtaagaggcgaagaatacactagtaagacatgtacgggctttgccctaggccgcctgttggcggcgtacaaattgtagaacagtcaaagaaaatctaagaggggccaaagattatagatgttctcactgcaggctattgggtgaccgtgacgtttgcgcagcaaggaacgcgaagcttccttcgggaacatccttaggtctaactttcaactgttcctttccctaaccaggcgatgctaccagctttcagctggctagcaggccctgtgctcggcctttggctctctattaagtcgatgactctttggattgccttagcatgtttgtttgtgttgttggggcaatgacgtataacagcacggcagattgtgcaaggtgaagagaagaagagttgttaaagtttaaaagagcggtttaaaacaactatcaaattttcataaaagtccctttttcgataagaagacgcgcaagacatttccaacagtggagcataaattccaagcttataaatacgagaaccggaagaattttaatgatatattgaagacatttcttgaaaaagaagatcctttagacgcaaagagacttggaaggaagggaaaattgcctgatgaatataatgagtgggttggtggaaagaggattagggtaatgagagatgctttgagagagaaattttcgcaaaatccaatattaaaggaaacgttattaagaacaggcaacgtagttttgatcgaaagcgttcctagaggagataagttctggggtgtcaagggaaatgttggagcaaacgtgttagggcaattgttgatggaattgagagaggacgcaaaaaagcatgtgtaatcttcagtgaaatttgaataactcaaagtccgctacatcaatctttagtcttgaagactcttgcttttgcttcgctatacacatggtccagccttgcaagtcctaacgaacgaccacagcacacattcttcacagtgattaacattcattaacatttcaaacattcattaacatttcaaatgttttatattttttctttggttgtttttgcaatgcaaaaatgattttgttatattaaacgacaaccaaagaaaaagtataatgttaatgactgtttaaaagttgccatctttggtggtgacgcgcagaaaatctccctctgggtttgtaaatccggatttgtgagtctgatccacgcatacgttcttgtgcaaattgatgaagaagatttttttgattaaaatattacaaatattatagatgagtgaaccatcaaaaaaagtttct

SEQ ID NO: 262 - DNA, 21965 bp, unidentified
  misc_feature 1..21965: note = Fanzor polypeptide
  source 1..21965: mol_type = other DNA
aacagagaatacacatgtgacgccagtgagcgtcggtcttgagaatacatgttgttacaccctgagatcaaaccctggtattcctcatctttttaggtgtaacaaaattcacttggcagagtgtaactctctcgactcgactcgactatgacgcctcaactttgaccgcagcgcgcatggccctgatcttatcgggaacatccgccggccggcagttaaagacgcatgccgcaagcgcatagtggcgggcgaggtccgcgggcgagctgaaccagacgtccaggtcgtccagagcgttctcgacgcgctgcatgtccctcggggacagcgtccgaaagaggtccacggcgggtagctcgaccttgacgcgctcgtcgagcgcgcgcgtgtactcctcgatgcaaaaatcgctggccgtcgtgcagctgttgttgctgcaagagtagtagaagcccttgctgccacactgcaccgggcagcagagcacgcgccacacggccgaccagaggacgcacggcgcgcaaaagagcgggaaacacgtccagccgctgcagcggtggccagccgtcaacttcttgggaaggttgtcggtcgtcttgtaggtctcgatgacgcgctccagatccgcaagccacgtggtgtccatgtcgggcgctcccattgttgctctgattttgagatgttcacgatacaatgatgatgatgagacaaagttcctctatatcttcatccccacggaggccacggcttgcgcgaccatgtagtgccccaaaaggtggaagcacgcgtgcgcgaccaggctccgcggtatcagcaggccgtagaggaagaggatgatgtccagggcgcacagcgccaggatgcgcgcggagaacgcggtggcgacgacgatgtacatggccccattcaaggcgtatgcgatcgtccgggcctccgcgcgccgtaggtccgcaccacaggcttcactggcgcacgtcaggagcagcgccgccatgagtcgtgcgtcgaaatcgtattctgagttcaaagatacacctgagtgtcgactggtcatgatgaggagcatgcacacgcactgctgactggccaggtccaggcggaggaggcggagcgatagcggcgaccgggtgcttggcgtggacgcaagcacccgactagagtgatacaggaagctcgcgacagagaacagcgcgtaaacatcgggtaaaggtccggctcgatcgaatgtcaatacgggtctcatgaagacccccgggaccatagagatcgcgttcagtgcctcacgcacacggtacgtcgtcatgtcgtccgttgccatgcccgtcacttcagtcagagtatgcatggacttttactttttatcagtttcttcgtaaacaagcaccgccacgtggcgccgtgcggtggtggttgacggacgagaactcctcgtcagaatcaagcgcgacaagtatggcaacatgacggcacattttaccccggcacgtatgcatgatgaagacgatgatgagaatgatgagaatgagaatgagaatgttcgccgtagtacaactgtgcagacgcagtcgaataaagcacaagcgacgactcatcaagcaacaattcaagaagcgacgcctcatcaagcaatgactccagcgacaacgcaagaggcgacgatgctgcaagaagcgacaatgcaagaagccacgatgcaagaagcgacgactcatcaagcaacaatgcaagaagcgacaatgcaagaagcgacgatgcaagaagcgacgcctcatcaagcaacaatgcaagaagcgacaatgcaagaagcgacgatgcaagaagcaacgactcaagaagcaacgactcatcaagcaacgattcaagaagcgacgactcatcaagcaacgactcaagaagcgacgactccagcgacaatgcaagaggcgacgatacaagaagcgagtaacggattatcagccccgcagcaccctgtcgcttgatggcgaagacactgacggactgacggactctactcatccacctgtttacctatgcactggcgctgacctgtcaagtatcaagttccggcattttcggaagtcatgcttggatcaactaaaagatcaagagtacatccaagacaaagagggtaatcttctgaaaaaaccgggaggattttggctgtctgaagaagatggatggttaaaattcctaggtcaggatggtcccatccatggcctctgcgtccacgaggtcacccttaacccacatgccatatttatccgatgcgacactgaggaaagatttgactccttttgtgacgattttgtcatgaaaaggcgctcgttcccagtaatcgactggcaacgcgtggttgtctttgcgtgcgggttctacctatcagccaatatgttgcaacgtgaacgagtaaggacatttatgagtgcgtgggacgtgggatcgctggtgacatggaaaccgctcgaggcgatagcgtcgttcagtccggggaccattacataaggccaaccaatgtctgttgcaaccgccgagattgtcagccaagctgaaaaaagtgagcactggtcactggtctatattacatttgttttatactacattgttccaacgtcaatcagtcagtaagtactaaaagcgcacccacacatgtcgtcgccggccgatgcgggtgacagcggcgttgacggagacgacgtcgacaacgacgacatcgaagcacgccggcggtcatctaggtgttgtgtcccaaggatagaatccgataaccgggtgcgaagaggtgctattgagcaatttgagatccccccctgccctgctgacgtccgtgggaaacgcacatttgcagcgtacattttctggcaatccattttcctggcaagcggcaagcgcgttcaaacagtagcaattctggtaggtcctggtatctcctcgtcatgatggcgatggcagtggtgtaattcaactttttcgtcttctttgacttttgcaggcatttgtggaggttcagaggagcggggacatgcgcagactctgcccgatggccgccttcaaggcgaggagccgagacgaccaggcctccttatcgggtgctgtgatggagaggaggagtggaaggcctccgtaggggctgaagcagactacgtcaccccccgggtttgcccgggcaatccggttgaagacgacctcatggtatgctcgttcaccggagtcgtcggactcgtcggagtatccggagtcgaagggggagcaccggaggaggacgctcccatcgggttgaatgcggacgccacctggcacatccaggtacagttccgggtccaggtcgtccaagccagcgggacgctgaatgatgcagaactccagtgagatatcaagcccgtcgaaggtcgggcccaggagggttgcgagggggttgccgccctgtgcatccggggtgcgcagcatgagcaggccgctgtcggcgttggctgggggctgttcgcgccgcaccagttgcaccaagtcgatggagacgacgacccgctgcacgctcatatgggcaaacgcctcggcccgctgctctacaacgttgcgcaagtcggcctcggggatgttgacctcgcccacagacagcccggcgctgcacacgtccacgaggccgtcaagcccgtcgtccgcgtcgccttcgcaccatgtgttgagcgtgtcgatggagactgggcatgtcagccgccccccccctgcgccggcacggggcgccctggccaggtcggcgagacagaaagaagcggcgagtctctcgaagtccatgtgggtaaggtggatgctcgcaacgcgagactgcgacagagtaatgtcgccaccagcgaacaagccacaactagcgaacacgatctgctgcagtgcggtcggtagcggggcgcagaggatgtgaaacagcatgtcggtatcccagtccaccagcttgaggactcgcagccccgtgaacaccgcgagcgctggctggagagttggcggagcgcgggtagcctcttgagctgcacgagagctccgtgatgcccgctgcgagcgcatcgtgagcttgcgcgatgccgttgacgaagcgccagctgggaagcgacaaggaggtcagcccaggcagccttgccagcgcctgcgtcaggtgcttgaagtgcgccaggtgcgccaggtgcgtatgctggactcttctgcgtcgggagcgcctgggatcgtccaacccaaggtacgtgagatccaggggggcgttgatggaaggcagcaggttgggaaggagctgcaggaggttgacgtagtccggtacgggcattgatgtcaggtcctccggccagcgcacatgcagctgagtaatctgttcgaggtcttccgagtctacgaggtcctccagtgcgtcgaagaggtcggccttgttgcggaagcccgtgaagtccagcgtcagctccttgcagtgcgcccagcgccccggcggcagtcgcgccggctcctcgtccatgaccggtaccagctctggcctggctgccaagtccaacgtgcatcgagtcaggcagtcgtccacgaagctctgcagcgccttgcacgcaagccggacgttcttccgggcgtccgcatcaagcaaatcgaagatggcatagttgatgtcgttgggcaggggcggtagggagtcgacgaggagcagctcggaggccatctgcgacaaatgacgacaacgtaactcaatacactcaattcacaattcacaattatccctgatcacaatctctctctctctcgttgaacatgcacatcggaggcagaactgaagaagcagaagcgcgcacctgtgtgatggtgtatcttgtgttcacaaatttcaagactatgctgaatgatggtcggcggcgaagatgagccccatatgtgggggggcgccgaaagtacgaccgacccacgggtcacaagcgtcatcaggagtcagcaactttcatgatcgagcaaaatagggcacggcataggacagcaactgcatcatgaactgcctggtattcctggagcaggccaaggagctcgttgagcggcgctcatgagcaaggagtagcctgaagacgacgggctcgagggagctcagatcgacatgtccgacgatgtcggccaggacgttgacgagctcgacctgttcgtcatacggcgggatggctgcaccgtccaagcacgcggcagatccacggaataccttgactgcaggagcgcagcagcattcttgaggactcttgaggatttgttctacccaatgttcggggctctccttagtctaatgttttgaacgtcctattgtactgcctaataagtcctaggcaactggttgatgacgatgctggtcatacgattatcaaaccacccaaaccacaagaagtctttatcgctggcggtcgtgttgtccacctgccatgtcccgccgccgtagttgtcgtgctcacagaaccgtacagacgtatacggcccgactttcatactgcaagccctgtcattccaaaacacgccatgcgaatagccaatgttcggcgtacttgacgtcaagagaagagattgcccgtccatgttgttgtattcccagatgcgcacgaagccatactcggggttgatgttcatgtcgtacgtctctttgatcgaattgttcatgaagttgttgttgttgtaaaactctcggcgcgtcatctgtcggtctgtgtaaccaccaaacatcccctgccacacaaaaatactggccagcacgtactcttccatgtagatctcattcaggaggtagttgaccgtggcgtcctgggagggattgacgccaaagacgtagcccaagccgatgttgatgttgttcacggcattcctgggtgcaacgatgtaacgatagacctgcgtcttgggaatgtcatgactgactcggttgtagtccaggaactttgtgagttcgtcgacaacattaccggagtaagcacacgcatctttcaacgtgggttgggcgttcaagacttttccaaattcgttgatgtcggccgtcgacagaatctcactcaacttttggaagatgtccttggtggagttgattgcgtccgtgtaatccaccggcagagtggggcgcatctgaccaagcctgatgaggtaccggatgcctttgatgacctctgttgctgccttgatcgctagttcaacaactctcgccgagttgagcacgcctttgaactcccgaatggcgtcggtgaaatacaggtctttgacgttgatgccatgactttccagcagccaatccccgccactcgacagattacccgtcaggttgactgacgctgcgaggtcgatccccgtcctctcatgcagctcttcggcaaaggacttgtacgccgggttcgtcagtaagcaacaggagattaggtcaaaccggttgttcagcatgtagtgcttgatctccttgaaacacttgatgatggcattcatcgccggatggttcttgcccatagcgacacgcccagatgagccgccaaaggagaactcagaaccctgcagcccatggaacacccaagctgcactcgcaaactgttgtcgcctgaaagcggacaagtccttgaccaaggacttgaaaatgtggttagcatcttgatcgtaatcatagagtactaccgcaacatcggcctgcaccgcggacacgatcgtttcgtaatcgactatgttggtcgacacaatgaggagttttgtacatgcctctggcggcaggtgttcaacagctggtcgatttactattggcgcggggtgagcgtcgcaaatgacaaggagatcccttgacgtcattgactccaagaaggcaggtatgccactcgggcattcaactctgaaggagtcctcgtctacatcaatgagcttgccatcaagcgtcgtagcctcgtcagcaacgatgtgaatgatttgcccctgttcaagacgtaggcgcgcaaaggtgtcgccatgtgcataatgagtcgcgtcgactgtgaatattactgtctgctcgcttacatcttctatcgtcacggtcgtagacctcacgcttagcgtcgtcgtctgcattttaagagtgacgctacggatgtttcgggatgcggatttttaaatgggcttcaaagacttcatttcggcttgaaaaactcggataatgcaaaaaattgattgcaggtccattgtggttcatttggttcgtgtcatcctcagtccacagtcctcagatcaccagatctcagacctcaattgtgctcaattgtgtccagtcttccaacatgcctccccaccggaaagggaccgccaaggccagggccaacgcaagggccagcgacgatttcaagcggcgcatgctccaactgctagtccgcccggatgccacagacagcaccgtgctcgatgagctcgtcgtgttcatcatggacgccgacatcagtcacttgtccagacgggatttcctgggactcgtagaggtcgccaacgcgcgcggcttttgcaacgtagctgagcagttcgagtgcttggccgatggagcggcgcggtaagccaccctcaaaagatcaaaacctcagaacctcaaaaccccaaaagggctgcaacagttttagaaagattttaagttttttgctcgcccctgtcagcctgtcaacgtttcgtccttgtcgccgctcaaaagagtaaataaagtgtaggaagaagaagacatggccacagaggagtttgtcgacactacgatcgcggcactcaagatcatcggcatggtccccaagaatgggaagctctgcgtccgcaagggccagctctgcatcgacctggtggacacgctgcagccgtaccggcgctggttcaaaggcgactcccgcgatgtcacgctcatgcacatcaggggcacgctgactagcgcgatgaagattagcaacatcctcatgtcaacttcacatccaagaagtgcagcagcacacgcgaccatctggacgctcgagcgcctgtacaatgagttgaacaattgtgaagctggcatgcacaacctcgtctcgacgtacactggcgactccatgatggtcgccaatttgaacgcgctcctcgatcgcgttgacgagcataaaaatgaaatggcgcgcgcgctggcgtccatgggctcgctcgtggtcaagcgtggtttaaaccaactgccagatgagctcccgcagttcgcgggggatgccgtgcctgaggaggctggcgtggaagacgccccgccgcctgaactccaacctcaaagcctgctcgtgactgcgcacacgcgcagcgatgtccaagggctcgctgggaacccccaagcgtggtcgcgtaaggcgctccagcacggcgctaatgcggtgcgccacgaccgctagggtagccccaggctgctgcagcgcgtcggacttggtcagcacgcggatgacttcctcgtcaacaaagcggtccacgaccgacaccgtccagctatcgacttcataccggatgcaggccctgaagacgctcccatgcgcaagacccctgtggagtcgacccgcgagcatgttgtggagatcatcgcatattacagccgccagctccacggggacctgctcagtcggtgccttgttccacagcatgtcttctttctttttccttcgttgtgtttgtgcttgatccgacacagccgacagtgaacagcgaaccgaatcaaagactaatcaatattttacttagtcaagtcaagtcaagtcttgttcttttcgtagactttcctctctcgagaccgctgactcgttgattttgtccatgacgagtgtacggagacgccgttggagcgcggcgtccgtggccattcgactgagaccttgacggaagcgcatgaagttgagcaggtcgtccttgtccttgaagcagatcccgtccgcggcgatgacttttaggccggactcgtgcaactccccgacgtgcaccgctatcttgcgcccgcagacgtaccttgccatgcgcgttacactctgtcaagtgaattttgttacacctaaaaagatgaggaatacaggaagcgtcttttggtgttgcaacatgcactctcaagatagacgctctctggcgccccatgtttattctcttttgggaagcttgcggaaaactgcagccatccttcaggtgtcacactcctccattcatcgttggctccgggaccccagccgtaaagcctacaatacttcgcgacggttgcaactgggcagagctgctgccatcactgcagctctccgggctgcaatagcaagcaatccactgttgtcttgtcgcaagcttgtcaaacttatccttgataccctgaacatcaagatctctgctgaacttgctcgcagtgtcatcaagtcgtctgggctaactagaaagaaatcccgattctttggctctcctcccgacctggccgagaaaaccatgcagttcctagctgcccgtcaagatttcattcagcgggggttcaagttctggtctcttgatgaaacagggtttggtcggcatggcgctgcaacatatgggtatgccccaaaaggccaaccgctgagagttcaacgtcgcactgttcgatgcaccacacagtctgctgtggtcattgctgatgaccaagggacgctctttcgagaacaacgagtcggttctgtgacctcagaaacgtttgtcaaatttctcgagcgcctcacactacctgtcaactctgtcattcttcttgacaacgtcgcatttcacaaaacaaggggcgtcgctcaagtagcttctcagcgaggatggcacctgctctttgtccctccatactccccatggttcaaccccattgagggtattttttcgatcgtcaagcgagcctggtattcagggtgttcaattgacgaagcctttgacaaggtcacacacacacaccaacacactgcagcatttttccagcatgccatgtcactggaaggtgctggataatgtggggtatgtcatataaagaccgcgggagttacacctaaagaactacggcggaagccccgactatggagccaggctcctctacagacttagcagcactaaagaaacgaaagcgtcccgacgttggccagaagttcaaacagcgcaaggagttcaaggagacagtggtcaagtgctccctccggagtggtctgatcggctctggggaacagaaggacaagttcgtaaaagctattgaggcacgggtcgtcgcattgtctcatcgtgtcgtccttgggacccgagctctcggtctcttggttcgtcgcatcttcgacggtgtccaggatcttcaaaggttcgagctcgacatcgacatcaccgatcagaccttcctgcgtcaattgctcctagggacgagcggatgtcataaggctaaccctcgaatcactaatctcttccaagcacacccggagctcctgtacgacgtccagaaccgccatgcctccgatcggaacgtctattcagacgctgcgagagcgctgagcgtcaacatcagcaaccacttcaaggtcaacctggttaaggttgtcaagaaggcagtctaccagtgtgctccaggcactcgagatgaacacgtcgagatcctcttccgcatctgtggatggaaccggaagccgtcggagccgtccaagcagccgtcgaagaagcccaagatgacaccacaagcggtgtcgctgaccgtggaacaactggccttcgtggagacctgtcgtggcgtcctgggattggcagatggaaagcagatcgacggccggtggctgaagctcaagacaaatctccccaacatgctgaagttcttcatgcacaccctgcggctattggaggcgctgccgaacgctaaactcatcaacattcttccattgtgctgtcggaaatgtcacttcatcaccattgacacaagcagcctccacggtatcgcacgtgacgcagacctcatctctcagggctgcaccatggatgcgttctgcgaattcgggacatcccagtgggacagcatgctgatgactgacaaattccaaccgcacgggggttacttcaccggtaccgtggacactgacggcgtctccatctgcatccactacaagcgaccgtgcaaggagtcctcaacatcgccatcagataaacggagtgtccagcggccgacccaggaggagctacaggcacaccgtgtcatcgggatcgatccaggtcgcaccaacattctctttgcggccgaagtctccccgagtggctccgtgaagacgtggcgtctgacgcgatcacaatactaccgggaggcagggatcgtggctgccaaactccagacagaacgctggcacgcacagagcatccgaaaggagctgcaggtgatgtcaacagtgacgtccaaggggagcaccgtcgaacacttcctggcattcttgacggtcgacctcgcaatgggtgtggcaatctggaccgagcatctgaagcgacgatgggcgcagcagcggttccgtctccatggcggcaagaagcgggttgttgacagattcttcaatcaaatcgagaaggccggagcgagcgttggcgacgaccgcccgatcatgatggcgtatggagcaagcaaggtggcaccagggggtaagggcgaggtctctgtaccgacgagtcgcgtcttccgagagtgttctcggcgatatccaacgcacctcgtggatgagttccggacgactcgggtctatcacgcggacgacagcgtcattctggagaaggttgcggtcaagaaagtgatggggagtggagcattggagacagtcgcggttcgaggcttgctatggtgttgttccaccaagcagtcgggaggcaagttcatcaaccgcgacttgaacggagccctcaacatcctgcgctgcctgatgctacctcagcgccctgtgataatggatcgcgggaagtgccggggagagaggttgaacgatcgcattggcaagttcctcacgaagtaaacgaacatgaatgctagggggtagaggcgtcttggtggagagctctactgcggaggcaatggctcgtgtcttttaggatgtaggctgttgctgaggaagcaagaaccaggctctagcgttggagtcgggtctcgcgtctgctagggtgcaaagagacgcgagggagacccgatctatacacacagaagttggaagcaatgggttctgaggtgtctcagaattcactttgccgagtgtagcagtttttcccacttttcggcctctttggcggccgcatctgcgatggcctcctccacccgctgcttctctagcttgagacgccgttccaggtccctctggttcgcgagaagctgcttctcgacctcctgtgcccgctgcctttcctccgcgatgacctcctctgcccgctgcgtttccaatgcgaggaggcgctccaggcgctccttctccgcaacgagctcttcctgaacatcgtgaagtttgagacagtcgaggcagtctgcactcaagtcgaggacctcgatgagccgtccgggcttacgcttcggcgccataacgggcttgaacagacagcacgtcgactgcactcgggggacccggtctggattcaatttttgaagccaggaccaaggaccttagactggactagactagttcagtcaggggtcactcatgggatccgaagccaacctctcactgtactcttgagcctgcaaaactcgttgcagtacgcgcgtgtccggagagtccgccccgtatcgacgtcaaacggaaaaggccgaccgcacgtggccgacgcgcagcagcccatgaatccagagagggccgacttgcaagcgtataccctatttaagctcgtcaagtccttgaggagcatcaggtaaagatcaccgggcgtcagaagcacttgtcgaccaaagcggtcttcaccaacgcacagcgccccgcccacctcaaagccgacggtcttctcgcaccctccttgacccttgattagagcaaacccgatcgtcccccggaatgggataggaatgttcctactatggtcggaggaacacctcaacgcaaagagcgctgcaaactggtggaacagcgactcggcgtgcatattgatcacctcggtacctcggacaatgagcataatgaggctacgcctacgcgagtctgatacgtcgccttggtaccaggcggagttccccgagacgcagagctttcgagttgagtttgtcgatgatcgatgattatacggaacaatgggtttgtgaccactgggctcgaccgtgagcattcccgggagcgtgaaccacttgcagcaaaagttgattggtagtgctgatggtcgcccgttcgccgtgcaaaaagccaaacagattaggttcctagcaacgtagacttctagactccagaaaaggctccagaaaggacttcagacaggtctgccgtcagcgatggcctcgacaagtgagaatgacatcgtccccgttactgattggacccccttctacccgtctaccatgtcaggccggccagagtcgcccaactcgctcgcagacaagtactgggccgagaccaaccgcttggtgaaggaacgcctggacgaggaatcgctctgttacagcgatcgggtgatcaggcgatgggggcggaagctgccggaggagcgggagtatcaagcggaactcaacaagtccgtcagtaggtcctcgaccgtctcgaccgtctcgaccgagtcgtccgcaccgaaaatgcggctgacacgcctgcagcgcgcactgcttcgattcccggcaacggcaagtccagtagcaatgtgaggaaacgtgccgtacgccgattttttgccgtactcgctgcgatgagacttgcgattagagctctgaaactcctgaaccgcattgacactgtgtcaagttaattgacagacgacaggagagacgacgcgacagcctgcttcatggcgaaagcctgcttcaaatgcgggactaaagtaagtcacgttcattcagtctgatatcatgcgcgtgtgccgagaatcaaaagtcgacgcgcctttttttgcagaccacgtcggcctggcgcacggtagagatcgacggcgccctgtttaacgcatgcaatgcgtgtggcgtcaaagtgatgcgacgtgaacgccgatggaaaggaaatcctcccagcaagaagcaaactcaagacaacgatattggaggatcgcagatgcagacgcggcgatcgacgcggtcggggagcaagatggcaccctccggtccggcgcctcccgccacacccgccagcgcgccgccggcggagaagagcaagggcaatggcagggcacgcgcaaggaagcgcaaggccgagtgcgacacggactcctcccaggagtcgcaggatgaggcgtcggccagagcggcactgcgaaagcggcgtctggataaagtgcgggcgggcctggtggccctgaacgccgagatcaactccatcatcgcggacctggacaaggtccggtcctgatccgatgctgacccgaacctgaagaattgttcaaggcgtcatgtcgagaagagacttttcgagttccttttccgcctccttgattgcgacctgctgcgcgtgcatgtacacagacgccaaccagatcgacgtgccgatgttggccacggcgacgaggcagaccagcagggtccggatggtgctccatgcgccgcagccgccggtcgtcaaacagtttgtgtcgtagatgaccatggcggtcagcagacccacgatgagcgatgctagaagcatgaaaccgatgacttggaactgggtcacgtataacgtaatgacaaatgagaagaggtgggagatgacaaggatgacggcgaggaaccgcgcctggggtgagaggtgcttcatgaggtggctgggtgtcattggtttggtttttgtactggtgcacaacaactgaactgcttgctgtatgagcacgagaatatattggcggtcgaggtcatcagagtcattatcatcagaagagtcaaaacatgtgctctgagacgtaaatctaaatttaagtctctctcttcaggaaaacaagagcaacatggcggggatctcgttgtgtaacatagcacaggttgtctacggcccgccgctatggaagaatctgatcatcaatggcgatatggcgatcgaccagcgtaacaccggccagccgatcaatattacggcagacgacgtctactacggcccggataggctcatctgttcggtgaacactgggacgttcctgccgtcctatgagatgcagcagacccttgtgaccgaccttcagaacattgccacggccgcacgggtgacatcaactggacagaatacgttcaaggacatctaccgaggcgtcggcctgcagtacttcatcgaaggctacgccatgcgccacctcttctgggggcaacagaacggttccccggcgaccttctcgatgtacttcaagactaatgtccccggaactcactcaatctccttcaccaatgaagcgcagaaccggtcctacgtagctcctttcacagtgacgacgccggacgcctggtccaacgttcagctcgttgtaccaccgccaccggtcgggagcggcttctcaagttccaatagcgtcggcctccgcattgacattgattacacctgctcacacttgacgacgagccagagcaaccagtggctgccctacatggccactgtcccgacaggatacgcctcgaacatttttctggcgtcgaacaactacgttgagctcacgggcctccagtttgagcagggttccgcggcgacgccgtttgacaagcgctgcctcccgatcgaggtcccccttgcgcagcgctactacgagaagagcacgccgatcgatgtctcggtctcgtctgcgtccacggatgccatgtccaccgccgaatccgtgctcctgaactcgacgaagatgggtcaagtcgcctttcagaccgagaaattcagagcccccaccgtcgatctgttcaactcggccatgagcaacccgggcagcaacttattcaacgctcgactcgccacgggtgctaatacgactgtgtacccatgggcagacaagaagtccctgatcctcacggcgggtccctcaaacaccgcgaaccaacccatctccacacagtgggctgccgatgctgaggtgcgaccggcgcgaaccatggcaacgcgcggggccgttgattgggtcacgacgtttcgcggcacgctcaccacaggtagcaatgcagttatagccgacgttgtgcaactgtctgacgaaactgtcgtcatcttaggatcgtttacacatccggtccttgcagcgtacagcgcatccgacccaaactcaaacgcgtattccgcgacgccaacactgacaaagatagggaccagcaacaacggatttctctgtaagtatgatgcgcgtggcaccgtccaatggcttgctagcctgcgaggctccaacaacagtatgaatccgaaggcggtcgtggctactgcggacggcggtatagctacatcaggctactttggatctaacttcacagcgttcaatgctgacggtactggtgttggacgacaggttacaagtttggggggggacgacgtgtaccttggaaagtactctagttcagggaatgtgcaatggctggcgagcatggggacccgccaaaccgaaggagttccatacatcacggctatgcgcgatggaggagtcgtagtcacgtttttaactgccttctgcaacttctcggtgctcaacggcgatggttcatcatatagcaacccaatgcagtacaatggaatagcatacggtgcagtcattagctacaacgctgcgggtaatgtccgatggctcaccaaaattgggaataatccaggttcctgcaccccatcaggtatctgcacgaccgcagatggtgggtttgcggtaacgggcagctatagcaatgcgctggttgcttacagtgcgtcgagccccaactcaagcgcatttctcacacagattaccaactgtgttggtgcaaccgattccttcatcgcaaaatacgatgcctctgggtcggtccaatggctggctcgtctgtccagtgcaggcgaccctcctccatcagctatatcagccacgaatgatggcggtatcgttgtttgcggcttcatcaatgcactcggtggcttgactgcatatcacgcgtctcagccgaatggtccggggtttggcacggtgttatacaatactgctcagttcgaagggtatattgtcaaatactcgagcaatggaaacgtgctgtggctcaccaagatcgcaaatgcatctgtcaccaacgttcaactccagaagatagcatgcctgagcgacaatagcgtcgttgttgcaggatactctgctgcggcgggcgcattgctagtatacagctcggacaacccaaactccaacgccgcaatcctcggtagcactatgagccaggattgcttcgcagtcaagttgagtgctgacggtattttcgaccgagaggtcagtctgctagctggcagtggtaacagaaacattactcaactcgtaccaacatcagataatggactcttaacgaccggttttgcgagctccgtattctcgcacatcacggacgcatcgagaaacccgacgacgctgcagctcggaatacctcttccacttgtcatcaagcacaccaacatcttggtcccacccccatccgacctcatcatatctaaatgggcgagacgctgctcatccgctgatggagggtacaacctcatagtcgccagtgtcagcgattcgcaaggcaacatttacgctgctggtccattcaccgccacgagcttgactctttacaatgaggatacaacgggtgcaacgctgacaaataccggattgacctatacgtttgtggtcaagtataccccgctggggcggatcttgtggacgaccaggatcgtgcaatcgtgggtgagtacgactggcaattgtattagtacaaccatcgatgatgggctcatcctggcaggtacctatgccgggtccaactccattatctatgactcgacgggcgctacggcaggaactcttgcagatagcaccttgaatacggatggctatgtcgcgcggtttacaagcgacggatcacttgcatggtcccttcggttgacgtgcggtggtgcgatcgctctaaatggggtcgcacagctccagagggtgtccatgctgaatcctttgtcaaatgactatggctacgtagcggttgggtcctactacgggacgtccaacttgacagcttatgacaagaacggcctggcctacggggtgacgctgcctgcgtcagcgacgcccagcagctttgcgcttcgcgcgggctcagatggatctatcgcgtgggtcctgggcatgggctcaggttcaggttccgagtccaacgcagccatcggcgtggctgccgacagcgtcaacgcgagcttcacgatcggcggcacgttctcatcgggcacctttgccgcgtccaactatgataactcgggcctcgggggaagcctgtccaactacgccgccggctcgtccgagtcattccttgcgagctacacggctgggggtcagttaagatggctcggcaaggtctcgtcacaagggagcaacaacgcgctctgctcgatcaaggtctctgccaatagcgatgtctacgtcgcgggaacgttctcaggttcaagttcgacacagttctactcctccaacggtcttgcatcctcaaattcggtggcggcaaccggaacatccaacatcttcctcgcaaagtacagcggcagcggcgagtgtctctgggctaccaagatcggcggcgcctgcaacgagtcgaggcccgtcctgacgacggttccgaacttcccgagcggcatcctcaacaacaatggactcgtcatcacgggcctctcggacagtccttctctcattgcgtaccatgccagcaacctgtacaatacaaatgtccgtgggttcacgcagggtctcctctcaaatgcgagtcctgggacaagcatgactttcatggccaagtactcggtcgatggcgtcgtccaggcgacctgcaagcatggcgacaacaacgtcatcgtctccatggcgccctgccccgacggcgacgtcgtcttcggaggctacgccctctcgaatctaagcttgttcaattcgctatcgaacgtctcagtcacttcgcagagcggctttgtcgccaagtacagctgcagggatgttccgtatcctttgaaactgggccagactcagtgggtttctcgtatcgcaactaccggcgccacgagcgttcaagatactgacctccacgcacacacggacggcgtcgtcctcgtcgggaacaacacggtcacagggacgaccatgacggcctactatgcgaacggcgagcagtggccaacatcggcacacgcgccaaacggaaaccagagctgcgttgtcagttacaagcaagatggtgcgatcaattggatggtgcggctcttgaagtcaagcggcaccggactcaccgtgccagtggtggcaaggttgtccaacggtaactacctggctgctgggtcctttgatacgagcactatcctcaacgccgacaatacaacattcgtgagttcaaccctgacaaacattggtctcgccgacgcttacatggcctgctttgacagctccgggacaggcctgtggaccgcacgcgtcgcgcagccctcgggctccgggtcggtcagcaatactcctaccgcactgataccgactcccgatggcggcttcgtcatttgcctgtcatcatacgagacgggtaacaccaacggtgccgctgcgtacagcgcatcgggaaccatgttcgggactaccctgacgctccaagacagttcttcaccggatgtagtcctcgtcaagtactcggccgcggggcaggtgcaatggttgaccaagtgcgcgagtaccgccatggagcgcccgttgaatggcgtctcacttgctgatggctccatcgtcattggaggctattacaccggcgccgacctgtccgcctacaacgcgtcatcgccgaatagcgcacccttcgcgacaaccgccgtctttacgagtacggcgtgttacttcctcgtcaagtactcgagcggaggaagtgtcagctggctgagccggcttgtttctggcggtgcactgggggcgtactccatgaacgcaagatgcgtagcgacaactagcgacaactgcgttgtcctaaccgggacgtaccagacttctctaattgcctacaacgcaacgggtagcgcgttcggaacgagcttggcgacaagcagcggcgtcgatatcttcatagcaaagtactctgtcgtcgatggtagcgtatcctggatcgtgcgtttcagctctcccaacgccgagtcctatccgacagtgagcactctatccgacgggcgcatcgtcatcgcgttcgccacggcgaccggtacggtgacatactactcgccaaggacgtttgcttactacagcaacattggcatcagcgccacgagcgcaatcgccgttgccgttctttccagcatcggcgccatgacgcaggtcatgacggcgacgtcaaccacgggcttgacatggccacaggtgagcacctcacccgacaacgctgtctacttgacaggcggctacacgggttcgggcgcaggcacggaggtctccgtctaccacgcggataagagtaaattcaacacgatggtgccttccgctggcgacgcaacagcgcatcacatgttcctggccaagtggcagttgtgagagatgtgacaaataaaatgcgacataatgcaaacattgttgcgaaggaaaggagaatatgccgttaccgtcactgtccaacttggcgtgttacgcgtatgggccgcccctgtggcgaaacatgattgttaacggcgacatggcgatcgaccagcggaacaccggccagcccatcaatattaccgctgacgacgtctacttcggcccggataggctcgtctgttcggtaaacacgcagacgttattaccgtcttatcggctgcagcaaaccccagtgaccgatcttcagaacatttccacggccgcacggctaacatcaaccgggcaaaatacattcaaggacatctacagcggcgtcggcctgcattacttcattgaaggctacgccatgcgccacctcttctggggacagcagaacggtaccccggcgaccttctcgatgtcgttcaggaccaatgtcactggaacgcactcaatctccttcacgaatgaaccgcagaaccgttcctacgtagctcctttcacagtgacgacgccggacgcctggtccaatatccagctcgtcgtaccgccgccgccggtcgggagcggcttctcaagttcgaatagcgtcggcctccggattgacattgactacacctgctcgaacttgacgacgagccagagcaaccagtggctgccctacatggccactgtcccgacaggatacgcctcgaacaccttcctgacatcgaacaactacgtcgagctcacgggcctccagttccagcccgggtccaacggcagcgcctatgacaagcggtccctcgcgatcgagcttccgctcgcgcaacgctactacgagaagagcactccgatcgacgtctccgcctcggcgtccacgggttcgacagacgccgccgacatcctgaccatgagcgcgacgaccatggcacagacgctctacaatacagagaagttccagcagccttctgtcgatctgtacagccccgtcctgacgaacccggcaacggcccggtacaacgcgcgtctgaccacgggcgccgacatctgcctgactccatcgtcaacgaagaaatccctgatcctcgcagcgtcgacgtccaacgcctttggcaagaacttctggacgcagtgggcagccgacgcggaggtcgacc

SEQ ID NO: 263 - DNA, 21965 bp, unidentified; identical to SEQ ID NO: 262
  source 1..21965: mol_type = other DNA
  misc_feature 1..21965: note = Fanzor polypeptide

SEQ ID NO: 264 - DNA, 20891 bp, unidentified
  source 1..20891: mol_type = other DNA
  misc_feature 1..20891: note = Fanzor polypeptide
gcggttgtatgaattgttcagacacgactgtggatcgtttgcagtcttctgttgagctggaatgtcaagatccaccgcatccgctccgtgtgcaaacatcttagacaatttaacgtgtgttgatatcactgaaagccctccgccaacgtctaaattctttgtgtgatgacggctcaataaacatgtgttagctagaaatggaacagctagttttgctagtctccatgacagcacgaaatcggcgtaatttgtaaactgttttccatttttttctgggacacttataattgttctagtcaatgcacagaagtaccctccgacatgcggatacgtgtggtgttgcattattttttgagaaatgctgtacactgttttccgtttttttctgggacacttatatctacaggtaggtgtagatcgattcaaaatttgttacactctattttttcaggtatcaacaaacgagtcctcgacatcctggcaccaccgcttgcatttgtcgcacacgtcccagcgcccccccgtctccaagagatcctgtgggatatgcacatgttcccgacggatgaggtccccctggtacgccaagcagcaaacatgtctccgatagctcctcctgtgcacgcgggtcccacactccttgcgcgtccaccgcaccatggccaggtccccgatctcggccgcaaagtacggacaacgatcgcgtatgtaccgccgcacttcgtcgttccccgcctcttgggagcgcgcgcacacccaccggagaacctcaaagttgcaggaagccgccgccgccgttgccgccgacgaagagatcgagtcggcccccacgtggcggaggaggcacagggcgccttcgatctcgcggtggaatatgcagttgctgatcgcaatggaccactccgggtcagtaaccggcaggttcgccgtcgacgcgatcatctccagtatctccacgcacacgcgggaccccgaatacacgcgtagcgcgcgccgggggttgatgacagccgccggaagaaccatcggtaacaaggcgcggagctccttgtacgcggcaaagccctcgtccgaccgtaacgacatgatggcgacatccatggaaaacacaatctttcctcgtctgatcttgcgcacaaccgtctccacctgcccgggctgtaccacgttggcgagattggactgcacctcgggcgaggtcacaaggtccaagatccagcgcgcggtcgcgggagaaactgcgcgggtgcacacggcctccaggtcccacttcacgccccgctccccgagccaccgcatcagctccggcgagtcacgatggcgcttgaagaggacgtcctccccccagtgcatgaagtcatccgcgctccacggagcgtgcatcctgtccatccacttcagcgactcaacgtgcccctccacggcggcgtggacgtagaacactttttccatatgcagttcgggaggcgacagcgtcgccagccagtctagtacctccacgcgcccatgacgagccgccatctcgtacgcgcgcggcatgtccacctcgacgtcgcgtattgcgaaccaccgcaccgcgtccatgtgtccaccgcacaaggccatcataagcgcccaatccatcgggtacgggcacgcggagttctccgcccaccgcccgagctccctgtagtgacgcaattcccgcgcgtcgacgtggtcgaaggttgggcgccggcggtttatccagtccaggatgtgaacgtgcccgttacctgcagcttcctcgaagatcctcgcctcgacgctgcaccaggaccacttcaggaccgcccttgcgcgcgccgacatgcgctcctgcaacggcggatcccgaagccactgcagaacgacaagattgccgctggctgcggcggcctgcgcggccatgaagccgcgaggcgaggcggggttcaggtgttcgcgcaggatcgagggcggggacgcatcgtcgcccccgtccccaccatcggtcccggtctccgtcgcaccaaactcccgaagcgccacccaccggagcacgccagtgtagcctccgcgcgccgctccatcgcatacggcgtgcatgtccaccgggacgcgagagtcgcccaccaacatggagtccaccgcaaagctcagaaactccgggtcgccgcgcgctcccagggcgcggaagagggcgcgcaaaccgccgctcacgcgaagcgcctgtcgcaccagtgccatctcctccacgcaccacctgagacgcgcccgagaccccgaaaccgccgcggtcaccgccagggtgcgcgccggggcgggggtcggcagggaatcgagcgtgattgacagcgcatctccgtcgtcggcgccgggactttgttggggttctggtggggggtcttggcggagttcctgatggcggtcttgcgggcggtcaggatcgccgagcgccgcgcggaagagccgacacgccgccgccgccgccgcgcggtccagggcctcgggcaagaacccgaacacctccgtccacagctccacaggcaaaaccgccgggaagcctaccaccacggataccggacgctccatcgtcggagaagcgaaacgaagtgaagtgaagtgaagtgaagtgaagtgaagtgaagtgaagtgaagtgaaggtagttgcaggtggggttgggcggccacctggccgaagaagtggtcagtgtggtggatatgcaatgtgtgcccaggtttttatcggtatcggcgcccgcccgcctacccgtgccgcgcgccagcgtgtcgaaaaacattttccctcgtacgcgcgcgccagcgtgtcgaaaaacggtttccctgtacgcgggtgccagcgtggcgaaaaacggtttccctgtacgcgggtgccagcgtgtcgaaaaacgttttccctgtacgcgggtgccagcgtggccaaacattccccccacatgttttgttgatcacatggcgtatatttggttgtcatcagacgagaccaccctggaccacctcatttcattttgactcaccctccctcaacccctaaacctcccgttcgtgagcgagagaccagcgcaccacacccaagggccagcaccccgcacacacccaaatcccaaagaacatggacagccctcccccactcaaacgcgtgatcctcaaggccaacgccgcgcttctgtcgtgcaccaagatcaacaccccccactccaccaacaccaaaaaacagtactgtctgcgcacggatctggccgccagggtgacgccccacggcgaggaggcgttcctcctgatcagcgacatcgtctaccactttgcgagcgccgaccgcgcccgcgagtgctatgtacatctcatacagagcgcggctctctatgtgaccgggggcacggacaccgtgcgcgcaccgagactccctgatctcatagctaaaggcgaggccgctttgctggagaaggatcagttcgcgacgcagaacattgttgttgttacataaaacaagctttttaaaccgtgtaaggaaccgtcttgtcgccgcgatcccgtttcctcttgcgcgcgcacttggggtgcctacagtgaatgttctgccccggccccatccacccgaacctgtaccaggcgtagtttgtcaggagctcctcgccctcggctatgggagaagcacagaaaacgtacacggagatcttgccgaccgaacgtagaacctccagtctcgtagcctccggcgccgacgccagagcttcgccggtcacgctcaccctcgtgtgaagagcgtgcgtcgaggttacctccatgaagatacagttggagtgttcacaacacgcgtggttcacgtagtggaacggctggagcagcgcgggggggttatccgcgggcgggaccatcacgcgccacaccttctcgccaccgacgtcgatctggcccttcaactgaaacgtcagaggcttcgtgaccagctcggacgggaagctttgccccacgagagcagtccctctgtggcggcctataacgtcgttgatgccgaacgcgcgcgtggaaaacacgccaagaccgtggacggcgctcggtcgaaccaggacccgcggctggacgggccagcgcggggaaaggcgggtcaccgcctcggccatgtgcttgttcaccaggcggacattcgggatctcctgtcgggtcgctgttagggctaccaactccaatatcgacccaagcacgtcgtcggggagcgtcggagtcggcgtttgggcttgggtttgggactgggttcattttggcgtcgggttttgttgtacccgttctggcgttattggcgcttctggagttgtttgggtttgggtttgggtttggacaggcgtcaacccccccgcgtcgtctacgttgagttccgcaccgagaatgttagcccggagactccccttcgctttctcggccgcggccaggtcgtccgtcaccaagcggagagcctccacctccctggcgtgcacgtcccgcacggaaacgcgacacgctagggtccttacctctcgggaaacagcctccttctgcgagataaccattgtgtgtctccgacggcgggaaaggtcgggcgcggggggcgggggagcgggcgggggagcggggcgcagtgcaggtgggcaggagggcaggtagcaggaaggatcctatggaaggaaaaagacaactgtcctgtccgggtccggaggcgcggcgtatttatattcagttatctggttttgttcagcttcttcgccacttcgattaactcatcgacgttgttggaacacttaagcagatgagcttcggttatcttatgctcctgacctatcgtggtggccaattcaacaagatgtcggggacttgggcggtattttcgagtccacaagaaatggtcgacgcttaacggtaacccgatgagctttgctaactcaaccaaagtttgtaggtcgtctgaactgggatccccccacgaaaatctctcaagcaaaccgatcaaagcctcattgagatcctggttattctcccacacatcggcgggaatggtcacgttgtcgctgcggctgtcggttgccatgatgactgtccggatacggtctaggactttaaatgctaaaacgcataagaaattcagtttttcgatatgcgacccgtcgccacggacggaccgtggtaaaaacaagttaccgttgagaaatgtcaggtatcgaaaccgggtgtccttacactaggcgcagagctcaatcgctgccatcgaggaatctagccatgagaaccatggcgccaaaaatacgcatggccttctccttgcatttcagcacatactgcttgaaatgcccgtcatacttgtccgcatactcgacaataatcccgaacaggtgccaggtggcgcttcgaacttcgtcgaagtcgagttcatctttcctgcgaatagactgaacggcggtgtggataccatactgcagagcaaacatgcaatctctgaactcttgaagagacgaaatgccattgttgttgttctggggatccatggtgcgtgtgcgtggtaagagcggttggtgttggtgctgttggcattggtaataggagcgctggttgtcttgagcaggggacagttttacactcttcactttttcgcgggcccgaaaaaacaccccgatccgagatcgcttgcgtacgcttcacacgaaaaataccgttccccccaaacgcgtcggtatggcccacaaggacaacgttcgcacgagaggtcaaacacgtttgttgacccctacagaagaaaacacggctaacctataacttaagcagagcgagacagtctgcacaggaaacggatgcccggcgacgtcgccatgatccccgatcccgccgccaccgagagcgacagagactggaacaacgtgcccgacgacttggcgggcatgttcgcagacaacctccggcccgcggacctctgggcggcggccttcgtgtccgcgcagtggcgcaaggcctgcgacgccgccagctggaagccccgattccgtcacttcctattcgggtcctgcgtgatcatgaacaccgccgcgcgcgaggggcgcctcgagtacgcccggtgggcgcgcgcgaaaggatgcccctggaacgagtggacgtgctgggtcgccgcccagggcggccatctcaaactcctgcggtggcttcgcgaaaacggctgcccctgggacgaatggacgtgctaccacgcagcgctcggcgcccacctggatgttctcaaatgggcgcgcgataacgggtgcgactggcacgtcaacacttgctttgccgcggcgctcggcgggcacctggacgtcctcatatgggcacgcgagaacggttccccctgggacgagcacacgtgcgaggccgctgcacgcggcggccacctggacgtcctccgctggctacacgaacacgactgtccctggaacagctcgacgtgcgcgtctgccgcgcacggaggccatctcgacgtcctccggtgggcgcacgagcacggctgtccctgggacagatggacgttcgcgtccgccgccaagggcgggcattaggaagtcctccggtggatgcaagaggagaactgcccctgggacgaagaaacgtgcgaggcggccgcacgaggcggccacctggagattctcatatgggcacgcgagaacggctgtccctggaacagatcgacgcgcgaggccgccgacgaggaaggccacctggacgtcctggcgtgggcgcgcgatcacgggtgcccctgagacgagttcccacagacccgcagccccgagtatgtctctgtaaatttaacggatcatgagatcgtggagactgtggaaaggggttgcgttgaatacaggatggaccatgaatagacgcggttcaactgtgtcatttttttctgggaaatagtttacaacatgaatactactgctgttgtcggttttggagttggagcaaaagtagatattgatgagattgacccatccaaaattccgcgaaacacaaaggtggtattcaatgcaaaatctataaacaaaatggagcgggcagtactacacaacacccgctttttgaacactactgtcacacttattgttgatgaccccaagcaagacatgaatccggagttatgggcattggttgataatgtagtctgtacacgggagtgtgtgaagcttgtgaacgagaggggtctgcatgcaacaacgatggagtcgatgactgaagtgttacaatttatggggtcgttaggtcaaaacgattctctacagtttttcccaaaaattcaaatcatggggtctggaaactggggggagatggcagaaacggagaccgaactttgtcaccgtgtgggcacctttggtcttgtgaagaatcacacccccggcacccatgtgatcgtccccttcaggggcggcaacggggaggaatgcttctggcaccacggcatatatcttggcgaaataaacggcgaggagaaggtcatccacatggttccgggggagaacaccgttgaggtcgacctctaccaatttgccgcggcaaacccgagggccctccgtgtggtgaaatacccgggcgatgaaacagactgcatagagcgcgcccgtgcgaaacagagtgaggggatccagtacaacgaggagaccttcaactgcgagcactttgccacatactgcaagacgggaagggcggacacttgtcgagattttttgttacccccacccacctgggtcaataagacactgtcgcacaaacctcagcccgcaaggattgtgcctatagtatgaaccgtcccgtgaggtatgaaggtgtttcactggacaccgccgcggacccgcatacgggaagtcgtctgtagcgcgctccgcgcgtgacaaagcgccgtggcgagactaagaccgaaaatagcggagcatcagcaacagaatcctttcctcatagtaggggctcttctcaagaaggtccgcgaacagggtgagaaggtcgggatgaccacggttaatcgagctatccgtgccgccgggactccgcgtgtcgccgcgtatcggtacgagtacggcacataccctttggtgctttttttctgggaacgacttcaatgagaaaaatatatattcccatcggtgtcacgtgcgacgtgacatcttttctgcggagtatcgggctccgcaaggaagcgttaccttttgattgggttgtatgcaacgtagacagaatcacccaagcaattgagacatacttcgagtttttcttaaccgacaatctgtttttcgatccaaagcaacagagttacatggacgttcctataaagaaacggatgtggaaagtgtggtgccgacggagtggtattctgttcagacacgactttgactcggaacagaccgagtattcggaagtgtacgagaaataccgaagacggattcggagatttgtcgacatatgttccggtggcgacaaagttatatttttgacggattgggacgcatcctcgtacaccataaacactgggtttctggagtctcagaacatactcgaaaatgtgacaccaaaccatgaagagttggttcggcaagtcgaaaggtttgtgcagagtatatcgaaaagtacccgaatctaaacttcgacgtgaaaatgttgcgagacaagacgattgtgccttacgcagtttgatgcgtatgtcaaacgcttaaacgattatatacaaacaaataatacatatgtggcagctcgtctacgttgatccatatgaacccatcgttgtttttgcgccgttcccacaacacatcgactggaaaaaaatcggatcggggtcagatctggaatgttatgagcccgggccatcgcctttcgtcgtgtggacagaccacgtgggtgttcgagaagccgaactccatttcgagagctttgtcgggcggagaactgacgagtctgtcacgcggagtgacgaactccacctgttactggcgccgctacccatgttgaaaccaacgacattgcgtataaacatcatcggtatcgctcagacgcgtcaagagaaggaaatggtggtagacaacaccccgtctcacatcgagagtgtggtgttcatgtcgtcctggttagcgagagacatggagcgatggaaatgaattttgctttgtaaactgttttccatttttttctgggacacttataattgttctagtcaatgcacagaagtaccctccgacatcgtgcagctattcactacctccattttgacaggtcactcaggagggtggcaaagatttatggggtcgggaagtcgtctgtagcgcgctgggcgcgtgctctgaaggttccacacacgaatggtaggaagcaaaggcaaagcgccgtcgcgagactaagaccgaaaatagcggagcatctgcaacagaatcctttcctcacagtaggggcgcttctcaagaaggtccgcgaacagggtgagaaggtggggatgaccacggttcatcgagctatccgtgccgctaacttcagtagaaaaaggacacgacctcggttcgccccaaaggtcgccaccgcggaagaagggcgtactttcttgaacaatgcgtcggaaatcatcgccgtggacgagacgagcatctacgtggacgactcacccaggaacggatacacgctgaaggggacacgttgcgtgcaccgccggaagtctcccgtccgtacagggcgcgtgactctgcttttggctgtctcaccaacgcgcggcgtcgtgcatcacgaagtggtaaagggctcaatcacatcggaacgttttgcaggattcgtacggaacatctccgcgcaaggcagcacagcgatcctcgacaatgccagattccacaaaacggctgctgtgcgacaggccgctgaaggcgccggcatctcacttttgttcacacctccatatagcccagagttcaaccccatagaggggtgtttcagtgtcatgaaacaggcgctccgcactcccggtgggtgcttagacggagcgttagaaacgctcacgccgtaaaaaatctccgccttcttccgacattctcaagcgcacgttgaaggagttgccggtaactagcaaaacgcttaacgagagcacacaacagcagcaaatcaactccgcctccggatcccgcaacaagagcttaagactacgaaacacaataaacggcgtcatcagcccgatggaaggggacggaaggagccctgatgacgaggaggacgaagatgctggggccgagctacgggtagtcaagcgatgtttaaggagagcgcttctcatgtccacggacgagaaggatctgtttgtcgcaagggtagaggagctcgtcgttgcggtttcgaggttgatgcaccacgggtctcttctggcgacgaactacgtcctccaccggatgaacgatgggaaccttccttccgacgaccttctgacagaccagacgttctacaggcagtgtatgatgtactcttcttcttcagtacgtgctggcgcgtaccctgaagtgaagtcgttcgctgacacgaagaggttcctcatcccccacacagagcaggtcccgtactcaggaaactgtgtcaacgcggccgcgaggaagctgaagtcttccgttctcacgatcctgtcgcaccgtttccaccagcgcgtcacctccgcggttcgcgcaatgtttcctgatataccggaccgtgccaggctcgccataaaacagagatgcctcggtagacccggaggccctcctatcgcactgactcgagaggcatgggccttcgttgacgcggttagaggagacatcttccacggagccgacgtttattcgaccgcggtagaggaggccgtttggaattgtcgagggatcaagaagcggacagagaggccgtgtgcaccgaacttctagcggggcgcatgcccgagatggacagcctgaagggatcgggacgtgaggtggctacccatgttcaggagttcctccccgcttgcagagcacacagaggagcggtccctgacgaagaagttaggcgcctcgtgactgcggcagcgggacgcgttttccggagggcgaccgatgagcagaagcaacaggtagtggaggatgtcctccacacgacctcgtcagcagacaggcgtttcgggaggcttataagcgcggcgcgcagtatgctacgcttcgctggagtcatcaccatcggatggttgaagacacacccatcacgggcgttaatcgccgtgtgtcggatgatgttggaggtggaggagggtatccgtctcgccgagaagctcggaaagaaacgccgacccaagcgcttccctctcctgccgatcttcgggcagaggaggcagatggtgacgttggacgcggacaccctggtgggcctgtgcaaggcggtgggtttactgtcacgtggagctgggcgggaagccctgactgaagacttcaagcgatccctgattagcgttccagccggtttcgttttcagcgacaacatgtccctggagagcgacggcgtttccgtcgtgctgaggacctcgaagaccaatcctctagcttccgcgggaatggcgaccaaggatgacctagaagatgtcgtctttgacagagtgttggcgaacgatccggggagggcagacatcgccaccgtcgtcgagtggacggaggaggaagggctgaagaagggatcgacacgtctgacgcgcaaggagtactaccagcaggcaggcataaaccgtcgtgcaagaaagcgccgcatgagggacagagcaatatccgaacacctgaagaaatggaaggaagccagcatcaagacagccgacccagaagcttttgaggaggctctgaggctcagaatgagtccgcttcctcgctccgatggtgacccctcaatcgaggttgtgtgggcccaccaattgggtcggtggacgtccatgatggacctgaccgccttcgcagcgaagcgcagaacactggaccgtttttggaggcataaagtgggtcttgatgcgcgacatgatctgagccgcactgtcgtggtgtttggagacgggaagttttctgcgtcgggaagaggagaacgagccgtgcctcggaaggcaatggaagcgtctgcggcacgttttgcggcgaaggtcgtgaaggtcggcgaagcgtacacgacgaaagtgtgttcgcgttgccatatgcccacatttcctatcagaatgctgaggtggaagaagactaccgaagggggccgaatccagcggatggtcgatgtccgggagctgtggtgttgttcatccaacgcatgtcgcgcatctccttacaagtcgagggacaaagacgccgccatcagcatccttgagattttcctcgcgggaatagagtgctacaccaagcaaggatacgaagctgcgcttagagccatgcgacagggaccgcagcatcatcccttgggctgatagggaaaatctaacccccacggctgtgtcgtgcgcgtcgatggcggcacagtcgcgctgcaagggtaacccccagggtaaccttgctagcaggtccccgcgaggggaccataaactacattgcgttttgagggacgaacttagcggacctatggtgtcccacaatttctggaatgtagtttatttgaaagacaagcggcttccacctgtttctggatctgcgtagacgatttgtattgcctcgtgccaccgacacatcggctcggagccgcgtcgatagccccggggaaccgcgtcgccacgtcgtattccaccacttgatcccaggttgcacgtatgcgcttgttgtttacaaatatgtccgcagaccgatacgccgcattgaaaacggcgcatttgacctccagatcagacacgtcgtatctcttcatggcgacggacgcgttcgtaccaggggcattaggaagtccaagtagcctcatttccgcactctgtcgcggagggtaggcctgcagcattgcgcgtccgcgaaggtaaaaaattttgccgctgggagggcgcgtgccccgcgtattgacgaatgcggtccgcaaggcctcgttgtcatacggaagtcggaatttcagactgaatgcacggggcctcatgatacacgtccaacgttgttgtgccatcatgtcgcggaaaacgtcggtctcgttggccctgtcgccgcgcacgtctgacacaaaaagggtacgcgcgacacttcggtcggccttcagcgccttggacaagcgtacggctttgttgtcatcaaaccagcccgcggccccaatgagaatcacggtgcgatgctttcgccccttggaggtcttcggaggccaaaccgggacggaggctatcgagatatatgacgcgtcgagccgtctcctcctcgcaacttcctccaccttggggtccgggtcgtacgccagaaaccgcgcggccggcatggctctcatcgcacactcgagagctgggacggacgcgccgacatacaccacaactgttcccgtaccgtccggcggagcctcgacgtcgatggacaggtactctttcaagaaaagcaaaatggcgagctgaagtttgcgctgtcccatgtggcagttggcgaacgaacagtcgccatatcgcgggtcgcgttccacgtccgagaacctcgtcccgcgacggacaagcggtttgaattcgtctgcaaatagaaacattggaaccggggggccaccgcgcagtgcggcagtcgctctggcaaggtccgcgtccaataccccgcccgccgaagcggaatggttgcagattcggagagcctccctacaagcgggtgacatgacgacaagtataagggtttgttataatgcaacatgttataatgcaaccatgttagctagaaatggaacagctagttttgctagtctccatgacaacaccaaatcggcgtaatttgtaagcgtgttgagtcacatttaaaagaggataaccggtcctctcaggaacatacggttacccaaagcgcgatgctgcaggtttagcatgtcttcgcatctacacggcgctcaggaagcgcgggggaatggcgtcattgcacagcaacacgtcgttgccggtgttgcggtacacctccatgccggtctcttcgcgcaggagcgccacgtccacgacgatagtcacgtccgagttggggcggtaccccgccaccgactccggagatacggacatgtggacggcgtggcgattcatcggcttcaggccgttgctccggatgacgctccacgcctcggcgttagttccgtggtaagccttgtcgccgtcgtagcgcactagaagttcgggcggcaccggaacgtcgttggtgtgtccctggaacacgcggaccatcacgggaccgcgcccggactgcacgatgtcaaagcgacgcttcttcttggaggggttcctcgcgtgctcggtctcctgcgcctggaaggaggcgttgaccgccacgggcgtcaggtcggcgtccacgaacgccagaagtccaagcggaaagtggcctcccggggccagcgcgcccaggagttcgatgtggcggatcgccagtgtcacgcgctgggccagcggcttcttgttcccacggcggtctttgtgggagtagacccccccggccgcgttgcggtgggtaccggtgcgggccagctcggcggcgcgggtccagaagagatacttgcaccccaacaggcgcgcgatgaccgcggaagagacagggagattcatggcttgctcggctaggctggcaggatcgtcagaatgtgatggggtgggctgggccaatggctttatgagaatgtggtttatgacattcattttttcccgaaccaaaaactacacaccataggtccgcgaagtccgcccctcaaaagttcggtagaaattctagtgtgtaattttgcttccctccatgacagcaccaaatcggcgtaacgccgcgttcctggtcctgcccgtgggagactccgcgcgcggagctgctcggcgacaatgattcccgccgccgccgagagagactggaagaacctgcccgacgacctggcgggcaagatcgcggacttcctccgacccacggacctcctggcgacggccttcgtgtggcaccgcggcgccgcccgccggaagacccgctcattcgatgtcatcaccacagccgcgcgcgaggggcgtctcgagtacgcgcggtgggcgcgcgcgaaaggctgcccctggaacgagcgcacgtgcgaatccgcggccgagggcggccacctcgacgtcatcaagtggctgcacgagcatgactgcccgtggaacgaatggacatgcagggccgcggcgggcggaggccacctgcaggttctgcggtgggtgcgcgagcacgggtgcccgtgggacacaggcacgtgctccgacgcagcgttcggcggccacctggaggtcctcgtgtgggcgcgcgagcacggctgcccatggggcgtgttgacaacctacggcgccgcgttcggcggccacctcgacgtcctcgcgtgggcccgcgcgcagggctgcccctgggacgagagcctctgcgcctcggccgccgcgttcggcggccacctcgacgtcctcgcgtgggtacgcgagcacgtacaaaatgcttaagacaagtgcctcgtaacgtcagtcgctcacagtggcggagtcgggcgttctgaaaaaatgaatatggcatgtagactacggttccaccgacaacgttctacttgtcttgttctcccaacgccgaccgagaccaaacaaagaagcctcgaccagacatggccgcctacgcccccgccccgatgaaaattccaagccgtgtcgagagagatgccgcagaggaggagctacaggccgcacagaaggccctcgagaatgcaagcgcggcgctcgagaaggccaaagagcggtacaacaccgccgtcctgcaccgcaacaatatcacacaacgcgcgagcgaactggtcaacaagcaccacgaagccgtcgttaaacatgtgagggacgtcctagccgagcaagaaaacgagcaagtcgccgccacccgcgaaatctcaaggatgacttccagcgggttcgccgaaatttcctgcaagcagaccatcttggcctacctcaccggcgcgaagatcgtcatcaagatcatccagggtgattgccagtacgatggaggcggtaccgacgatgacagcgagcccgaagatagcgaggaggtctcgcagcccgacggcatcactgtccacgagttcgcggatctcctcctctgcgggaagatggagcaccttgtgctcaacagtcccgagactttcgaggtcgatgttcggtcggtatataagtgtgaaaatgagtcctccgctctgaaggacctcgtggacgccctgcgcgacgtggttgtccccctgtgcgtcgcaaagaacgtggagtgtgcgtcccgtgtcgcccagaatctcggtaattgatgtaggcggcccgtggctttggccgcgcggcgattcgatgatgtcgcgacgcggaacacggcaaaaatgtcaagcgataaacgtgcgcgttgcgtcgcgccccgaacatctgttggaatcacatgttttcctttcggcagcttatttggagtggcacgcgagtaggaactcttttgtgtcaacgcaatcactgttgtatgagagcctgtcaagctcccattcaatccaatattttccattcattatgacaattcccgtatccctcaatatgagctgcatgtcagagaatttattgggagggtggtaatgttcgatcatacatctgtgtgtgcacaccattttctctgaaacgacgtcatcatccaggatagccgtgcagaacccgtcaccggattgtttctgcacgccgggtcccgttccaacgacgtacaaaatgtcgccctgacgtgcctccgccatatctacacatttgcatatacgattcatccattttttgtggatgtgaaagtccattgaaaatccatgcgctccgaacatctgttggaatcacatgtttcggcagcttatttggactgatgcgggtgatgcatgtctacgcctgaatcaccggcgcgagaaatgagttttgcctttcaaacggcatgtgcagacaccgcatgcccatctgcaggtacaatcaggcaaaactgagcattcgcgcaagggctatagccgacgttccctaacccatccatggggtcgcgaatcttctcgcaaattgcgtctccagtctcaacaggcaagtttcttccaccgatggccggtacaacttggtagtcacaatatttgttcaccatcagcttttcaaggtcgcttcttagcctacagtccgttctatcatcgggccaaaactccaggtcggtatcaataatctctttgtggattctgcacatatcaatccatcgccgtacgttttgggaaacccggcgaaccgctagacgcatctgttttttcacgttggattttgcctcacaaatgatgatgacttccttaccagctgcattgcaaccttcaggggccgttccggccaccacggcatcgacatcgccacaccatgcatcctcctcaatctggaaattatacccaatacaaacaatttttccgttgaccagccatctctgaatagcctcagccacgtcttcctgtatggcattggaatgcatttttccatactgtttcaccttaccggtgctgcctgaaagtgttataagggcagcttctatgcggtgatccatttttgcaacaacattcttgagctcatgtacgcctgctgagagagtaccttcttgccaaggcgacgcaacttcgagtctctgctgtgttcttggcagaaagttggccatgctctctgtgaagtaaatcatggaaatatcatatcccagacgcacgcgaagccgcggcatggatccaaggcattgaagaatgtcatggaagtcgtccctatgagcgggtgccatacgattgtgtcatttttctggaatgtcaagaatgggcacctgcgttcaaaagcgtatacgaaaatgtcagagtacccatatggtacgtaaaagaggaacgaaaagcaccgacgccaccatgacgtccgagcccgccatcgcgaataaaacgcgcacctgggacggcctgccggacgaactcgcgcacttgatcaccgaccgtttgggacccgccgacctattagcgctgaccttcgtctcccggaagtggcgccaggcctcccggctccaaaagaaacgaccgccctcggcgcccttggacgtcttgaataccgccgcgcgcgaaggccgccttaaatacgtgcggtgggcgcacgagcaggggagtcccttgaacactctaacatgcaaggccgcagccgagggcggtcacctcgaggtcctcaagtggctgcacgagcagggctgtccctgggacgagctgacgtgcaaggccgcagccgagggcggtcacctcgatgttctcaagtggctacacgagcaggactgtcccttgaacactctaacatgcaaggccgcagccgagggcggccacctcgatacacaaaacacagagtgttgcatctgttgcaacacgaaaaggctttaatctgaaatttatcccaccttattcacctgattataaccctattaagaatgtgttcggtatagtaaagaattcattcagaaagtggaatgttactaaagggcgaacgttacaagaattcgaagagggaatattacattcgtttgcccaaaatgtagacacggcgatggttcgcaagtgtaactcccatgcaaggaagttcatatccaatacgttagaatgcctggaaatggcataaagtgcccgagcgcatgttaaggacacggagtccctttctatgcgtggagtttcccagcgcccggatcgcaacgcgtgagacctccggtacagatgcaaggactcgcccgtggagagatccttttttgttctcctcgccgagaaaaggcttaagcgtgcatcagaactcaccacagcataccttctctcgctctcgcttcaacctccctggaaagggcctaatcgttcgccagaacacgccacagcataccctctctcgctctcgcttcaacccccctggaaagggcctaagcgttcgccagaacacagaaaacaaaacccacctttactgacaataacatgactaccgagccgtcaaagaaaaaacggaagaaggatgatgaggagaataaagtcggaggaagaggagggcgtttgtcgaaagaagctctggacgaattactacaaggatttgacaacgtgcccgacttctggaacgacaagctcgtcttcgctttacgacacaacaagatcaccgaaacgcagcttcaatgctcggccgcaaccagagagcaagtcgtgaagaggtacctgtccagcttgaccagcaacgctgtcgttatggagaggatccgatcctattcagtcatgtgcacaaaactccaccggcgcgcatccgctctactgaatatgacagtgtgtgagaacatcaacaacgaggacaacctcctcaagatttgcgacattctttcatcccctctgaagatcaagccaatcgttctgtgtctgcgcgaccctctccccgacctgttcgagaaatgcttgagaaagcacaagtacatcgactccctgggaccttcgctcaacgaactttctttggtgtctcactggtcaaacgtcaagacctacatcgccaacaagatccacgcaaacataaaaactcagatcaagagccactctctgaaaaggttaaagacctacgtgaggtcccatgtgaagggacctcctgatgctgccgtcaagtacttgttcggcgagtctccgtgcgagaacgtcgaagacaggactcttatcgaaagcatcgtggacagactcggtaagggaggcctcctcaaggacggactaccggagatcccggcggagggcttgccttcctcgctgatcaagtttcatttcgacctctgcaaagcttcggaaaaggggttccgaccattaccatttcccagtattggtgccaggcaccatgctagaatcgacccaggagtattctcaactctgatgagggaccttcccgatgctgagagagatcttcatcgtgagctcaagttgacacaagagctgtggaaccgcaaggcaaatcgcgtcattgggtacaagaagagacagagggagaagaaggtcaagaggaggggggagaacaagaggacgaagaagttcaggcgttacaaccgactcaaggtcagaaagttgaaggacacgcagtgggtatcttcaattgaaacggacggtgtggcggtctccatcgtcgtcaagactttacacagacctgcttgagagaagaaggatgtcgatcaacattacgaagaggagctcagaaagatacgagaggtgtacaacaactgttcgccaagcatcaccgcatttgatcctggccacgtattccttctgacaggagctaccatccccaaatctgacctcaacatggaggcccacaagggagaaatggtttcttctgcgaagcattcggccttctcacgagcgcagtgggcgaagatatgtcgtcaaggagaacaacgaacgtgggaagaagaacggaggtccacggcggaggtgaaagaggctcttgacaagcttactgaaagcggaggcgggagaagctccgacatcgatatatgggcaaaattcgtgaaggcggcggctgataggatcgatactctcgacaaggagtttcttctgaacgatgagagatgcaagcggcgcttcacctgcttcaggagaaaacagtctgccctgatgaaggtagcagggttcgccatccggaaggaagagaagactccgatcctcatcggtgtgggacacgcaaatgtcagtgctacgatgaaaggatgtcctatttcagt

SEQ ID NO: 265 - DNA, 21386 bp, unidentified
  misc_feature 1..21386: note = Fanzor polypeptide
  source 1..21386: mol_type = other DNA
tccctcccgtacgagaccgcgtcggcgatccggaggtgcgagtcggacaagtcggactacataagcagcgggtcgtgccccctgtacataggcgacctcgagaccattagccccgggaccgggggctcgggcgtcagcgacaagcaccccgttctcgcacagcaggggatccgcaagtccatcctgcacggcatattcatcgtgtacggcgtgttttccctgctcgcggggaaaaccgcgatcgaatggctcgggaacctggtcgccgggacgatcggcggacccctcccggcgggcgacgcaggcaacgcgccagcggagggtccggcgaccgtccaggaccaggttgtcgtcgaccctgctgatggaacccctggcgacggcattgaggagggcggaaatctggacgaaactgaagaagggggttccggcgacaactctgaagaagaggaagttctagaagtaggagaagcaatgaccggttctaataaaaataagattctaacgccggaggtagatgtgctcaacaacaaaatgatcgaaaacgagacggaacaggctggagtagaggaagaaacgaaacaaatcgctgagaatctcgaaacatcgagaactgaaatacataattcggaaaatgccggcgaagttcttcaagacctggtggatgtaaacgccgagatggccgaaatagaagaaaaactacaaaacggtgaggatatatcagatgaggataggaaaaacctgaatgatcaactagaacagttgggaatacgaaaggagggtctcgaagaacgcgcaaattatattagggataaaggcgtggacggcgcgataccgccgggtgtggattttgattcggtcacaccggacgacgtggacgccgccgataccgcggtagaaaaggcgaatgacgatctccaaaaaatggaagaagagtctatcaagaaggaatcgttacttgcgcggttgaaggcccaaggggaggcgctggcgaagaagatcagcggggagaccgaacgtgagaagaaccgtctcgcgatcgaaggtaatgaaaagaaacgcgatgagctagacgcaaagatacagggtatagaatccgagatagaatccgagagcgacgacactaaaaaacaagacctggaaaaacagaaacaggatctcgaaacagagcgacaggccgtcgtcgacgcgctatcgagcgacgccgacctcgtacgcgacagggacgctctccgcgataaggtacgggatttcgaggacactgagaaggctattgcagagaatgaggcgaagttaaccgaaacggaatccgaaattaataccaataaaaatttgctcgtcgaattgaagagtgacaaagaaacactaaacaccgccgtaaaggaaagcttacaaaacaaacaagaattagaagagaatgtagaaaaactgtctaatgagacacgcgaatcccagaaagaattggacgaagctgagagtacattgcacctaaaacttaccaatctgaattccgctaaaacgaatctgggagaacttgaggaagggtccaataaccttaaaaatgatgtcgaagccggtgaaaaggcggtgatggatatggagaatgaacagaaatcgacacgaaaaaacgtcgaacaacttcttcaaacgcttgaaaataggaaggcttcgttacaaacactgcaagatggccttagtcagacagagcagggttcgaagaaacatacagaattaacggaagaaatcaaaagcgcgacggctaatatcgcggagagttcacagaaactagcggagtcgaatgcaaaactggcggagcttggacctaagaaattggaagctgaagaatccttgaaggttaaaaaagagtctctgactgtcgccacggaaaacaaaaaaacaactgaaatagaagttaacaaaagacaaaacgagtacgagcaatcggaaagtgatgtcatggagaagaaatccgccctcgaggcaaagaaagcggacctaagacaaacaatcgacgacgtggcgggtaaaaaaatggaaatccgcgacctatcgcaaacaatcaaagaaaataaatcgaagaccgagtccgttaagaaggcccaaggacaactgaaactgcaaaaggggaagatcgaattagatattacgaaagacgtcgaacgcaatacaactgcttccgaggacattgccgcgtcacgcgatcgtatccaggcggtcgaagcccaacttgattcccgaaacgcaaaagagatggaaagaaacaacaagaaaaaggctaaggaggcaagaaaagaggcggccaggaaagagaaggaggtgaaaaagctacgcgcggaaaccacggatacagtcgacgacgcgacggagaaaaagatgcaggcggaaacccgtctccgcgacgcggaaacccgccttcgtgaggcaacggaaacaggtgacggggacgccaagatcgctgctgaaattgatatcaaaaacgccatggaagagggggtccgggcaaacaaaaacttgtcggccgcggagtcgagagacgccgctgatgcgcaaggcaaggagttgcgaggcaaagaattggccacccaagcggcggcgaacaacgccgaagtaatacgaaaaagccaatcgtcgggagttttggaaaaggtaaaaggcgtgttcaagcgaccaaacacaggtgcgagcccgaagacaaatcaacctcctacgaaaccgcccccgagaccgtctggtgaagcttcgaaaccgtctggtagtaaacctacccgcagaaggcgttagagacggcaggcgttactgtagagaatgcgagaaagcacaaaagcaaagcaccaaacattcaaacgttcaatcgttcaaacgttcaaaacggccccgacagctgacgccgcatgtattcatgccacccccccccttccctaccgcccgtataatagcgtatagcgtatagcgtatagcacatacgcacatacgcgcccgcaacccgctcgcccgcttgctcgcccgccctcacacccacaccctcgctcacaccgtcggcccatcttcatccactatgtcgcgcttcatcgacgactacgccagcatgtccggggacgactcgggcatggacgtcgaggagatcgaacgcaggcgggcaagcgacgacgagttcctggacgacgcgtcggaggggggtagaaccgagaactccccgggcgcggaactttccgcgcgcgccgcggccgaagcggcgatgcgcgagcgcgacggggccgatcgaaccgagggcgacggcgacggcgacggcgactgggccgatcgttccgacgggggcgacgggggagacgggggagacggaggagacgggttcagtcccaacgcgttcggcttcgttccgcggcgcctggcccggcgcggggggccgcgcgcgtctcccgtcccgaacccggagggccgaagagcgggggggcgcggttcatccggtcgccgaaagagaccccggaacccgcagatgtcgccgcgcccgcaccggcgcccgagaaccgatgtggttgacagcgacttgcgctcggagtccgaggatgcggagatgggacatgcaggaggcggagttgacggcgacggcgacggcgacggtgccggcgacggtgccggcgaccgccttccactcaaccaggagatggcccttgcgaccgccagcagggttcggttccaggaggaggcgaggctccgccgcgagcgcggcgaggctcggaccgggttcactccggagagagagatgctgggacacgacggggaccgtgcttcgaacgacggcgacgacggcaaccacggcaaccacgacaaccacgacaaccacgacaaccacgacaacgacgagaacggcgagaacgaccccgttgacctcaccggcgcccaggagttccgggacggcatcgcggccatgaagaccattctcgcggccctgcgaaccaagttccccgatcccacgtcgttcgccatgtcccgggaggacgccgagaacctcaaggacttctgcaccgccaacctgacggacctgggggacgtacacgccacctgcgccaaggcgtgcaggacctccgagcagcgggagcggctgacggacctctcccggcgggtgcagctggcgggccacagcctggtgtgtatgtccatccacatgcagaacatgtggaactgcgtcaacaggggggtcccccgcgacgcggagctggaccttcacagcgttgaggagttcatgagcctggaggacttgtacaaggacaaggcgttcacccccttccaccagctcctcacccacatcatggatctgttcaacgcctccggttacaagagggagggcgaggaggtcttcgagagggtctacacctccgaggggcaccggaccatcgcgtggaagcgcaagtactccatcgaggacttcatcaaccgccacgtcaggaagagcgtcaacaccaagatgtggctcatcaagtccaaggagaaggaccccgtcccgcgcatcgtgaaccacctttgttcctccaacgagtcggagttttcttcggtgaacaagtccagaaccaccttttcgttcgagaacgggatctacgacgccgacactaacgacttcttcccgtacccgctcccggcgaactcggactacttcaagcaggacggcatctccgccgccaaacacttcgacggggtcgagttccccgagcccgagtggcgcgcgaccaaggcgaacccgctcgcctggcgcaacatcgacacgtcgctcctggactccgtgctcaaacaccaggagatcgacgacgagtccatcgagtggctctacttctccatcgggaggatgctgtaccccatcggcacccacgacgacctccagtatttcctgtacttcgacggcaccgccgggtgcggaaagtccaccattatcaaggtcatacagaacatctacgacaagtccaacgtgggcgtcgtgtccaacaacatcgagacgaccttcgggctctcctccttccaggacaagtggatgtgcatcgccccggagatcaaggacgactggaagatatccgtcaccgagttccagtcaatggccagcggcgagagcgtctccatcgccgtcaagaacaagaccaccatccagaaggagtgggaatcccagctggcgatggcaggcaacgaaatccccgggttcagcgacatcgcggggagcgtttcccggcgcctcctggtgttcaagttcatcaacaagccgtcgccggaggacgggacccttctggaccgcatcaagagcaagatgggccacatcctgctcaagtccaacgtcgcctaccggtacatgaccgccaacggctacgatagctcgctgtggaacctcgtcacagactacttccagcagatcagggcgcagagccagaggacgctcaaccccctcatagacttcatggagtcgggaacctacgtcaacgacgacacgtggatcgaggactccgacgaggaggagggggggtactacgagcactccgtggacttcagcgacttcaaggacgatatccaggagttcgccaagacccaccgcaacggcgagaagctcaagatgaggatgttcgagctgcacaagatgaaggccatcctgaaccagtacgggttcaagatcggctacgaaaagaaaaacggccaggtggtcaagaccaggatcgggagcatccaggcgtgtcggaaggccgtccccgcggacttccaggcgcgggacgcggccagggccgcgaggagggccgggatcgggaccgggatcgggaccgggatacagtaagccagacactgtaaaaaaatttaaaaaattttaaaaattagaaaagaaaaaagatggtggcctgtgttcaagggaccccccgcgaaaagtatctcggcgcggcggtatctgtcctggtgggtatcctttcaactggtctcctcatggggtcgcagagcatgggcgcgacgaccgagacctccgtcgtgctcgcgaacctggtcggaaacttcctggggtacacgggggacatactcatcgcgaagcagtgcttcgacgcgtggaacgggaccgagtacgtgccggtgaagtacgaccagtgggatgtcaggaaccggttcgtgtggtacctcaaaagcatggcgtcgaagtcttttctgcggttcgttcttaccgtcaccatcgaccttatcgtgagtctcgcgataatcgatatggtcatccaggtcctggacgacctcaatatcaagttcaggttccgcgacgcgataattgcgggcggcgtttccatcatcacgttccaagtgttcgtgaacgagatccggttcaactacgcgtacaatcggtccagcaacttcacgcacgacctcatcgttttcatgtgggcgtctctgctaatagtcatctacgtcatgcttcgcaagctcaacgtcttcgagtcaaagcatttcgtcaagcctgcgattcagttcggctaggtcctcgcgcgagtagacgtgctcggtgtccgcggggatgcgcgcgaacgaacccggaacgctcgcgtaccgcgcaatcatcgcctccgccgcgtcgaccggctccgcgagccgccgcctgaaatcgtccaccgtcccgaccctcgccgagaagtccgcgtcaaagctcgccaccgcgtccgcgctgcgcccgagggattccatgtccacccccttcctggccagcccgacggtcagcgccctgcccagttcgtccaccgcggccgtcaaccggtcccggatgcccccgacctccgccacgcgggcgtcgtaaatcgccctcggaaacaggctcgcctccgcaaaccccttgacagtctcggaggcgagcctctccgcctcatccagctggtttctgtagagggtcctgagacggcccacggaatccgttatcgtcctcaggaccccggacgccgactcgatgtcctccatggtatccgccgactcgtacagggtcaccgccgcgtcggacagcctacgcagtcgctcgagcaacatccccgagacgtccgaccccaccccccgcgcgtgtttgtaaacatcggacgccgtcgccgtccgggcctcggcctcggactcggcctcggactcggactcgggatccgcggcccgcgtcgcgtggccgtggaccgcctccaaaacctcgcgcgacgccgaggtcacatcgcccgtcctagtctggatgtccatcgctttttgtatcaccgggtccctgacgctcatttgtggacagaagacagattttgtttaccgtgcgctcgatcttctccttcgtccggtccgaacacctatacgttactaataggttctcggtggtcttcatggcgtcggaaagggccatcgcgatgtgctccacgtcggtctcgcggctgtccaggtaggacaccgacgggatccaggcggtaagggatcccgacgcgttctcgacgacgaccgccgcctgttccccttcccccgcggcaccgcttcgggaaaagtacttatacacggcggcgccgagggcgaccgacagaaccgggagcgacataaacataacctttcacctgtccttccaaaaaaaacgaccgggatgaacgagtcgcgcgcgcacgccctcctaacgctcgcggcggaggacatgcgcaaggcggagtccgacgccgtcgccgtgagcgtcgccgccgaccccggctccgcccgcgacgccgttctcgtcgggccgccgtcctccggcaagaccgaggccatcctgaggaccatcctcgaaacgcccatcgtccggccggggatacacccgtgcgacgtcaacgtcttcgtcgtgcactacgcggccctccccgacgcgtgcaagcgggcgaaaacgctgggagtgcgcaacctcttctgcgtcagcaaaccgtcggacttcaagaggctcgtgcccaggatgtgcaccatggcgaccatctgcgtcatatgccgggacgcgacgttcaaccgcctgtgcgaccacctgcacaccgtcaccgtgcagaggctggttttcgataacgtcgagtccctcaggatcaaaaactatcccgcggtgaggtgcaacttcaagtggttcctcaccgcggacctcggcgcaaccgcgctcgcccccgcgctcgccccggccccgcgcaagaactccaggatccgcaaggaggccgcggccgcgtaccgaggcgatcgcgtggtcaagatccgacacgtcccgccgcagacggtcctggaccgcgtggtcgtgtaccgggaaaccgccccgagacacctcaacgcgaccatctgcgccctctacggccgggaggagtaccgcctcgcggaggcgtgcctgccgtgcgcgaacgttagagcgtgcgacatgaacctggtctacagcaaacaaacgtgcgacagggtgcgcgacccctgtaccatatgcttcgaggagaagccccacgtcgcgcggatcgtcgccccgtgctgcgagaacaacttctgcgcggagtgtttcctgaaacacatcctggacaaccccacgtgccccatgtgccgctcgaacgtggacatccacacctgcatcagcgtctcggacgttgcgatacagaggctcggatcgatagtccaggaaaccaagaagacgctggaggagtgcctcgcggacccccgggcgagggtgctggtggtgtcgggaagggacatcttcaactccgtggccgatctcatgtggtacaccgagctcgccttcgtggacatatgcggaaacaaccatctcctcgacaagcggatccgggagttcgcctcctcgcagtgcagactgggggtcgtcagacaccaccaaatcgggctcgggcccatacgcatacccggggtaacccacatcgtcttcgtgggatacttctccgacgaggaacgcgcgcactggtcgacgcggggcgtgggcccccacacggagtacatgccgaagaccttatccatggaatcggtttacaacaggacgttcaacgtctacgacgagttccgaatatactgatctacagtattctgaacttcagatgtaaactgttttccatttttttctgggacacttataattgttctcgtcaatgcacggaagcaccctccgacatcgtgcagccattcactaccttcatttcgacaggtcgctaaggagggttgcaaagatatatggggtcgggaagtcgtctgtagcgcgctgggcgcgtgctctggaggttccagagacgaagggtaggaaggttaggcaaagcgccgtcgcgagactaaaaccgaaaatagcggagcatctgcaacagaatcctttcctcacagtaggggcgcttctcaagaaggtccgcgaacagggtgagaaggtcgggatgaccacggttcatcgagctatccgtgccgcgaacttcagcagaaaaaggacacgacctcggttcgccccaaaggtccccaccgcggaagaagggcgtactttcctgacctgtctgaacaatgcgtctgaagtcatcgccgtggacgagacgagcatctacgtggacgactcaccgaggtacggatacacgctgaagggaacacgttgcgtgcaccgccggaagtgtcctgtccgtacaggacgcgtgactctgcttttggctgtctcaccaacgcgcggcgtcgttcatcacgaagtggtcaaaggctcggtcacatcggatcgctttgcaggattcgtacggaacatctccgcgccaggcagcacagcgatcctcgacaatgcggtattccacaaaacggctgctgtgcgagaggccgctgaaggcgccggtatctcacttttgttcacacctccgtacagcccagagttcaaccccattgagggatgtttcagtgtcatgaaacaggcgctccgcacgcccggtgggtgcttaaacggggcgttagcgacgctcacggcgtcgaaaatctccgccttcttccgacattctcaagcgcacgttgaaggagttgccggaaactagcaaaaagcttaacgagagcacacaacagaagtaaataaactccgcttccggatctcacaacaagagcttaaggctacgccactggaaggcacgcaacacaagaaacgccgctgtcctgacaagagcttaagaagacgatcagcacaaaaaaacccgatggagggagacggaaggagccctgacgacgaggaggacgaagatgcgggggccgagctacgcgtcgtcaagcgatgtttaaggaaagcgctaaacatgtccacggacgagaaggatctgttcgtctcaagggtggaggagctggtcgtcgcggtgtccaggttgatgcaccacgggtcgcttctggcaaccaactacgtcctccaccggatgaacgacgggaaccctccttccgacgacctcctgacagaccagacgttctacaggcagtgtatgacgtactcttcttcttcggtacgttctggcgcgtaccctgaagtgaagtcgttcgccgacacgaagaggcacctcatcccccacacagagcaggtcccgtactccggaaactgtgtcaacgcagccgcgaggaagctgaaatcttccgttctcacgatcctgtcgcaccgcttccaccagcgcgtcacctccgcggtccgcgcaatgtttcccgatataccggaccgtgccaggatcgccataaaacataggtgcctcggcagacccggagggcctcccatcgcactgactcgagaggcgtgggccttcgttgacgcggttagaggagacatcttccacggagccgacgtttattcgaccgcggtagaggaggccgtttggaattgtcgaggaatcaagaaggcggacagagaggccgtgtgcaccgaactcctagcggggcgaatgcccgagatggacagtcttaagggctcgggccgtgaggtggttacccatgttctggagttcctccccgcttgcagagcacacagaggagcggtccccgacgaagaagttaggcgcctcgtggccgcggccgcgggacgcgttttccggagggcgaccgatgagcagaagcaacaggtagtggaggatgtcatccacacaacctcttcagcagacaggcgtttcgggaggttgataagcgcggcgcgcagcatgctacgcttcgctggagtcatcagcatcggatggttgaagacacacccggcgcgggcgttgatcgccgtccgtcggatgatgctggaggtggaggatggcatccgtctcggccgagaagctcggaaagaaacgccgtcccaagcgcttccctctcctaccgatctttgggcagaggaggcagatggtgacgttggatgccgacaccctggtgggtctgtgcaaggccgtgggtatactgccgagcggagcagggcggaaagccctgactgaagacttcaagcgatccctgcttagggttccagccggtttcgttttcagcgacaaaacgtccttggagagcgacggcgtcgccatcgtgttgaggacctcaaagaccaaccctctcgcctccgcagaaatggcgaccaaggatgacctagaagacatcgtctttgacagagtgttggcgaacgatccggggcgggcagacatcgccaccgtcgtcgagtggacggacgaggaagggctgaagaggggatcgacgcgtctgacgcgcaaggagtactaccagcaggcaggcataaaccgccgtgcaaggaagcgccgcatgagggacagagcaatatccgaacacctgaacaaatggaaggaggccagcatcaagacagccgacccagaagcttttgaggaggctctgagggtcagaatgagtccgctccctggctccgagggcgacccctcaatcgaggttgtgtggggccaccaactggcccggtggacgtccataatggacatgaccgcgttcgccgcgaaacgcagaacactggatcgtttttggaggcacaaggttggtctcgaggcgcgacatgatctgagccgcaccgtcgtggtgtttggagacgggaagttttctgcgtcgggaagaggagaacgagccgtgcctcggaaggcgatggaagcctctgcggcacgatttgcggcgaaggtcgttaaggtcggcgaagcctacacgacgaaagtgtgttcgcgttgccatatgcccacattttctgtcagaatgctgaggtcgaagaagactaccgaagggggacgaatcgagcggatggtcgatgtccgggagctgcggcgttgttcatccaacgcatgtcgcgcatctccttacaagtcgagggacaaagacgccgccatcagcatccttcagattttcctcgcgggaatagagcgcccgccgtgctacaccaagcaaggatacgaagctgcgcttagagtcatgcgacagggaccgcaacctcatcccttggtctgataggaaaaacctaacccccacggctgtgtcgtgcgcgtcgatggcggcacagtcgcgctgcaagggaaacccccagggtaaccttgctagcaggtccccgcgaggggaccataaaataccttgcgttttgagggacggacttagcggacctatggtgtcccacaatttctggattgtagtttaaatttcatcgactgagctttgcgctcgggtacacgttcatcgccgtgttctcgggaagcacccgatcggttttcggggatttcgtgtcgacagcttcaggtacacggttcttgtacagcccctcgttcttggcgatcagcccgtagttcgcgacgcgaaggtcggtgcttaccgacacgttgtaacacggatcccagcccgccgccctgaagtgccagtctctgcactccgcccactcagcctcgtccttcgacctcttggcgtccgcgtggtacgcgcttacgcccagagcggtctgcatacgctcggaggagaactcgggggttttcagcgggtccattgttttgttcgtatcatacacaaaatggattacgccactccctcgcttctgggcgtcctcgcgttcctcgggattatgatttacgcgaggctaggccgcctaaggcacgcgtccaaacaggcgtgcgacacgaaggtccataactcgcactccagggcgcacgacgtccaaatgtacgcgctcaccgccaagcagtcggacgatcgaacgatcgtcatcaagaaggagggccacgggctggatttcctgaacgcggtgcggtccgagaaggtggacgagatcatcgtcaaggggcgcgcgttcgccgtcacgttcaagatggccgcctcgcaaacgttcgagatcgagatcgacgaggcgaacgcgaggtcgccgttcctcaaaatcgcgggcgcccaggcggaccgcgtcctgacctccgaccagttcggcacggtttacgtcatggcgcactaaatttcctgttctctacggcgcgggcctcagcaacacgtgcagcgtcccgttgccgtcgttctgcacggcgttgaattggtaccgcggtttgcccggcgtccgtcgtgatcctcgcaaacgttcgtgatccgagtccgtctaccccgccgaccccgccgaccccgccgaccccttcagcaacgcggcgaggctggagacggtggccgccccctcctcacccgcgtccatcttcatgtaccccagcccctccaccgcctcgtccagcgcgtcggtcgtgatgaaagggttaccgggctcggacacgacgtagttgttcgcggtcaggtacgcgggcgtcacgaagtccccgaggttccgcgtgacctcggcgatgtcatcgatgttcctgtccaccgccccctgtatgatgacgttagaagcggagttgttggagatggcgttcgcgttcgaagtgctgtcacgcaacaggtcgtcgtacaggtcacgaagggcttcgctcgacgtcttgtttgcctccacctcgtccaccgtcttctctatcgcgccggtgacggtctcgcccagcgagttgacgtcgtcgatcacctggttcagatccgataccgtcgcagcctgcgacaccctgtacacgacgtaccccaggaccagggccaggaccagcaccgtaaacagcatggctatcatcgcagcctgcattttgtttgtttgtttgggtttcagacaaaaaccgtttcacgcgccgaaggacaggcgacccatcacgaaactgtgcgtcctcctgaacatctccacgcgctccaccgtatccgcgaacttcgcgaccgcctcgtcgaacgtcacccaccgcgagtcgcggagctcgttcgcgcacagccgggtcacgcactcgtcctcgatcctcgcgacgaagtacacgtgcttgtagcggacgccgttcgacccgctgaacgtctcgtcgaacggtttgtgtgacagaagcatgatcgactcggtcgatatgccggtctcctcggagaactctcggaacgccgtcctcatatccggctcgttcacgttccgccggcccttcgggaacccccactcgggctcgtacggcacgttctcgcaatgccgcatgatgtcgcggatcccgaagaacgaggtggtctccccgttctggatgtagtacccggccttgatcgcgttgaaccgcccccgggactcctcgtactccgaccaccgcttcccgcggctcgcgttgttccacaggtacttccaacaatgctcgaaatcgttgtcgcgtatcagcgccctctcgtccggcgtcatcatgcggaacatgctgagaatgtacttccggttctccaggccgtacttcccgcgcatgaagtccacgaacgaaaacgtatccttccgctgaaccaccaggtattccggggtttccgcccccctcgggcaccggaaacatattatgccgtaagatatcaccggatggttgcagaaccggtatatgtgccccgtctcgccgcagttcgcacaggttatcgccgccggggacgggggcgcgggagcgggagcgggacggttcgacgccccccggcgggcgcacccgccatcttcaccaggctttgtgttacacgaaggcattcctacagtacggcgacaaaaatgtggtgcccgtaaaaaacgcgtgccgttacacgtaactttttttgctttcaacagaaaacatggaccgcgttcctcccccgtccctcttctacagcagaaactgcaaacactgcgtctccctcctcagggagtaccaggaactcgtcggcaaagcggggatccagatcgtgtgcgtggacggccgcctcgaaaaggtccccccgatcgtcacggaggtccccgccctcatcgtgcccgcggagaaacgggtcatcttctggaaggatatccggacgaaactcaacagcataatcgcagcgtgcaaccagcccaagccggtgaaccccgtcgagtcgcagggaaacaccgccgaggtgttcagtttcctcaacggcccacacctcgaccagatggccagcgcggccaaccgcgtggacgacaactacgccaaccccttctactccaacccgagcttcgactcgctcgccgagccggaggacaccacgccctccgataaaatcagcccctcctccataaacaacttcgtcgcgcagagggacgccgacatcgccgaaatcgcgcgggcccacgccaggcccccgtcgtacaacgtgctctaaagaaaactcaatcaatcaatcaatcaatcaatcaatcaatcaatcaatcacggtcttggacatcccgaacgccttcaggttccacatcacgaacacgatggccagggggtacgacacgcgcaggagaaaatcctggcgccccgtcaggccccaggacgacagccacccgtcgtagtagtttaccgtcacccagtgcacggcgatgcccagggtcaccatcagggacaggatcaccagcttctggacgtccttgcgcttcataccgagaaccgagaggtaccccggctccgagaacccctgaacctggccgacgccggcggctcccacgagatacggaaccgcgacgtccggctgcggcgtgtacggaacgctcgtgggcgccggcgtcggctgatacgggcccaaatacgtgttcgccggctggcttcccacgaccggcgtcgccggaacggaatcggggtagctcggctgcgtactcggaacgtgcgtcatcggcgggaccacgggcggcggcggcggcggcgggtggtaatccatcatgccctcgtcggtgtacggcacgcccgacaggttcatccgggtaccaaacgcatcgtcaatgctgacgtagtccatttattctacttcacccataaatgtttaacgcaccctctttaggctgaccgtctgaacctcgtcgctcgcgaagagtttcgtctggagctccctcgccagctccggccggtcgcgcagcaacgtctgcatgttctcctcgatcgccgacttactcggcgccctcctcacgctgcgcgtctcgaacctgagcttgccgttctgggtccgcagctcctcgatgttgtaccgcttcataaacgccaggatcacgtcgcgtagcttgttcttaacaacccgcttctccttcgccagcttctgcagatccttcagctcggaatccaactggaaccacttactcacgtgggcgcggaactccacgatctgctcatcggacggcttcgccgagtcgtcgtcgccgtcgtcggggctcagaagcgcggtccgccggttgtacagctcctcgaaaaacttcttctgaaggaccgcgtcgcccgacgtcacggcctccatctgaagcttgtgaaggtaccggtaggcgtcaagctcgcgatacatcttgttcgtgtccgttatccccgacgtcacgtccaacatgtccaccagacacttcgacgagctctggaagaaatcgtcacgagaaactatgtccattttcccatatacacaaattaaaagtttgccttaaaacgatttcactcgtccgtcgtcacggtggcgataggccactggagcttcaggttgctgggaaggagccaagacaaggtgcgcttcacgggacccgccctgtacagagcgcgagcgtggaacaccgagaacgcgtagttggcgatctggacgttggacacgtacccggacacgccgttggtgccgccgacgttcagggacccggacggatcctgaacaacgccgttcgacgcgaaccgcgtcaccggggacaccgagtaaatatcgccgtccaggaacagggtcacgacgtcgttgtccagaaccacaaccatgttcacccacctgcccagaggcacgtactcaacctccactatcacgcaattggagtagttcacggtcgtcgtcataccgtcgccgtcctgggtctgccgactcgcctggtagtcctccagggcctgttttgtcgtcagcgcgctatccgtgttcatagtgcggaggcccacgtacatcctgttcgtcgcacggtccatcagcaccaggggggacaaaccgtccgcggagtcgccgatactcaacacccgcttcatggcggtcgtgttcgactgcgcctcgacgtagacccagaacgaaagcgaaaactccttgccgttcttcatgctcgggaacttatcggaacttatcgtcttaggctgagaaatagcgtgaattggctcctccagaagcgtcaccaccttcaggtttgtcgacagaatctggtacaccgtgtaggccagcgcggcgaagacgccgaccgccaccacaacgatcatcagagtcgtcaaaccctgcccggtaacgtaccggtacgcggaactggcaccggtcgtcacgcgtgatgcgatccccgaccccgcgttcgcgacgcgcgacggcacgaccggtccacccggtccgcctggcgccgccgcgggagagggaaacggggatggggcggcgggggccgggaccgagaccggggctggggctggggctggggcggacggttcaaagccagcaggagcagaaggattcaggccggacatcctgtttgtgactcagttagaaaatttgaattcgaattcgcaaacatcgtgccgcgaaacggacgtggtgcgaaacacgcacaaaaagggacaaaacggtccacatcgctcacgtccacacttccccggcgcccccggcgtctcacggcgtcccgcggagacgcgcgtgggaccaatggtaaatgacacagattccgaagatatcgatgcgcttgcgaacaaacacatcgtgaggttcaccaacatcacttattccatccgttctgcaggtaagactcgtacagccccagcatcatgatgttctgctcagggagggacgtctcaaagtcgagaccttctgtggcgaaaacatggaagtccagcgccgtcattactgttttatcattcttgtgaacatcggcgcttgtctccatcaaatcatccgttcgcgagtacgtgccgacttcaaccgtggctccattgtcaacaagcttggcgtaccaacactggacgtcgtactgagagtatctactggactcggaagagtactcgcgttttgacatgtcgtaatcccaaagaggcaacggaatggccctgatgagccgactcggagaagatcccatggtgtcgggtaagcgttggatgcggtgttttgactttgattgacgttggttgatgtgatgcaaatggagcgttgagataagggtggattttgagcaattcacttttttccaaagtgcgttgaccgcggctccggacgacgagggtcgacgcataatttcgacggaaacgttacttttcggaagatgtgagtttcgaaataaatccgggttaccgtacgaatcaaccggtgcacacttgacccccctttcatggcaccgcctcgcttgtaatgccctcaaaaacagggacatccgtttacggcaaaggaacgccaaaaagtgcaaactttcccgccttgtcggaccacgacagtgaagcctgctacagcccctccggggggaggtctgtgaagccaactcacggcccgggcttcgggaggcggtgacctggggttcggacgacgaaggtcgacgcataatttcgacgaaaacgttacttttcacaatatgtcattttcgaaataaatccgggttaccgtatgaatcaaccggtgcacactcgacccaccctttcatggtaccgcctcgcctgtaatgccctccaaaacagggacatccgtttacggcacaggaacgccaaaaagtgcaaactgtcccaccttaccgggccacgacagtgacgaagccagcccccccggcccgggcttcgggaggcgctgacctggggctcggacgacgagggtcgacgcataatttcgacgaaagtgttacattttgttttttttaagtaagtacataagtacataaacccgtatgaatcaagcggtaaacaaaataccgaacggagttgaagaggcgccaatattgtacattccgtttaccccgattctttagagaaatgtgcacagcaggaacccttttcttttcttattattttcatgtggaagaaagaaattactgcagtaagagtaaactacgcataaaagtggtttacgtgtatggaacagttgatgtgcacaatttgtcgaaccgcgacgtaaacaaatgtgactgtttaagggtgcgaaaatcgaccccccgcccaaaaaaaagggctcagaatacgcgccggctcagaaggactttttttggcggggggtcgattttcgcacccttaaacagtcacatttgtttacgtcgcggttcgacaaattgtgcacatcaactgttccatacacgtaaaccatttttgtgcattttaatacctccgggatgccctgaacttgaaattgtcgaaaattgatacattctttggaaataaaatttcccttgtggtattcagcgtgtccaattgtgccacgggggtaaggtggattgtgaaatttgttgcctttttccggaggcgctgacctggggttcggacgacgagggtcgacgcataatttcgacgaaaacgttacttttcacaatgtgtcattttcgaaataaatccgggttaccgtatgaatcaaccggtgcacactcgacccaccctttcatggtaccgcctcgcctgtaatgccctccaaaacagggacatccgtttacggcacaggaacgccaaaaagtgcaaactgtcccaccttgccgggccacgacagtgaagcctgctccagcccctccgggagggggtctgtgaagccagctcacgtcccgggcttcgggaggcgctgacctggggttcggacgacgagggtcgacgcataatttcgacgaaaacgttacttttcacaatgtgtcattttcgaaataaatccgggttaccgtatgaatcaaccggtgcacactcgacccaccctttcatggtaccgcctcgcctgtaatgccctccaaaacagggacatccgtttacggcacaggaacgccaaaaagtgcaaactgtcccaccttgccgggccacgacagtgaagcctgctccagcccctccgggagggggcctgtgaagccagctcacgtcccgggcttcgggaggcgctgacctggggttcggacgacgagggtcgacgcataatttcgacgaaaacgttacttttcacaatgtgtcattttcgaaataaatccgggttaccgtatgaatcaaccggtgcacactcgacccaccctttcatggtaccgcctcgcctgtaatgccctccaaaacagggacatccgtttacggcacaggaacgccaaaaagtgcaaactgtcccaccttgccgggccacgacagtgaagcctgctccagcccctccgggagggggcctgtgaagccagctcacgtcccgggcttcgggaggcgctgacctggggttcggacgacgagggtcgacgcataatttcgacgaaaacgttacttttcacaatatgtcattttcgaaataaatccgggttaccgtatgaatcaaccggtgcacactcgacccaccctttcatggtaccgcctcgcctgtaatgccctccaaaacagggacatccgtttacggcacaggaacgccaaaaagtgcaaactgtcccaccttgccgggccacgacagtttagcctgctccagcccctccgggagggggtctgtgaagccagctcacgtcccgggcttcgggaggcgctgacctggggttcggacgacgagggtcgacgcataatttcgacgaaaacgttacttttcacaatgtgtcattttcgaaataaatccgggttaccgtatgaatcaaccggtgcacactcgacccaccctttcatggtaccgcctcgcctgtaatgccctccaaaacagggacatccgtttacggcacaggaacgccaaaaagtgcaaactgtcccaccttgccgggccacgacagtttagcctgctccagcccc

SEQ ID NO: 266 - DNA, 22043 bp, unidentified
  source 1..22043: mol_type = other DNA; note = Balamuthia sp.
tagatggaactatcgacccaacactcgccaagaatttgcaagaagaaacacactgtacgtctttttccccctctccctaatcatcataatgttttttttcttccattatgattgaagaaaaccaaaaaacgctcacaccacattgctagtcgacaaggtggaggtcaaaaagttgtttgagacgttccaacaatgcgccacagatggcaagttagacaaaccagccttcagggaggcccttgacttgctggaggcggccggcctcaagaagatggacgacacgccgtttcccgaccgcctctttgacctgctggacctgaacggggatggcgtggttgaccttcaggaattcatcagcggcctttccttcctttgcaagggtactcccgaagagaaattgcgatgtatgttactcttgctcttttgttctctcattctcgcgcctgtttggttccagctttcagcaaagactaacattctcgttcttttaaagtgtccttccaggcctatgacttggatggtaatggttacatcaccaaagatgagttatcccttatgttcaaacaggcctggatcgccggcttcaaggctctttgcagcactcacagcacggaagaactgagcacagacgacctcaacgagttctctgaggaaatggccggcctctttgcagataatgcttttgagacattggacgccaatggtatttttcctcttcctcatgtctctgcttctctcgctctctgcttctttatagttctctctctctctctctctctcattgcctttcttctgttaacaaaatgaaaaataggagatggaaagctttctttcgaagagttcaaggagtttgctctggcggaacccaagataacagccaccctcaacggattcaagaaagaagtggtcatcacgttttaaacacctcaaacatcgaaccaaaccaaatgtaacaaccaccgcaacaatatccacaacaacagcaacaacaataacctatcccccaacagatggccacaataacgagtttttgataacaagacataactcatttttttgtatacaccaagctttcttgctctcctttcttcttcttgttcttcttcttcttgttcttcttcttcttcttgttcttcttgttcttcttcttctccttcttctccttcttcgtctctcctttcttttcttcttctccgttctctctctctctctcttcaggggaaaggaaaaaaaaagacaaaaaaaaaaggaaatggagaaggaagaggaagagaggcagggcggtaatgcttcgactggggaagagagggaggagcaaaagggagacgcgacatgcgaacaagaccgcaacaacagcatcaacaacaaagacaagataggtctccttgccgaactgccgatggacctggtggtgctgctcctagagagcatgccagccagcacgctgggcaacatggcctgcacctgccactactggagggacttgatctaccagcactgttggaaggcggtcgacttgagccccacgctgaactcgttgaacattttacgcggcaaggggccacaccgcaatcatgtaacgcatcttattcagaaagttttagattgcattttatcaagatgggttttaatcgaagtgtgaagcatacttactttagggcagagtcgcggaggcttatggagcagattcgctacaccaacgtcaggcacttcaagtttgccacgaacgacttttttgttaactccaaggtctcttgttgccttcacttcccctccctgcctcccttctctctctctctctctctctctctctctctctctctctctctctcgctctcctcttgcttggtctattctcatccgattattggagacaataggcattagtgaggctactaacgcggtggaaaggacatctgcacacgttggacctgcggggctgtcgctctctcggcgacgaggagaaccttgttctgttccaggagttagggcctcacctcaagaccctgaaagtgggctgctttgacgactaccgcttcgtgccctgggagcaaagcctgcagtatgtggccacctactgcaccgagctcaggacgctgcgatggggcagctatttgcagatgaccgctgcggatgtggccgtcatgcgctccataggtgagcggctgacgcggctctccaggttgggcgtggtggcctgccttcgagccagagagcgcttctccgacgaccatcttgctgctttggtgtgcccacaaggaacagcagacgcagaggtagaaaagaaagaagccaggacaagtatcaaggcgaggggagaggagagaaagaagaaggaactacaacaccaaatgctgggttggagaataaccgacttggctttgaggaatgcggacctaacgcagcgaggaatctccctgttgggcattcactgccccaacctacgtaagttggagctgtgctgctcgcaggagatcgaggagagggccttcgttgccctctttgccgcgctggactgccgtcgtatggagaagctgagacttgaactttgtggcaagccattaacggacgccattctacaggccttccttcttagcagcgacagcagtggcggcgaggatagtttctgcagcctgcgcaagttatttttggagccggtagtagtctcagagagagggctttcacgcatgctctctgcctgccccctgctacagaagctatgcctaagagagggtgaagaagaagaagaagcactagcacaagcaagcccaaaccataacttcatgacgaacaacatcctgcagcaaatagccgcacattgccccaacctaaacgagctgtttctgctccccgcctacggcaaggcatccgcacacaaccatctattcgagaaagacggggagggcgggagcgaagcaaccgccgccgctgacacaataacggatgaagggtttgatgcgctggtgaaaggctgtccgcggctccgtcggttgcgtgtgccaggcaaagtatctgcggggctgcaggacatcatcacggaacacctccgtgcaaatggcaatccgtaccttcgactctccgcctaccatagccaccgtgccaagtgggaacctaccagtgtttttgggtgacacgggaataaaaaaagagcaaatattaaaaaaaactacccttgttaagaagcaatgaccatgccactgccactagcagctgcagaaggagaaggggcagcctcgcccctgcttctcgagttgaccaactcgcggtgaatttcgggagagatgacacgatggttcttggtcttgattagccgcttcaattgtttcttctgttgcggggtgagatcctccttatatctctgcacaaatacaagaagggcttgatgccaaagaactggcagctccctttcttcctcgaagaagcgcataaagtgccgaacgagtgagtcgatgacgcggtacggcagattgtacttcttgtccaataagatccggatgaagatactgttggcgccagagtagtccatctctgccagtttgagcagtgccaccgccgagtgtagtgcagggatggataccttcaccacaacacttccaatgatggttgcttctctgagtgtgcaatctcctgcctgttggtcaaatatcagtgaccggtccggttatatgtaaagatgcaatgaagccaacaacaacgcacctcgcacagtggcaaaatgatgcccttaaagaaggcggctggtttaaagacactcttcttgagggccatatacaagtgccagttcagttttttgtgttcttggatgtcatccctcactcgtgggtataagatcagtgaatagaatctgtcatcaaacatacagcacaaaaacaaaaacaaaaacaaaatagtaagcattagcggcactgaagaaggaccaagcagaaaggagaaaatagaggagaatgatggatagattcagtgtaactatgacattaaggtatcatcaccggccagcggcgcgattctctaaggctaaagtttcatcacgagaagggagagagaggagagagagagagagagagagagaacgaatgaggaattacagtaacagtaccgttgtgccatcttggcgttgaggttagaggcaaaaatacgggtggccatgcgcacggcaggaggtgaccaatggtccgggtctgttaggtacaggatctcctcccagttggacaacgaagggataatcttaaaagctttgggcatagccccgcttctgtatcttgaaagcacttgccccacgctagtacgcacagaagatcaaccaacaaagtaagaaactcgaaagaggcaaaaggaaagaaatgaaagaggagacaaaccctttgtagacttccaccactttagggtcgagtcgctgttcgatgggagcgtctccctctttttcgtgttccttgattttctccatgataatgtcggcaagagtgcgtcgcggttgcagcggtcctgtccacatttgcaatgcacgagcgtcctcctccgtcagttcaatgtcctccacgtcatagtcctctccttcctcttcgtcttcggagccccatcctccgtcctccggttcttcctcctcatctttgctggggaaaaattgtcttgttgcgttttgtctttttttaaaaagaaggacagtgagaaaacctgatcgcttcctctcgcaacactaataaacatacctttcttcgtttcgttcttcggcttgttgctcctgagctaaagctaacgctttttgactcagtgttttatctataaaagtctgaaaaaaaaataagcaaaatcaatcactccacccaagaacacatttcccgttacccttttctctaattgtttggcctttcgctcttgtcgccgggcttttgtgcgttgtgcggcgcgaggctgcacgcgctccgctcgctctttgtcctcctcaatctctgtgcccaacggcttatgccggtggacccccttggccttggactctttgggcatggcgctctgtgtgtgtggggtgtcttcttccgctactctttttttttctttctttttttttccttttctgaggaaattcttctttttatttattgtcgacgatgtctgcatttatttaattttttgccgacactccgggccagggtcaaggccaggaattcttttgttttgtggagtgccgttgttatgggtcttcatcggtatcatcaacgtcattccaaacgtcgctagcatcgtaatcatcaccgccatcgtcatcgtcatcgtcatcgtcgtcgtagtcgtcgctatcggaagggtacgttgggggagggggaggcacggtccggttagctagagtccgccacacatactgaactaggtcagactcttctgacaacggtcctgctatcgattgttgtgattgcgcagcgccaccaaagtccagaagaatgaccaccgtcttcacttcttcttgtgggcaatgtagatttctccaaaggtctacaaataggaacgccatgccctctttcaacagtacatcggagtcctcccacgggtcctgcagcagttgccattgcggcttggagcaaagcgttcccttctggatggctggcactggactacccacccaactgcgtactgccgattggttggtaaagaccacatcgaagccacgtggaacacctggctttagtactgttacccgtctgttggtaaaacgctcccttacaaacaaaaaggggcagataaagcgaaaagaagaagatgaaaacaagtcagtgaagtccgttggaatcaaacgtaagaataatgtgggttgcaaaacacacctgagtttgctaaggtgccatctgatagtttcctgctcaggatagggtaagccataacaagaattgccgacagcatccgtcggttggacaaggacgcgactgttacgatgctccgagaatggcaactgttgcaaagtaatgacaaaagccttccataactggtcttcagtggacaggctggccaggcactgcgttctgaacactctggccaaggtcttggtcaaatggaagagttgctcgcacacagcaggttgggaacacttcccatgtttgtgccgaatgtacaacaattctcctccactgtggtgttggctgtcagtcaaggcaaagaaagggaaatggagcaaagagaagagaacgacgaagagaagaacgagaatgatgaagcgaaaagaaggcgagacctgtcactagcggaggcccgaagcagaaaggacaacacgatggcgcacagcttttcaaacctaggtcgttgagagggacgaaggcgaccactctccttgccaaacaacttgaacactggaaaccacagcatacgtcgcccatacaggtacttccatggcaatttgccttctgagccaggcgcttttttttttgagtatgaggtgagtaatctttgtgcaacagcgaataaaaagagagcgtgattcaaccagaaagtatgggaggttggtctggcgcgaggtagtggtacacctcgaaaaagtgttgctgctcgttcaaagcttccttcaagtttgctggcagcttctgcaaaaggaaggggcgaggaagggcttcatcttgggcgagctgcctccaccgttgactcacgagagcacatcgcttgagcacaacagcaaccggcaaaaactgaaatatgtgcaacactaactcatccggcagtccctccatctgtcgctcctcctccttctctttaatagaagtattagtggtagcagagcagtaacagggtatatatggggaaaatgtgactaaaactgtttttttttaaaacaaaaaaggttgttgcttgctacagttatatccgccgactgttgtcgagaaagtagcttgcttggggtcctccctccttccgctcgcacacacatcgatgctgcgctgagcgcgaaagggaaaataaaagtgtgagagaggaggggtcgaacagctcgttgattttcgattggtgtgtttatctgcagacatcaaggtacgaaaagccattggctactgccatgtttccaaacaaaaagggaggtgataaaagtgacaccggaacaacaacaacaaaaacccatcatcgcaccaagaagaaacagatttgttccatagctcctttttaacaggcaggaaagaagggaggaaggaaaaaataaacgtagctgcgctacgttgtcactttttgttttttgttttggtcagacgagggggaaggaagggagtggtggtggcagtggcagcagggagggagctacgatggaagccgccaaccgccacaacaacaattttgtggacctggaggaagggcgacggcctgaaggagcttttcggagagatggtgaggatggcgaccttgcccgtctgttgcagcacctaagcccaccttctctgtgggctgaagcagacgaagatggaggcggagaggaagcacacatgacagctgatagcagcacaaccacccgtggggaccagccaccacaggaggaccagcaagcagtgggaataccggaccttagcccaagcactcgcagagtactttcaggttgctactggtactgttactagcaacgttatttatccgtaaaacaaatatgaagatgctgactgttaataggagctacttatgctttatgttgagcagcttgacggcggtagtggtggctcttgttacagctctgtcggtaaatggcagcaatacctgcgagaagccgctgcgggcttgggcctccgttgaaatttgtattgttgtggcacaagcggtgctcactctcctcattcattgtaaatttggtggctctctcaacctcgactctctgcaccggcaccccaatgttcccaggttagtctccaacatttttaatgaagagagagtggaacaggcagagagtgagagagagagagaaaagagagaaaagaatacaaagcaatcgtagcacgtaatttaactttattttgtaaaagaggtacattggtgacagcttattcgttcaaccggttattgaacatgttttggtttatatggttcatagtgggttgctcttggacctttgccgatactgattgcgtaaacctctgctttctgcctttaaatcgcatcttttggtatggttctcattcttcattcttttcgttaacagaaagacaaggtgccagtgctatggataacctgtgtagtattgatggcactccatctaaccagcatggggctcgttgtgtgctgttgcttctgtacatgcggcctcatcgtggcactctaccaaatgcggcctcagttctttggggtggtgaagggcgcctcccaaggtcagatcgaacgtaactccaacaaagttaagttcttcaagcacaacggcgatcaaagcaacaaccatgacaacaaagagcgccaaaagtttgaggaatactttggcaacatagaggagcagagcaggatgtgtgccatttgcctttgcgactatgagcacggggaggagattcgcttcttgccctgccgccatcacttccatgcctcctgcgtggatcagtggctcctccaaaacaagtcctgcgccagctgcagaactcccatcgccacatagacaaaaaaaaaaagggcttcccctcgcttttccctttctttgtgtctgtagcaagcaaacacatccctaaaaaaaaagtgccctttgggtaacttattgccaatatggaaatatgctgacgtgggcgaggggttggtgacgtggacgaggaatagctgacgtgtaactaaaggtgctgacgtgtaaccaacggctgacgtggatggggaaaaaaaagacaaaaaagaaagagcagcaggagagagcagaaccgaaattgtaccattttccatcgaaaggacaaaaacaacggtggcatcaatcatgtcgaagaaagtgttggccctttttgatgtggatggaacgctcactaagcccaggggggtaagtagaattttagcgttttcttgctctctctccctctcctaaatgaaagcgttttttcagcaaatcagtccgcagatgttggcagcgctggcccagctaagaaagcgtgtgcctattgccattgttggtggttctgacttgaagaagcaagaagaacagataggccctgatggtacaatgcatgcacagcaacaaaaatgtttattctattcgattctgacatatcttgctgactgcagtgttgaagctttttgactatgtcttctcggagaacggacttgatgccttccaggatggtgaacgcttgggcgaggaggtttgctttgattattcttatttgttgtttgcaactggttttgttggctaacttgcttgtgtaatagagcctgaagagttacctgggtgaggagaaggtgaaggagttcgtaaaatacacccttcgcttgatcgctgatcaagatattcctgtcatgaggtttgtttgatcaagcttctggtttattgctagcgttcatcaattgaacttgcttcctctctctctctctctctctctctctctctctctctctcgctctcgctctcctctccctcctctctcttctctctctggtaatgcaggggcactttcattgaattccgtaagggaatgttcaatgtttctcccattggtcgtaactgctcgcaagaggaacgggaggcctttgagcagtatgacaaggtcttccattctcactgttctcattttctcttgtctcttctgttgctcaccgtaaatataaacaggagcacaacatcagggaaaacatggtgaagcaggtaagttaaactaatttcgtttttctgttttaattcccaaaacgcaacacattccccatgggttccttcgaagttttcacatcccatgacaccaaatacttgggtgtcggggctgtgtgaaaactatttaagcaaccgcttcgctctctccagtcgtatcccacaacccatacatgtcacaaacaactccctctgacactactactaccactgccccacaactaagagaacccaccgaagatctgcactacatcgcccccacggagctggtcgagcgctatggcgtctccctcagtggcctggccaagtggcacaaagagggcaaggtggcggccctccgcacgccaggcgggcaccgccgctacgcggcagagcacgttagacagcttcttggcctccccgccgcagcccccgaaccctcgtcccccaaaaagatcaaggccgtctactgccgagtctccagtcacggacaacgagagcacctcaagcatcagattgagagtctgcgagaagcctacccgaggcacaaggtctacagcgacatcggctcgggcatcaactggaagcgcaaggactttgtcgcccttctggagcaggtccttgctggacgtgtcgaggaggttgtggttgcccacagagaccgcctctgtcggatcgcctacgagctcgtcgagcacgtcttccgtaagtgcggaacccgtctcctggtgcaccgtccggacgacgaggaggacgacgagcccgagccaagcaacgtcctcgccgaggacctcctctccctcgttaccgtctttgtctgtcgacaccacggtcaaagacgatatacagctggccaaggaaacagcacaagcgcgccaaagaggccgcggcggaaggaaaaagaaggctcccaaagagacagaaagtccaagcggcggcggcggcgagggggaggaagatcagacgctgttcaagacgagaaagatacgcctgagacccaccagggaacaggctcggatcctcaatcgctggttcgggggtgcgaggaaggtctggaacaccaccctcagggaactcaaacgagggaacgtggggtggaaattgaaccaaatgcagggggtctgtgtggttaggccaagtattacgcttgattacctcgagggtgtgccctactccatcaaacacgaagcggtgaagcagctccacagcaaccacctggcgtgcgagaccctcaaggatcagggccacattcgacgcttctccgtcaaatacaagcgcaaaaaggaccaccgcaccgagtccatcaagatcctcggacactatatccactggtggaatggcttcgtctaccccgatgagctccacaagagcaagttgtggcaagaggccaacaaaaggaaaccgaagcaaaagcggacgcgaaatcctcacgttaagcacgtcgaccccctcttcgatcccgtggcggacgctttcgagggcttggagctggacgacagagggcgcttgaagaggacctgtaccctgcacaaggataagcggcagcatttttggctttgcgtgccgatccccatccaacagcatgaacgggctcccgaaaaccaagggagcatcgtggccttggatccaggggttcgcaccttcctgtgtggatacagtcctaccgaaggggcggtgagggagtttgggcgcaacgactttggccgcatctggcgtctcgggaaacacgcggacgccttgcagtccaaaatcgaccgctccccaccgagccgccgcaagagaaaactccgtgctctgctgaagctgcgcaagaggatcaccaacatggtcgacgattttcaccgcaagacggccctcttcctgtgccgccgctacgatcatgtcatcatccccacctttggtgtaaagggcatgactgccatccgggggagacggcggaggaagatcggcaaaaagacggccaggatgctctactcctggggccattaccgattccgccagtggctgatgcacaaggcgagggaatggggcaccagggtctacgttcgatcggaggcttggaccagtaagacttgcacctggtgcctccgtgtgacccacgaacagaaacaacacaatcgacgagagcggatcttcgagtgcaaacacagggactgtgggatacgactggatcgcgacataaatggagcgcgcaacatactcctccggagcctctgttgcgcagcgttgcccgatggagccaatgggggcgtgctggtgggaaagtggatgggcgcttctgaagccctctagtccaccccatcaccacatcctcgcaagaactttcattttgtgagtttactcacttgtgtgacttttaatccatcagttgagagaacactttagcggatttggtcttcagttttccattggtggtcagatcagttttgatgtgttcccagaaggatggaacaagacctattgcctgcgttacttgcaagactttgacgaaattcatttctttggcgacaagactatgccggtatgtctctctttctctctctgacgctgttttgtactaaagtgaggcgaacaacagggtggtaacgactatgaaatatttatgcacgagaggacaattgggcacacggtcaccagtccagatgacaccatcaaacttttacaagagcttttctctgctaactaatggccttcctgaaaaaaataaagatgcaaatgtgcaggtttcattgatgaaaacgttcaatttttttcacacacaaaacaaaaaaccaggaaggggactcaaggggagagggaaaaaaggatggcgggcagatgaccacttaatctattttgatcatgccgtaaatctttctaacgaagatggatgtgccgataaaaccgatggcaccttttttgaatgtggttaaggagagagagagtgtgtgagagagtgaagtggaaaaagggggaggagaagaaatgataggcaccacaaagaatagcaaggccgaggcagaacatggccatgtagccaaagtagaaggcagtttggaagaaaccagacatcttggtcttcacgaggaagtagtagatggcatagaggtagacatatccggcagtggaggctgcggaaaggaagctggtccattgccaacgatagtcttcagagttgagcaggaaataagtggatacaatagtcacgcacacagtcactatgatcaggatgacgaagaccaggcacataaagccgtagacatagtagtatttgtagaaggaagtgaagatgaagtacatctctatgaagatgctgccgaaaggaagcacaccgccgagggcaacatgcacccatggttgcaggtaccacttcttttcaggaatttgccgagggacttggttaacacggcatggcgcgttgttgtccccattccaattcttaccaatgacagtgccaaccagcgtcaatgggaaggcaataaatatccagatagaaagcacagccacctattatcataaaagatggaggtttagtttgtatgtggtgtgttgaaatgcggactttgatagaggaagaactgaccatagagccgaaaggaatgtagttgagagactcataagagagggcgatgaagttcaaacccaacgcaatgagaaagcagaggcctgggaaaagagaagcagtgcaaagcatggtcttgatccagtgcttaccattattgcgtgcatagtatccgccgctgctgtatccagccacaaacgaagtgaaggcatagcaaacgatggccgcggtgacaacggtgccacgacgggcataatatgttccaaccgtagccaggaacagcacggacaagacgaggatcaccaattggtgaccggtgcccaccagggaggaaaacaggatgagacgtgaaggggcgcggaacacatcgccgtgaacctgcttccaacccgactcgtcgctaatatcatcgtcttgaccgtcctcgtcatctttgatgccgaagcgggcatagtccttccgcagcgtccgcataagaatgatggagaccaaacccaccaggaatataaccatcatgaaagagttgaagatggaaaaccagtgaatctgccgaaaaaaacaaatattacgacaaagttaatgcgcggttggtacaaaagaaagaggagagatataacacaccttgtgctcgaaaaagcttctgtcgaggtactttctgaagcgatcctcaaaaggagtgtcggtgtgatgccactctacagagtaggtgaactccagctccattccttcctctacagctttaggttgttcggaagtaagattaacctcaatgaccttttggtgagatataaacagtgagtataattccacttgcaattgttcagaagataaaggtagactcaccctgttttcattccaggaaatggaaaagctcttgtgcgtgtagataaaggcttgaggagaggtatcatcatccaaatactctccaaccattccccaaatgggcagatcatcttatgttcattaacaaaggattgttaggtcagcgacaaaacaccaagagaaagaaacgacaagacagagagagagagagagagagagagaggccacattcagaaaaaaatagtgattccggtttgctgttcttcttccgtagcaatgcttcagaagagggagcattttctcatcatagtaacgtgtggcaagcatagcggcatatggaggagggaaggagagagagagagagagagagagagagagagagagagagagaagatttgataagaaaagaacggtacctaaaaagagttggtaccagtaatgctggaagatagcgttcttaaatgacttggcttgttgtttgttgagcgttcttgcacatatctttgctctgggcatatcctctattcattggtttgtacaaaagaagttttagcaacagaaaaagcaagaaagcaagaacacaaagagagaaacaaattcgtggtaattgtttcagaagctaatacatgaatagccacatggtgctccaagttttgctcggagaacatcggcaaaaaatatcatcttgtaacatcaccacattgtcgttctccttaacggggaggccaacaaaaagagagcaagaaagagaaagaagaaaagagtaacaagacaacaaaagaagagaaacgcggcaacaacaaaagaaatagagaggaggttacctctaaaccgaatggtaattctgctttcaataagttcatagccgaggagagcctcgccaaggccctcagttttagactcgactatcttatcgggtggacagaagggaaggctgtagtagctataggtctcttgggggttccggaaagggcccaccttgttcacgtacagcgtcaccttttcttgtttgtcatactgttgaaggaagaaaataagaaacggtgggcaagaaatgaaagacataaaaactcagttggggttggggctcgctcagattggagtggaggtaaggagttgtttttgttcctccgaagatacaaataaaataaacaaataaaatacaaaaacaaaaacaaaaacgcacgctgtgctcatgagcccatttggcaggagagaacgggaagtaggcgatcccaatgaacgaaaagagaactacggcgaccaccaccgtccaaatgagctttgtttctttcatcctcccgctgctgctcctcctcctctgtgcacttcaagaaagaaaggacaaaaaaaagcggtgacaaaaaggaacaaccaccaaaggcaggaaggagaagccgaaggtcttctcttttttgttgtttgttgttttgagccctttttttcttggttttcttttgcctttttttggcgtagagcacgcgaggggtcttggaccatccttttttcggccttaatatgaggggtagtctgatcaatgtttttgtcgacaagccacctctctcttctcctttcattcttcctctctcttctcctttaatactatctcttatcctcttctctccctatctctctggccaagagcaaggtaacacaggtttacggtcatgattaaggcggcgcaaagatcataagatctaaggacaacgaaaaaagaaatcacgaccttagtcttttgggccaatgagcatgtttcccgccaaaacaacccttccttctcccacgtctttgaaggcaaagtggtgggttggggtgtggggtggggtgtacggaatggatgctcatgctgctgccgccaataaacttttggtactcgtcattcgccttgacacttttctgctactcgttttcttttcttttcttctcttcttttcttttcatttctttcttttcaaaagtaaacacacagacacacacatccacgaagctccacgcaccaccgtatttctcattgctacgcttctactacacaaggaggaaaccagcggaaggaggcagaggtggaaaccgaagcggttcagccgcaggcagcggcactgctccgattgaaaaggtagcgttcttttttctctgctcgctcactacattttttgatgatggaaaaaaatttgttaccaaccactcactaatgatttcttttgtttaaaaagaacagcatcacgaacctctgtgcgcctcttccacaacgctgctggaagctggcctgaatggcaagttgcccacagtgcggaaaaaagtttgctacctctcacgggttggccatccacttcggtcgggtccacaaggaagggggtcgcgccactacttctgctacttccactgctactcggaaaagaagagcggaaaacgccccagcggcacctcaggcaagggcacagaagcgtggtaggccgcaggctgcacctgcccagcccttttggaaccagttttccagcgaaatcgggagaagattaatacgcccggaagccttgtgcttggaagaaccctttgcctgtggttcaggatggttcaccgcctgcaagcacattcctaacggagaaaaggtgttggaggaggaggagaagaagaaggagaaggagaagaaggaggaagaggaagaggagaaggagaaggagaaggaagaagaggagaaaaaccagaaaggcttgttaggcctcatcgagggactcgttccgtctcgcccagccgtacagcttaccaaaaaaggcaagaacggagaggagaaaccggtagtggggcgagtggagaagatccgcctttatccgcgctcagaacaaaagaagacgctggccaagtggttcggcacagtacgatggacctacaacaaggccgtggagttccattgtgaacatcaaggaatgcctcgtgatgagatgaaggaacaagtcaggaagaaattcctaaataacagcaatttcaagggagagaacaagagccttgcgtgggtgttggaaactcctcgattcattcggagtgacgctgtcgatgatttcttcaacggcgtgaaaagcagcttggcggcgggcagaggcacgactggattccagatgaagttccgtggtaggaaggacaagagccagtctctcagcatccaagccagggagtggaaccacaacagctctatccgccaactcttcttcggggaggcgcgaatcaaagcgagggacaagaactacaaagttccgtcagaggtgctctatgccgttcgtctggtgaaggacactcgactgggccattactacctctgcgtgcctcagcctttgaagctcatgggcgagagccaagcccgtgagcaccgaaggagagaggcaggcatcatcgccttggatccaggagtgcgcacattcatgaccacctacaacggctgcggggaggtcaccgagtggggcaaagcggacatcaacgagataggcaagctgtgccaccgcctggatcgcatgcagagtaagggcaccaaggtcaaccacagacaacggcgccgtctccgaagggccgctgctcggcttcgccagaggatccgcaacctggtggatgacctccacaagaagctcgtgtcttggttggtcaggaacttctccgtcatccttctgccagagttcaggagccagcagatggtgcggcgaggccaccgccgcattggctcacgaacggccagagccatgctcacctggtcccactatcgcttcaggcagaggctcctcaacaaggccaaggaatttccgtcctgtacggtctgcctctgcgatgaggaatacacctccaagacctgcggcaagtgcggccaagtccaccaccagttggggggaaacaagacctttcggtgccctcaacccgagtgtggctaccaggcggatcgagatgccaacgccgcccgaaacatcttgatccgcttttttacgttgcaagcacttaccacctcctcctcctctgtgagggggcggtaggcggtaaggttgctttggtgccggcaccgttgcttatagcgagtcgtaagacaagccgtgattaggcacgccggaggtgggttattttttgtgtctgttttttgttttccttttactaattttgctttattttcgttgtcccatggatcggcttgatcttggcgccgccttagtcatgatgtattaatacaaggttatcaattcatctcacacgaggtggagtcgttgggttttaggatggcgcaacaaggcagagggtgtggttagcgcctccggcgacggcaataacgcgcacgccttgtttttggaggtcgttcacccgcccgcgttgcagcgagtctgcggaggagccaattgtgcggcctagctttccaaaactagcgtcaccccatgtgtacaatgcccccttttctagcgttgaaaacacaaagcgcagcgttaggatgaccaagggactactccttcccctaaaataagaaagataagaaccgctgatggccattttatgagtctctccgcacgcgatagccactattttcttcgtatgaggctccttggcaaaagtgtgcaagtagcctgttgaatacacaccgccatcgcctgtattaatggagaaaagttgacaaacaacaacgcacacaggaacgaagaaaaggaaattaccatcaagaagcaggctgaatatttttccagctttgcagcttacaaaccgagcatcagcagggagaggtacctcaacagggatgagaacatcttgctctttgtccgatagtcctagctggtgatactcattagagccccatgcatagaccttcccgttcgttgtgacacaaaggctgtgagaatgtccagcagccaccgctgcaacattcctcaaatggggaactggcgttggtacatttctgttgagggtgtcccccaatcccaattggcctcgttcgttcctcccaaatgcgtagaccgttccatccgctgtttcggtttgttgtggttgtgtaggtgcgatgtgagaaagatgaggagagctcattgcagtcacggtagaaaagcaagcaaacccagtaatgctatggtgtggaacgcgccgccggtcaccgccacaactgttttaccgcaaagagcctcaaccagcttgggctgcgaatacgaagtctgttcaccatgtcctaatgggccgtagtagccgcatcccctacacgcaacatgggcgtgagaaagaaggacgctatggggatggtaataacaaacgtaccaggaatagagctcgccatgttctatatcatcagggagtgggcgcaccagtatcatcaaatataagcacatcaaacgtgagccgagcataacaaacggaaaagagagaacaaagaacaaagaacaaaagggagaagcgaaagaaacggacagaggccaaccagagatggcgagcgaaaaagagtcgccgcaggccacctgtttgaagcgaacagtttgtccagctgagtccctaacgatgaccggagtgggcaggtgccggtcctcatcctcctgaccaagtcccaactggccaaaatggcacttaccccaactgtagagcaaaccttcctcctgctgtagcttcgcttcttcttccgtctctttggtcacgttggcagggacagcggtaatagccaagacgtgaccggcaccgcaggccagctgtccaaactcgacgttcggctgtgaagcgaaccctttcacgaagcgactgtgcgactgctcatccccttaaagatgcgcagggtcaggtgatctctactgcagccgaggagggacaaacaaggaccacaaaccttgggctaagcggccatatacccctctcccgacagcgtacaagttgacaggatacttctgttcgggtttaccagctttcgctgcggcttgttgatcaaccttgccgtcgttgtgctgtcgcgacgctagctttgcttgcagcgcacttttgagatccatccctgaggtgcgattttgttgtgtgctgccctcaggatgacatgaacaaaacaaaaactcagggggaggggtcaaccgagagcggttcatggaaaccggcgacggctcggttggccgtcttcagggatccacaaaattaaacccatcagcagcagcccggcaacctagcaatagctcccatcatcagcagggagagtgagccacatgagagggccccctcgcaacgtggtacacgaattgtagtgtacaaacaaaaaaaacaagcaagcaaggaggcgccctcccttggacacaacaacccttcatcggttcatcctcccgagggaggtgaggccttgtccccgtggggcaaaaccactgctccgagtggccgacgcaaaggctgcgagtggccccccccccgaagatgaccctcgagcgccagcgcggcgaggtccccaccctaacccccccccccgccattaagtaaactgcgaaaagcggaggggaggagcgaaaagctaaccgcagcccgaggggaagcgcacgtgaccgccacgctatggaagcagactccgtagagcaagagatattgctgctttgcaccatgcttgccagccaatgggcgctggagggcaaaatgaccaaacagcacccggctgggtgtgtcgtggaggtgctgctggccacacgccaccagtccaactcgcatacggaggcgctgcgacggaccgtcatcatcaccaactttgaggaggacatcatacaacagggaaacataccgaacgaagtcataaaggtgttcagccactacgaagaggagaggggcatgcttgccgttatagagcttgccctggaggtgttgttgtccacagacgtgctcgttcgcttcctcttcaaaaccgatgcagggagcaacccctacgtcaggatgggcgtatttctgcaaaacgtgggcatcgtttttggctttgtggacaaagtaagagcagagttgcagtttaagcatataagcttaggttggcccactgctaagagcgctgcaccccaacttaatggccataccaccacatcctctataccttcctcgtcttgttcagcttctcctcgttcgtcttcttcctctgcttcttcgtcaccttcttctgcttcaacaatgggatatacgcaattgtttagttatgcaggcggatgtggacaggacttgcttcgcaaacttcaacccaactatcaaacacacccagcccccgttgctccattgttgccaacttctgcgagctcacaatccgtgcaagccacttcctacaaccaacatcaaggccaaaacgataaccaacgccaaagcacgcctccccagcaacttatcgggtcagtctcaaacactacgtcagccagtgtcacatctaccactgttgctccgccccttattacttcaggcaacagccagactgatggcgaaaggaataccctgagcaagaatgaacgcaaacggtcgaaaccagagagagattttaacaaagactcccagctatcaaccacacaacctgctccgactgtagataaagggaaagacaaggtgcccaatcctaatagagaagtaagaaaacgactcgaagaacacagggaatatgttggtgatagcgacggaggcagtgatggtgatggcgactttgactcagaaggttcagacgaggtggactcagaggaggaagtcgagcagacagatagtgacacagatgaagatgaggaagttttgcaagagaacaacaagaaaaagctgaaaacgaaagataacagggtcactgaagaggcaaaaccgaagtattggaaagatgtctatcacctcatacctgaatctcaacacaagcatcctctatccataacgatcggtgcaagcttatggatttgcgccctctgttgtgtggagaatgtgaagaagggacacggacatgggtcaatcgaatacttgcctaaa

SEQ ID NO: 267 - DNA, 18936 bp, unidentified
  source 1..18936: mol_type = other DNA; note = Balamuthia sp.
taacttcatgacgaacaacatcctgcagcaaatagccgcacattgccccaacctaaacgagctgtttctgctccccgcctacggcaaggcatccgcacacaaccatctattcgagaaagacggggagggcgggagcgaagcaaccgccgccgctgacacaataacggatgaagggtttgatgcgctggtgaaaggctgtccgcggctccgtcggttgcgtgtgccaggcaaagtatctgcggggctgcaggacatcatcacggaacacctccgtgcaaatggcaatccgtaccttcgactctccgcctaccatagccaccgtgccaagtgggaacctaccagtgtttttgggtgacacgggaataaaaaaagagcaaatattaaaaaaactacccttgttaagaagcaatgaccatgccactgccactagcagctgcagaaggagaaggggcagcctcgcccctgcttctcgagttgaccaactcgcggtgaatttcgggagagatgacacgatggttcttggtcttgattagccgcttcaattgtttcttctgttgcggggtgagatcctccttatatctctgcacaaatacaagaagggcttgatgccaaagaactggcagctccctttcttcctcgaagaagcgcataaagtgccgaacgagtgagtcgatgacgcggtacggcagattgtacttcttgtccaataagatccggatgaagatactgttggcgccagagtagtccatctctgccagtttgagcagtgccaccgccgagtgtagtgcagggatggataccttcaccacaacacttccaatgatggttgcttctctgagtgtgcaatctcctgcctgttggtcaaatatcagtgaccggtccggttatatgtaaagatgcaatgaagccaacaacaacgcacctcgcacagtggcaaaatgatgcccttaaagaaggcggctggtttaaagacactcttcttgagggccatatacaagtgccagttcagttttttgtgttcttggatgtcatccctcactcgtgggtataagatcagtgaatagaatctgtcatcaaacatacagcacaaaaacaaaaacaaaaaaaaatagtaagcattagcggcactgaagaaggaccaagcagaaaggagaaaatagaggagaatgatggatagattcagtgtaactatgacattaaggtatcatcaccggccagcggcgcgattctctaaggctaaagtttcatcacgagaagggaagagaggagagagagagagagagagagagaacgaatgaggaattgcagtaacagtaccgttgtgccatcttggcgttgaggttagaggcaaaatacgggtggccatgcgcacggcaggaggtgaccaatggtccgggtctgttaggtacaggatctcctcccagttggacaacgaagggataatcttaaaagctttgggcatagccccgcttctgtatcttgaaagcacttgcccccacactagtacgcacagaagatcaaccaacaaagtaagaaactcgaaagaggcaaaaggaaagaaatgaaagaggagacaaaccctttgtagacttccaccactttagggtcgagtcgctgttcgatgggagcgtctccctctttttcgtgttccttgattttctccatgatacatgtcggcaagagtgcgtcgcggttgcagcggtcctgtccacatttgcaatgcacgagcgtcctcctccgtcagttcaatgtcctccacgtcatagtcctctccttcctcttcgtcttcggagccccatcctccgtcctccggttcttcctcctcatctttgctgggaaaaattgtcttgttgcgttttgtcttttttttgaaagaaggacaagtgagaaaacctgatcgcttcctctcgcaacactaataaacatacctttcttcgtttcgttcttcggcttgttgctcctgagctaaagctaacgctttttgactcagtgttttatctataaaagtctgaaaaaaaaataagcaaaatcaatcactccacccaagaacacatttcccgttacccttttctctaattgtttggcctttcgctcttgtcgccgggcttttgtgcgttgtgcggcgcgaggctgcacgcgctccgctcgctctttgtcctcctcaatctctgtgcccaacggcttatgccggtggacccccttggccttggactctttgggcatggcgctctgtgtgtgtggggtgtcttcttccgctactctttttttttctttcttttttttttccttttctgaggaaattcttctttttatttattgtcgacgatgtctgcatttatttaatttcttgccgacacccgccgacgggcactacggttgctggcggtccttgcaaaggccaggaattcttgtgttatgtagattatgggtcttcatcggtatcatcaaagtcattccaaacgtcgctagcatcgtaatcatcaccgccatcgtcatcgtcatcgtcatcgtcatcgtcgtcgtagtcgtcgctatcggaagggtacgttgggggagggggaggcacggtccggttagctagagtccgccacacatactgaactaggtcagactcttctgacaacggtcctgctatcgattgttgtgactgcgcagcgccaccaaagtccagaagaatgaccaccgtcttcacttcttcttgtgggcaatgtagatttctccaaaggtctacaaataggagcgccatgccctctttcaacagtacatcggagtcctcccacgggtcctgcagcagttgccattgcggcttggagcaaagcgttcccttctggatggctggcactggactacccacccaactgcgtactgccgattggttggtaaagaccacatcgaagccacgtggaacacctggctttagtactgttacccgtctgttggtaaaacgctcccttacaaacaaaaaggggcagataaagcgaaaagaagaagatgaaaacaagtcagtgaagtccgttggaatcaaacgtaagaataatgtgggttgcaaaacacacctgagtttgctaaggtgccatctgatagtttcctgctcaggatagggtaagccataacaagaattgccgacagcatccgtcggttggacaaggacgcgactgttacgatgctccgagaatggcaactgttgcaaagtaatgacaaaagccttccataactggtcttcagtggacaggctggccaggcactgcgttctgaacactctggccaaggtcttggtcaaatggaagagttgctcgcatacagcaggttgggaacacttcccatgtttgtgccgaatgtacaacaattctcctccactgtggtgttggctgtcagtcaaggcaaagaaaggaagatggagcaaagagaagagaacgacgaagagaagaacgagaatgatgaagcgaaaagaaggcgagacctgtcactagcggaggcccgaagcagaaaggacaacacgatggcgcacagcttttcaaacctaggtcgttgagagggacgaaggcgaccactctccttgccaaacaacttgaacactggaaaccacagcatacgtcgcccatacaggtacttccatggcaatttgccttctgagccaggcgcttttttttttgagtatgaggtgagtaatctttgtgcaacagcgaataaaaagagagcgtgattcaaccagaaagtacgggaggttggtctggcgcgaggtagtggtacacctcgaaaaagtgttgctgctcgttcaaagcttccttcaagtttgctggcagcttctgcaaaaggaaggggcgaggaagggcttcatcttgggcgagctgcctccaccgttgactcacgagagcacatcgcttgagcacaacagcaaccggcaaaaactgaaatatgtgcaacactaactcatccggcagtccctccatctgtcgctcctcctccttctctttaagtggtagcagagcagtaacagggtatatatggggaaaatgtgactaaaactgttttttttttaaaacaaaaaaggttgttgcttgctacagttatccgccgactgttgtcgagaaagtagcgggcttgggtcctcccctccttccgctcgcacacacatcgatggagctacgatggaagccgccaaccgccacaacaacaattttgtggacctggaggaagggcgacggcctgaaggagcttttcggagaggtggtgaggatggcgaccttgcccgtctgttgcagcacctaagcccaccttctttgtgggctgaagcagacgaagaaggaggcggagaggaagcacacatgacagctgatagcagcacaaccacccgtggggaccagccaccacaggaggaccagcaagcagtgggaataccggaccttagcccaagcactcgcagagtactttcaggttgctactggtactgttactagcaacgttatttatccgtaaaacaaatatgaagatgctgactgttaataggagctacttatgctttatgttgagcagcttgacggcggtagtggtggctcttgttacagctctgtcggtaaatggcagcaatacctgcgagaagccgctgcgggcttgggcctccgttgaaatttgtattgttgtggcacaagcggtgctcactctcctcattcattgtaaatttggtggctctctcaacctcgactctctgcaccggcaccccaatgttcccaggttagtctccaacatttttaatgaagagagagtggaacaggcagagagagagagagagagagagagagaaaagagagaaaagaatacaaagcaatcgtagcacgtaatttaactttattttgtaaaagaggtacattggtgacagcttattcgttcaaccggttattgaacatgttttggtttatatggttcatagtgggttgctcttggacctttgccgatactgattgcgtaaacctctgctttctgcctttaaatcgcatcttttggtatggttctcattcttcattcttttcgttaacagaaagacaaggtgccagtgctatggataacctgtgtagtattgatggcactccatctaaccagcatggggctcgttgtgtgctgttgcttctgtacatgcggcctcatcgtggcactctaccaaatgcggcctcagttctttggggtggtgaagggcgcctctcaaggtcagatcgaacgtaactccaacaaagttaagttcttcaagcacaacggcgatcaaagcaaacaaccatgacaacaaagagcgccaaaagtttgaggaatactttggcaacatagaggagcagagcaggatgtgtgccatttgcctttgcgactatgagcacggggaggagattcgcttcttgccctgccgccatcacttccatgcctcctgcgtggatcagtggctcctccaaaacaagtcctgcgccagctgcagaactcccatcgccacatagacaaaaaaaaaagggcttcccctcgcttttccctttctttgtgtctgtagcaagcaaacacatccctaaaaaaaacgtgccctttgggtaacttattgccaatatggaaatatgctgacgtggataaattgctgacgtgggtgagagcttgctgacgtggaccaggaatagctgacgtgtaacttaaggtgctgacgtggatgggaaaaaaaaagacaaaaaagaaagagcagcaggagagagcagaaccgaaattgtaccattttccatcgaaaggacaaaaacaacggtggcatcaatcatgtcgaagaaagtgttggccctttttgatgtggatggaacgctcactaagcccaggggggtaagtagaattttagcgttttcttgctctctctccctctcctaaatgaaagcgttttttcagcaaatcagtccgcagatgttggcagcgctggcccagctaagaaagcgtgtgcctattgccattgttggtggttctgacttgaagaagcaagaagaacagataggccctgatggtacaatgcatgcacagcaacaaaaatgtttattctattcgattctgacatatctttcttgctgactgcagtgttgaagctttttgactatgtcttctcggagaacggacttgatgccttccaggatggtgaacgcttgggcgaggaggtttgctttgattattcttatttgttgtttgctactggttttgttggctaacttgcttgtgtaatagagcctgaagagttacctgggtgaggagaaggtgaaggagttcgtaaaatacacccttcgcttgatcgctgatcaagatattcctgtcatgaggtttgtttgatcaagcttctggtttattgctagcgttcatcaattgaacttgcttcctctctctctctctctctctctctctctctctctctctctctctctctcttgctctcctcctctccctcctctctcttatctctctggtaatgcaggggcactttcattgaattccgtaagggaatgttcaatgtttctcccattggtcgtaactgctcgcaagaggaacgggaggcctttgagcagtatgacaaggtcttccattctcactgttctcattttctcttgtctcttctgttgctcaccgtaaatataaacaggagcacaacatcagggaaaacatggtgaagcaggtaagttaaactaatttcgtttttctgttttaattcccaaaacgcaacacattccccatgggttccttcgaagttttcacatcccatgacaccaaatacttgggtgtcggggctgtgtgaaaactatttaagcaaccgcttcgctctctccagtcgtatcccacaacccatacatgtcacaaacaactccctctgacactactactaccactgccccacaactaagagaacccaccgaagatctgcactacatcgcccccacggagctggtcgagcgctatggcgtctccctcagtggcctggccaagtggcacaaagagggcaaggtggcggccctccgcacgccaggcgggcaccgccgctacgcggcagagcacgttagacagcttcttggcctccccgccgcagccccgaaccctcgtcccccaaaaagatcaaggccgtctactgccgagtctccagtcacggacaacgagagcacctcaagcatcagattgagagtctgcgagaagcctacccgaggcacaaggtctacagcgacatcggctcgggcatcaactggaagcgcaaggactttgtcgcccttctggagcaggtccttgctggacgtgtcgaggaggttgtggttgcccacagagaccgcctctgtcggatcgcctacgagctcgtcgagcacgtcttccgtaagtgcggaacccgtctcctggtgcaccgtccggacgacgaggaggacgacgagcccgagccaagcaacgtcctcgccgaggacctcctctccctcgttaccgtctttgtctgtcgacaccacggtcaaagacgatatacagctggccaaggaaacagcacaagcgcgccaaagaggccgcggcggaaggaaaaagaaggctcccaaagagacagaaagtccaagcggcggcggcggcgaggggaggaagatcagacgctgttcaagacgagaaagatacgcctgagacccaccagggaacaggctcggatcctcaatcgctggttcgggggtgcgaggaaggtctggaacaccaccctcagggaactcaaacgagggaacgtggggtggaaattgaaccaaatgcagggggtctgtgtggttaggccaagtattacgcttgattacctcgagggtgtgccctactccatcaaacacgaagcggtgaagcagctccacagcaaccacctggcgtgcgagaccctcaaggatcagggccacattcgacgcttctccgtcaaatacaagcgcaaaaaggaccaccgcaccgagtccatcaagatcctcggacactatatccactggtggaatggcttcgtctaccccgatgagctccacaagagcaagttgtggcaagaggccaacaaaaggaaaccgaagcaaaagcggacgcgaaatcctcacgttaagcacgtcgaccccctcttcgatcccgtggcggacgctttcgagggcttggagctggacgacagagggcgcttgaagaggacctgtaccctgcacaaggataagcggcagcatttttggctttgcgtgccgatccccatccaacagcatgaacgggctcccgaaaaccaagggagcatcgtggccttggatccaggggttcgcaccttcctgtgtggatacagtcctaccgaaggggcggtgagggagtttgggcgcaacgactttggccgcatctggcgtctcgggaaacacgcggacgccttgcagtccaaaatcgaccgctccccaccgagccgccgcaagagaaaactccgtgctctgctgaagctgcgcaagaggatcaccaacatggtcgacgattttcaccgcaagacggccctcttcctgtgccgccgctacgatcatgtcatcatccccacctttggtgtaaagggcatgactgccatccgggggagacggcggaggaagatcggcaaaaagacggccaggatgctctactcctggggccattaccgattccgccagtggctgatgcacaaggcgagggaatggggcaccagggtctacgttcgatcggaggcttggaccagtaagacttgcacctggtgcctccgtgtgacccacgaacagaaacaacacaatcgacgagagcggatcttcgagtgcaaacacagggactgtgggatacgactggatcgcgacataaatggagcgcgcaacatactcctccggagcctctgttgcgcagcgttgcccgatggagccaatgggggcgtgctggtgggaaagtggatgggcgcttctgaagccctctagtccaccccatcaccacatcctcgcaagaactttcattttgtgagtttactcacttgtgtgacttttaatccatcagttgagagaacactttagcggatttggtcttcagttttccattggtggtcagatcagttttgatgtgttcccagaaggatggaacaagacctattgcctgcgttacttgcaagactttgacgaaattcatttctttggcgacaagactatgccggtatgtctctctttctctctctgacgctgttttgtactaaagtgaggcgaacaacaggggggtaacgactatgaaatatttatgcacgagaggacaattgggcacacggtcaccagtccagatgacaccatcaaacttttacaagagcttttctctgctaactaatggccttcctgaaaaaaataaagatgcaaatgtgcaggtttcattgatgaaaacgttcaatttttttcacaaacaaaacaaaaaccaggaaggggactcaaggggagaggaaaaaaaggatggcgtaggcagatgaccacttaatctattttgatcatgccgtaaatctttctaacgaagatggatgtgccgataaaaccgatagcaccttttttgaatgtggttaaggagagagagagtgtgtgagagagtgaagtggaaaaagggggaggagaagaaatgataggtaccacaaagaatagcaaggccgaggcagaacatggccatgtagccaaagtagaaggcagtttggaagaaaccagacatcttggtcttcacgaggaagtagtagatggcatagaggtagacatatccggcagtggaggctgcggaaaggaagctggtccattgccaacgatagtcttcagagttgagcaggaaataagtggatacaatagtcacgcacacagtcactatgatcaggatgacgaagaccaggcacataaagccgtagacatagtagtatttgtagaaggaagtgaagatgaagtacatctctatgaagatgctgccgaaaggaagcacaccgccgagggcaacatgcacccatggttgcaggtaccacttcttttcaggaatttgccgagggacttggttaacacggcatggcgcgttgttgtccccattccaattcttaccaatgacagtgccaaccagcgtcaatgggaaggcaataaatatccagatagaaagcacagccacctattatcataaaagatggaggtttagtttgtatgtggtgtgttgaaatgcggactttgatagaggaagaactgaccatagagccgaaaggaatgtagttgagagactcataagagagggcgatgaagttcaaacccaacgcaatgagaaagcagaggcctgggaaaagagaagcagtgcaaagcatggtcttgatccagtgcttaccattattgcgtgcatagtatccgccgctgctgtatccagccacaaacgaagtgaaggcatagcaaacgatggccgcggtgacaacggtgccacgacgggcataatatgttccaaccgtagccaggaacagcacggacaagacgaggatcaccaattggtgaccggtgcccaccagggaggaaaacaggatgagacgtgaaggggcgcggaacacatcgccgtgaacctgcttccaacccgactcgtcgcttatatcatcgtcttgaccgtcctcgtcatctttgatgccgaagcgggcatagtccttccgcagcgtccgcataagaatgatggagaccaaacccaccaggaatataaccatcatgaaagagttgaagatggaaaaccagtgaatctgccgaaaaaaaacaaatattacgacaaagttaatgcgcggttggtacaaaagaaagaggagagatataacacaccttgtgctcgaaaaagcttctgtcgaggtacttcctgaagcgatcctcaaaaggagtgtcggtgtgatgccactctacagagtaggtgaactccagctccattccttcctctacagctttaggttgttcggaagtaagattaacctcaatgaccttttggtgagatataaacagtgagtataattccacttgcaattgttcagaagataaaaggtagactcaccctgttttcattccaggaaatggaaaagctcttgtgcgtgtagataaaggcttgaggagaggtatcatcatccaaatactctccaaccattccccaaatgggcagatcatcttatgttcattaacaaaggattgttaggtcagcgacaaaacaccaagagaaagaaacgacaagacagagagagagagaagaggccacattcagaaaaaaatagtgattccggtttgctgttcttcttccgtagcaatgcttcagaagagggagcattttctcatcatagtaacgtgtggcaagcatagcggcatatggaggaggggaaggagagagagagagagagagagagagaggagagagagagaagatttgataagaaaagacggtacctaaaaagagttggtaccagtaatgctggaagatagcgttcttaaatgacttggcttgttgtttgttgagcgttcttgcacatatctttgctctgggcatatcctctattcattggtttgtacaaaagaagttttagcaacagaaaagcaagaaagcaagaacacaagagagaaacaaattcgtggtaattgtttcagaagctaatacatgaatagccacatggtgctccaagttttgctcggagaacatcggcaaaaatatcatcttgtaacatcaccacattgtcgttctccttaacggggaggccaacaaaaagagagcaagaaagagaaagaagaaaagagtaacaagacaacaaaagaagagaaacacggcaacaacaaaagaaatagagaggaggttacctctaaaccgaatggtaattctgctttcaataagttcatagccgaggagagcctcgccaaggccctcagttttagactcgactatcttatcgggtggacagaagggaaggctgtagtagctataggtctcttggggttccggaaagggcccaccttgttcacgtacagcgtcaccttttcttgtttgtcatactgttgaaggaagaaaataagaaacggtgggcaagagatgaaagacataaaaactcagttggggttggggctcgctcagattggagtggaggtaaggagttgtttttgttcctccgaagacacaaataaaataaacaataaaatacaaaacaaaaacaaaaacgcacgctgtgcctcatgagcccatttggcaggagagaacgggaagtaggcgatcccaatgaacgaaaagagaactacggcgaccaccaccgtccaaatgagcttttgtttctttcatcctcccgctgctgctcctcctcctctgtgcactttaagaaagaaaggacaaaaaaaaagcggtgacaaaaaggaacaaccaccaaaggcaggaaggagaagccgaaggtcttctcttttttgttgtttgttgttttgtgtccttttttcttggttttcttttgcctttttttggcgtagagcacgcgaggggtcttggcccatccttttttcggccgtaatttgaggggtagtctgatcagtgtttttgtcgacaagccacctctctcttctcctttcattcttcctctctcttctcctttaatactatctcttatcctcttctctccctatctctctggccaagagcaaggtaacacaggtttacggtcatgatgtacacatttaggatggcgcaacaaggcagagggtgtggttagcgcctccggcgacggcaataacgcgcacgccttgtttttggaggtcgttcaccggcccgcgttgcagcgagtctgcggaggagccaattgtgcggcctagctttccaaaactagcgtcaccccatgtgtacaatgcccccttttctagcgttgaaaacacaaagcgcagcgttaggatgaccaagggactactccttcccctaaaataagaaagataagaaccgctgatggccattttatgagtctctccgcacgcgatagccactattttcttcgtatgaggctccttggcaaaagtgtgcaagtagcctgttgaatacacaccgccatcgcctgtattaatggagaaaagttgacaaacaacaacgcacacaggaacgaagaaaaggaaattaccatcaagaagcaggctgaatatttttccagctttgcagcttacaaaccgagcatcagcagggagaggtacctcaacagggatgagaacatcttgctctttgtccgatagtcctagctggtgatactcattagagccccatgcatagaccttcccgttcgttgtgacacaaaggctgtgagaaatgtccagcagccaccgctgcaacattcctcaaatggggaactggcgttggtacatttctgttgagggtgtcccccaatcccaattggcctcgttcgttcctcccaaatgcgtagaccgttccatccgctgtttcggtttgttgtggttgtgtaggtgcgatgtgagaagatgaggagagctcattgcagtcacggtagaaaagcaagcaaacccagtaatgctatggtgtggaacgcgccgcggtcaccgccacaactgttttaccgcaaagagcctcaaccagctttgggctgcgaatacgaagtctgttcaccatgtcctaatgggccgtagtagccgcatcccctacacgcaacatgggcgtgagaaagaaggacgctatggggatggtaataacaaacgtaccaggaatagagctcgccatgttctatatcatcagggagtggagcaccagtatcatcaaatataagcacatcaaacgtgagccgagcataacaaacggaaaagagagaacaaagaacaaagaacaaaagggagaagcgaaagaaacggacagaggccaaccagagatggcggagcgaaaaagagtcgccgcaggccacctgtttgaagcgaacagtttgtcagctgagtccctaacgatgaccggagtgggcaggtgccggtcctcatcctcctgaccaagtcccaactggccaaaatggcacttaccccaactgtagagcaaaccctcctcctgctgtagcttcgcttctgctccttcttccgtctctttggtcaagttggcagggacagcggtaatagccaagacgtgaccggcaccgcaggccagctgtccaaactcgacgttcggctgtgaagcgaaccctttcacgaaagcgactgtgcgactgctcatccccttaaagatgcgcagggtcaggtgatctctactgcagccgaggagggacaaacaaggaccacaaaccttgggctaagcggccatatacccctctcccgacagcgtacaagttgacaggatacttctgttcgggtttaccagctttcgctgcggcttgttgatcaaccttgcgtcgttgtgctgtcgcgacgctagctttgcttgcagcgcacttttgagatccatccctgaggtgcgattttgttgtgtgctgcgcctctgcggacagtccaggatgacgtgaacaaaacaaaactcagggggaggggtaaaccgagagcggttcatggaaaccggcggacggctcggttggccgtcttcagggatccacaaaattaaacccatcagcagcagcccggcaacctagcaatagctcccatcatcagcagggagagtgagccacatgagagggccccctcgcaacgtggtacacgaattgtagtgtacaaacaaaaaaacaagcaagcaaggaggcgccctcccttggacacaacaaccttcatcggttcatgagggaggtgaggccttgtccccgtggggcaaaaccactgctccgagtggcgacgcaaaggctgcgagtggccccccccgaagatgacctcgagcgccagcgcggcgaggtcccaccctaacccccccccccgccattaagtaaactgcgaaaagcggaggggaggagcgaaaagctaaccgcagcccgaggggaagccgcacgcgaccgccaacgctatggaagcagactccgtagagcaagagatattgctgctttgcacatgctgtgccagccaatgggcgctggagggcaaaaatgaccaagcagcacccggccgggtgtgtcgttgaggtgctgctggccacacgccaccagtccgactcgcatacggaggcgctgcgacggaccgtcatcatcaccaactttgaggaggacatcatacaacagggaaacataccgaacgaagtcataaaggtgttcagccactacgaagaggagaggggcatgcttgccgttatagagcttgccctggaggtgttgttgtccacagactgtgctcgttcgcttcctcttcaaaaccgatgcggggagcaaccctacgtcaggatgggcgtatttctgcaaacgtgggcatcgtttttggctttgtggacaaagtaagagcagagttgcagtttaagcatataagcttatgttggcccactgttaagagcgctactccccaacttaatggccttaccaccacatcctctataccttcctcttcttgttcagcttctcctcattcgtcttcttcctctgcttcttcgtcaccttcttctgcttcacacaatgggatatacgcaattgtttagttatgcaggcggatgtggacaggacttgcttcgcaaacttcaacccaactatcaaaacacacccagcccccgttgctccattgttgccaacttctgcgagcttacaatccgtgcaagctacttcctacaaccaacaccaaggcaaaaacgataaccaacgccaaagcatgcctccccagcaacttatcgggtcggcttcaaacactacgtcagccagtgtcacatctaccgctgttgctccgccccttattacttcaggcaacagccagactgatggcgaaaggaataccctgagcaagaatgaacgcaaacggtcgaaaccagagagagattttaacaaagactcccagctatcaaccacacaacctgctccgactatagataaagggaaagacaaggtgcccaatcctaatagagaagtaagaaaacgactcgaagaacacagggaatatgttggtgatagcgacggaggcagtgatgatgatggcgactttgactcagaaggttcggacgaggtggattcagaggaggaagtcgagcagacagatagtgacacagatgaagatgaggacgttttgcaagagaacaacaagaaaaaagctgaaaaacgaaagataacagggtcactgaagaggcaaaaccgaagtattggaaagatgtctaccacctcatacctgaatctcaacacaagcatcctctatccataacgatcggtgcaagcttatggatttgcgccctctgttgtgtggagaatgtgaagaagggacacggacatggcccaatcgattacctgcctaaatcagccaggttttcaacccatgtacgcaacctctcatgtgaaagagctcaccgctctgcggagtgttacctctggcaccaaagaaagggtgctctggcgctgctccgaagggcaagaagcctacatggataacgctgactttcacaaggcccattccataagttggaaagaactaagccaggctccttccgtggacatggttctgccctcttgtaaatactttttttcgaaacggtacttcatctcgcgttattcgttctcttcttcttctctctcgcccctgccaactgatgataacacaatgcttggacaggacccaggggagaaaagatagtcccatcaaaacgcggcaaaaacccttcccttgtcgtacgatccaagatagttccacccctccgcgccctcctgcctcctccgcgccgccatcctgaggcaaacgttcgcccaaaacgtatgatggtacctcccaacattctcttttgcccaccacacccttttttcacagcaaataaaaattcaagcaaagcaaagcaaagcaaaaaaaaaagagagagagagagaagagaggagagaggagagaaggagaagagaaggagaagagagaagagagaagagaggagagaagagaagagagaagagagtagagagtggagaaaagagagagcgaggagagaagagagaagagagagagaagggatgaagaaaggagataatggctcgtaacgaagaaaagaactactcggtgctgaatcgcctcctgttgcaaaaggaaaaggaaaagcgagaggagcgaaacccgaagcgtcctcctcttgtatgcatctcattcacacacgcacggttcagccccaaccaccttttttcatgcgtgcgtgtgcagtgctcatcgattaacgcaacccaataacagcacacgctgcgaacagcgagcgaggtgaggcaatggattccttccatcaaggcggagatggaccactgcttgcaccacctctctggcgtgcgcaactactcggacagcaagatcaaagaattccaggagcggttggccctcctccagcgagagcacaagaagtgggtgcggcgggtgctggagctggaccctgctgccgcggagggtggtttcacgccaggcgaccctcacccttacctctccaaacgcaagagaagccaaccccaatcgcacaatactcaacaaaaggaggaagcagtggagcaggaacaacagcgtgagaggacggttgtgtcgtcacaaaagaaagcacgtacaagcgctgccgctctcacaacaacagctacggcaagagcgaccagcatgagcagcaacagcaccggtggaatagcaacgccgctgttggaattggaggaagagaaggaagagcggcaaaaggaagaagctcgccgccacctggaggcctgcttggcccttgacgactctcaaaaccagcccttagctttagtaaccaccaaggcaaacttgccgcaactgccacctccgcacaacaacccgcagaagcagaagaaagaggagaggaagaggaaaccggcctgtcactgctctccgcctatgatgactgatgtagataacatctagcaagtgggcggggccgtggtggcgctataataatggcattattatagcgccaccgcgttgagggcattacagggtgtcttgtatgtttgtgttgtattctctgttgtttgaaagaagaaaagaaggagagagcactactaacagccgtagtggtctcacttggaaggatgatgcctaaacttggtgtccttgctcttcgtctcaatggagacgagggtgccgctcttgggcctgtccttgccgtgcgcccagtcagcgaggagggaggccacaacgggcaagggcgtccagtcgtcaaagttggcggtgggcatggcctgccggttggtcggtgtgtcgaggcagatggggaggatgcccaacacgctgcagcccctgggaagacctccactggggtccaccaagctggcgatcaggtggtgggtggccgctttggtcatgccgtaggccagcatgccaggcgtgggggagagggcggcctcagcgccagccagcacgagcatgctctcctcgccttccttcaaaaagttggcggcaaggtgggcggccgccacggaggactgcaggttgaagctccacattttgtccacctcgtcaaagatggaggggcttttcacgttacctcccacccaacctcctgccacacatatcacggcgctgagctctatttcgttggtgggtgggtgggtggtggtgggtgggtgggtgggtggtggtggtttgcggttgcgtgttggaaaacgagatgtaatcagtctcacttctactactataaggacgcacagacgcaacagcactgaaactgaaacgaaggacaggaaaggaaagggttgccgcaccagcgttaagctttttgagttcctccacaacacgagcggtgttctctttgttggaggagtcgggggagagcacgacgttgtggtcagcttctgggttggtcctaaagtcagccacgaacacggtgcag

SEQ ID NO: 268 - DNA, 22304 bp, unidentified
  misc_feature 1..22304: note = Fanzor polypeptide
  source 1..22304: mol_type = other DNA
cccctgtagcatgtgtgttcatacatgtactatctacggagacgtttccgttactagcacgtcacatgatctcatactcgtacgagtagtacgtattgcaccgctatatagccgtagtacgtgataccaacacattagcccaccctgaatagtcgtagatgcagatcacacgacgatcggaggggatgatcgtttcatcccagaaatcgggaagggaggtcgaagatgcggctattcgaaacacaggtaaaagaggctatacaactaccccacacctcgcaatgaggctacgacgcctcacacgttaattaacgcgccataccggaagaaattcctgcgaaaagccaacggtaagcgggctacggtgaagacaaaagccaagtgaacaaaccgaagcacgaaggtatatcgaaacaaaacaaagcagaaaaaaaaacgaagttaacagccggatgctgaatgtaacaggcaaaagagaaaataatgcatgcggctatgcagagaagcaaagccttgaacttggacttgggcttgaaatatgactgcatagcgtggggccacgggtccggctggaggaaagacaacagacgccggccggtgggaaacacgaaaaagaaaaacgcgaaggctgtaagcgcaacgaaagtgagaagtgtgctgcaaagcaagaccatgggggggtcggtaactgattacgcgtgcactgacaacaacgtggggccgattacgaaagagggacgtagaaaagtaggtggcaaacccactacaagcgcatgctgagacgcagcgaggtgatacgttcgaaaacgagcgaggtcaagaggaaatgcctcgtataccgcgagatgaaaagaagaaacgaacaggccctaaagtatactgcaggggttgaagctacgcgtacggcgcagggaggagtactcgcggttgaggcaggtatgtcgttgtcacaaaggccaagaaaaaccaaacgctcggtacgatgcaacaaaaagcagggaatatgaaacccgtgttaaaacagacactcagaacaaaacaaaaagagggcgtgaagatataagcccaagtaaatatacggtagtaccacggtccggcggccttcatggagaagaagctgcgggaacggcggtgtaagttgaaaacaaaacagcccaagtaaatatacggtagtaccacggtccggcggccttcatggagaagaagctgcgggaacggcggtgtaagttgaaaacaaaacgcaaaacaaagaaaaatgattccgaaagggcaacacccccgaactatgctagtgggttaaagagattgggtcacaagaaaggaccacaaagcttcccaaggttgcaatgctacaaatcggcgaccctcgcgagagtatgcaaacggggtcgggggcgacatgattggagaaagaaagcaaaatagcacgaaaacaagtgaaaataacaaagggaccaacgcccaaacgggtagggtggatcgtaaatgatccgagtctggcgggaaggcttcttggcctgggtttttgttagtggatgagctgcggcaagttccacactacccggagagtttactcttcgggtggctatccccaccgcaccgggccccttcgggggtcaggtcgggtcaacatgctcaagttaccgaaggtcgtagacagcaagggctgatacttccgagggagcatggagtgaattgacacacgacacgaagtgcacgaagtgcacgaagtgagacgtggaagtgtggagggcgtaagctttattttgacccatccgccggaggataaaaaataaacaaaataaaaaaaaataacaaagaacgaataaaaaaaacacaattacaccaacaatattatcgaaataatgttgttgctgaggttcggcggctctcgtgggaagaggcaagcggaacagtggtaggagtacataatacacctttacgtatgaaagtacaataccatggcggttcagcggccctcgcgagaggaggcaggccgaaccgatagtggttggttgaagtagaacactaatacgcccgaaagtacaataccatggcagttcagtggccctcgcgagaggaggcaggccgaaccgatagttgtaggttgaagtagcacgcaaatacgcccgaaagtacaataccatggcagttcagcggccctcgcgagaggaggcaggccgaaccgatagtggtagactggaaaatgaaacgcgaacccgaatcccttgtactaaacggaacaaaagaaaacttatgtcagaaatcggcaacttgagggaaacagaaattaaaacaaaacgatgcccaagcataatcagataactaatcatgggggggcaggagagacattcggagcgccacgggacgcgttcgaactgcgtaataccccgcgagcgacgctcccagtcttgtagcgttgcaaacaccacgatccgtggttggcgacgctggatgttgtgtagctagccggccgaaggttgatcttgatcggcccagggtcgtcgaggaaccggatgatgtaggtgttgtccgaagaggggcccgcgggcgttcgtgaaccggggtcctgggtggtgcggtgagcgatcttgcccagccaccacaggccgtcgcgggccttgtaccacaggtgtgcgcctcggggaaggatggtggagctgaaggtgcgaagccagacgtcacggggaacgagggtgtagccgggggcaaggaaaatctggccttgtgaccgcgacagttcccgctgcgccgaaccgatgcgcatctgtcggtagaggcggttctcttgtcggtgttgtgttggggtgccggaccagtagaggaggatgtagcgtcttgagtgttgaaggtctagttcccgctcccaggaaaggctgagcagtccgacccagtgggtctcgtacaggaccgaaataatcccaccacggccgcgcactagttccggcggtggcgagacatcgtcgagggtgacgtggaaagggggggacttggtggagaaggagctgagaacatacttggtgaggtcggacggtaggtacttgggcatgtcgcaggtgtcgtccgggttccgacagggcttacagcgctcgacaaccgacaaccgatcatactaaccgtgcgcgaaactcccaagtggcaggaggtggtggcgtggcaggtgtgtaatacccaagggcgcatcaaaatcggaacgtaaatgcgcgggggtggggtggtggaagaagtggcgctggttccggggtcggggggcttaggggctcgtcggaccaagatgacggtgtcgtcgtctgtacggtggagttggctttttgcggcgagggaaagcacggctgagaggtgcgggcgcttagacgatggaaataaatccaggaagtcggtcggcgggggagcaggggggtcctaggaaagttagtggagtgtagcggagcagaggggctcagcccgttgttcacgcgcccagtccgagtgcgtgaagtgctggaagcaggaaagaaggtgggggtcgtcatcaggctcgacgacgggttccagcaggtggggcgggagccgaggagttgaacgtcgtggatgaagctctgttggggtcgatcttgaacgagcgccgtcgggctcgacgtcgggctcgacgtcgggctccggggagtgaggcgccggtggtggagaggacgaagttgaaggcggtcttgaaagggcgccgtcgggctcgacgtcgggctcgacgtcgggctccggggagtgaggcgccagtggtagagaggacgatgtcgaaggcgatcttggaagggcgccgtcgggcgcaaagtcgggctcgacgtctggctccggagagtgaggcgccagtggtgaagaggacgatgtcgaaggtgatcttggaccagcgggcgcctgcagtggggcctgcgccgactggagggaggagcggccagaggcgtggttggtggtgaaggcctcggcggtcccttatccgggggcgcagatgcgcggtggcgggcagatgtcgatcttgaaggccgtgcgctgaaaccatagtcggctgttgcacggggggttccagcggcggcggcggcgcgatggcgggtccgagaagagatcagatccggaggagctggagatgtggcgccaatggtggatgtcggggagacgatgggcggcccgaaagccaagccgggaggagcgccggcgtccacggcagaagtcgcggaaatgccgagcgcggcggcggcggtgtagtgggacgaaataggcccgacgaaggtggttggggtggagaaggggccgaaggagtccatgtacggtccaaggcggcggaaatcgccgaagtcgttgtcggtgaaggggattggtcggatgaccgggatgtggaaggagggagggggtactagcccacccaagccgatgcccggcatcgagcgcccgcaaggcgtaaagccgcagaaatgaatgaggaagatgcccacggtgtcagggctcgaaaaaaaagaacaaaacaaaaaaaacaacctactcggcagcgttttttaaacgagtagctctcgtgctttgctatgattttatccagcttcaaaagctgggtatatcaggcggacgcaagaccgcaggcagagcgagagagcgactgctttgaacatgcagtgctgctgcgcgttggcgaagctgatagctaatacaaagctaccaatgttcttaagctgctgatttgatgttgtgaggtaaaaatacaagggtgactctgatctcgcaagaaaggtacttatgatgctcacaaggtgagcagtccgttggagaggaggacaggacgatggcttcgaagaaggtgggccaggctcagcgttgactcagtcctgccgacgacgccaaatgtaagagaataggcaatccaataaggccaggacacaggaatgtcgacgcaaaccagaggcacgcttcttcttgataaagttcttctcgctgctcatctcatggacctcaattgcgcacaagaacagagtgcgatgggagggggaagtccatacctagactgtcccctgaagcatgtatcttcatacatgtactatctacggagacgtttccgttactagcacgacacatgatctcatactcgtagtacgtatccgcgtgtattctcatactgctattctctaaggagacgttcccgttactagcacgccatgtgactcataccggtacgtattgcaccgctttatagccgtagtacgtgataccatcacagtacacccattttctttggcattatgttgctgataagaatatgaacaagccacaaagtggtaccataacctttctttgatcttagcttagttccactggaggcggtggttggactccaccagcttacagttctagtggtggtggctacggcggcggcggtaggtggggtgcggcggccgcgggtacctcttcgggtactcgtgcctcggctaccggcgctactggtggcggcagtaggcggggggcggcgcccgcgggtacgtcttctcgtgcctcggctaccggcactagtggtgttgatgccgaattttcgggtactcgttcctcggctaccggtgctactgccgcgggtacctcttcgggtgctcgttcctcggctaccggctacatccatggcgacagttgggccaaggttaggtggaaggatgaacttaacgattaccggtccccgccgaagttcaaagcggacggtggagtcgaagaatccaaaggaggcttcactgaacctgatggcggcggtaggtggggtgcggcgcccgcgggtaccacttcgggtactcgttcctcggctaccggcgccactggtggcggtagcaggcctggtggctcctttgacgatgatgccaacgaatccaaagaggaaggtaaactccaagagtctaaagagggagatggtggttggacggcgggcacgtattttgatcaccgtgccccaagtgatcggcctagtggcggtggttggagtttgggcccatctggtccgcctccaccagcttacagcttacagttctagtggtggtggtggtggtggtgactacggtggtggctacggtggtggtggtggtggctacggtggtggtggtggtagctacggcggtggtggtggtggtggtggctacggcggtggtggtggtggtagctacggcggcggtggtggtggtggtggtggaggctacggcggcggcggcagctacggtggtggtggcggcgctacagcggtagtgggggacagtcgcctaataaaaaactcacagttctcacagaactctaaattctctaagttacagaaacactagcatcctttacgagcttctcgggaaatatatcgcggtgagatagggtaggtccatttcaattcgggtagccccgttactctagaccggccgtcatcgccctgaaactgtatcaactgtgcttcctatgcagagtagtttcgaaaagccaaacaaaaaactactcaggggtaggccccaaagccaaagtggcgcattcattcttagactctctccttccaagtgagagtcagacgattctcgacacaactcttcatcaagatgttgcgagctccgttctcgtccctgtccatcaccaccgggcacgaaggacaactgaagaccttggacctccccaggttgtgatggagatgtccgcagcacgaacaggtcttggatgtgaactcctccgtgacgatgacaagtttcacaccttcgcggagagccgtggtttttagcaactccttgaacttgtagtgtgaccatgtcatcatcccccgggccgtgccgttaccgatgttccgcttcgccctgttgaccatgtctttcgtgttgaactccggaaggaagatgacgtcgtagttcttgcacaggtgcttcaccgtcttgttccttacgtccgtcaccaggtctttcactctcttgatggctcggtgccaggctttgcgtaagcgatacctctttttgctcttgacggacttgtcgaaagccttggactgtaacaaatccatgtggtgacagagacggtagattctccccacgtccccgggagcgaactccgtgacgtttcccttggaatccactccggtgttgaatgtcctcaccccgggatcgagcgcgactaccttcaagtcctcgtggttctcgacgcggggaggggtaacgtcggactgcttcgtgacgcacgcgtagaagttcttggaccgatccatctggatgacgatctctcccgcgaaggaggtccagtcctcgaaacccttcagcttggattttccacaggtcttcttgaacatgtacccgttcttcacacacgctcccggaatcttgatgacctggacgtccctcctggaccgaaagctcatgtcgaaggtgtggctcggattcttctctcttttctttaggtttgtcacgaagccgttgtacagatccaccatggcggagtcccggatctcgaagggggtctccaacacccacgacgtcttgcactctctcttgaatgtcttcttgggtatcgaccagttgcctctcttgagacctcgcttcttcttcttcttccccgtccttctcttgggatccccgtgattccacccgccgacgaccttcgacctaaagtcagtcttgttgattcggcagttacccttcttgtagtagtcaaggcaccggttgtacgtccacctcgccgtccccatccacttcctcagccgctccttccactccggcgacgggtccagcttgatctttctcgccctcacgtcttttacgcttttttgtgttcctgcctcccctcctcccattgtttctcgcgacgaagaaattgcagacggccaggagatcttcagagagttcttgctcggacccctcagtttctgacttgtggtggaccacgatcttcgtgccgtggaattcacagagctgttggacgagttcaaatccgtaccgacagagcctatccctgtaggacacgacaatctcctggacattgccagcgtggacgcgtcccagaagggcctggaagttcttgcgtctgtagttgagtccggatccgatatccttgagagtcttgtggtccgggtaacttccctggaggtccttgacctgtctgacaaggtcggtggcctgcttggatgagctgactctggcgtagatatagctctcattgtgttttgattctgcggattcgagagagggtccgagccgttcatcgacgtctccgacgtggtagattcgttttcccgagcgtcctccatctccaagtctcctgatcctgatcttcccggagtctccccaggatgccaatgtggctctggagatgtcataccttttcttggtcttggaagccggctggaacatccagctcgtaataaacctattcttgcactcttgtttgtatacaatacataaatattttatttcgtggtggtcgagcgcgttgtgaccgcgtagggctgactcctgtgataaagtgagcttcacactttggtcgtgacatggtccgaaccagtactttcgggatcgttcgatttttatggttcgaatcagagttctggatgttctaaaagttttacatatttttaaaaaccacaatgttccaaaaatggtgttacgataaaatctcatcgggttcaacgttagctggtgtatttccagacgaagaacctgtgtgaatgtcaagttccgtgaaaactggaagaaagcagcaagcggtcgtgagacccatggcacgcattattgtaaacttaggcaccctgacaacttaataaatgtttatatatacaaacatcgaaaaatgacctacttgactcacaacgaaatctatgatgcctttaaaaagtgcgatgcgcaatggatacaaaggcgccgcaaaatagacacatcttctcttttctacactctcacaaagtgttgtattcaggagagaggtattggtcacgttctgaggatggatagggaacactactcgccacaggcgattcactcggccaggaagaaattaccccagggggcgttcaaagaggttaatcgatatatacacagggggccacatgaaccacgtgtgtttgccgtagatggttcgaaagtccatgtacatccttcattcaccaacgctggatacaagactcgaacgaatgataagcccgtcccgcgtcccgcgaaaaggccgctagttatgctatcttcaatggtagatgtaaaaagtaaagcatgtgtggactttgaaattacaaaacatttcaatgaaagaaaggcagccgtatcaatgctccgaagtgtgcgaagaggtgacacattggtttttgaccgaggctattattcaaaagatttactacgcagtgttgatgatgcacatgcattcggggtttggagactcaagagaaacgcattcaagggtacccggtccttcttcaactcgtgtaaaacagaagcaatatgccttattcttggagtcaaatcacgccttttgaaatactttatcaacggaaagacgtacgtttgcctcacaaacgacccctcgttaacacgtgaagaggtcaagtccgtgtacgcgtcgaggtggagggtggaggagagcttcaagcgactaaaatccaatcttaagcttgagaaagcccacgcgaggaccccggccctgtatatacaggaagtagaagcgagagttttactcgacacgatcacactgaggttacagaagaagattaaggaaccgtcctacatttacacgcttgatacgtacgtaacacacatcctccgtaatatcaaaagtgtgtcgacaaagttcgcgagactcgagatggtctctagaccagtgttgaagcaccgtcgccgaatatggcgtattcccacgcatctcgacctgtccaatcgttctcgcggatgacgcacataatcctcaccaccaatcacgtcatcgtatggcgcacgccatcccgaccaatcatgttttgccacatacctagtgttctagaactatcagccaaagcttcctccaaagttgaggcgttcaaacttcgcaaatgagctcacaactcatcatggtccaaccatctctagagggaaacccgcgcaagaagaaaaaacgcaagacggcaacacacgaggcatcgcccaagaccgtcccgggttttctccaaaccgtggtaagactttatcctacgaagtgcctccctgcgtcggggaatctaccccggtcgtacaaggggactttctgctgccggctcttctcgaaagtgaggtttggagaacaagtttcccagcttttgcgaacgaggacagtgaatgttggctttcagtcagcaacaacttacgaaaaccgcgacaccttccagacgaaagtcgatgaggcggtcgatcacttttcccgggaaagagtgctggcctcccttttcgctaacttcttgttcatggaacgcctccgagacggatcaatcatccccgagccagatgaaaagttttacaattcctgcttgtcatcatgcatcaaaagtgccggaggcggcctcaacgaggacttcgaccgtttttccgtgctgacgggactcgcacggctcgagccaccgaagaagctcaatctttcccagattcgaagatacgaggccatttctatggctacctcggcgtcaacccgtgctcaacatcataccgaaaagaggaggattgtgatcacgagatggtttctgcgggggttggtgtccagacgagatatggtgtacaagaagtacgcgacgaaactctacaaccttgccaagaagattatcgttcagtttgacggcacaatcgagaaagaacaagagcttcggaaagacgcacttgatgtggacccggacaccgacatcgcttccatcaccgagtttgcccaaaaagagagggatttttctcttcgagtttccggcgacgaaacgtgtgcaccgacgatcaagcatctgaactggatgttcaaaacctacgtggctggatctcggcgaaggtacgaagaggtcgtctcccgatcccacgcgttttcccccggtgaagacaaggcgtccaggaagcagagggacgagttcgtgaagaaggagttggggaaagaggacaattgtgctccaccaagagacactgccgtgctgcccatctgctcatccggctcggtgttcatccggatcgatacgaagacgctcaagagctggggcttttggcattccgatgatgcgtggtggtacaacaatgtcttgcaacccttctcaaaagcggccaacataaagtgcctcaagagcgaggagaacgccaagtacgcgtcgaaccaacaagggtacctgtcgagtctgttagaaagtggtccggccaagtgcccctggatggttggtgagagttttttgacggatggtgttcagatcaaaatgctcctgttaaccctgagacacacgaggaaggccttccccgggtcaagtgagctgaatgatgcggggtacaacaagttgcctcgtgccgatgctccgttagagagtctactgagagttgggagaggtgtgtacaacattaaaagcctgactgagtccactaggttgccgggagatctcgttgtgatgtccgccgacccggggcaggcgaaggtcatcaacgtttgttcggccacttgcgaagaatgggctaggagagatccgaaagttattctccgaacagcgacttgcgttttcggggatgactaccgtagggacacccgtgcttcctgttcggacgagtacgagacttccagaagaagggatcgtccgtacgggaaagccatcgatcgtctgaggaacgagaaaaagaggacatcttgtctcgacactttcatccggtactgccgaagctggttcatcaacggaccggtggtggccaaggagactctggtgcacgaaaggaagctcaaccggttctcacgcttcagggctacgcaaaagacgttggctaagatagcgaacagatacatgggaactgtaggagaggcgtgtcgggtcatgttgttcggcaaagcgtctttccgcgcacagaaaggaagggcttcggctccgaggaaagctatgatcagagagatggccagtagaggagtggtgttgatggtaggggagtacaacacctccaagaagtgcccggggtgtttggaggatacggttgaggacaaagaacggaggatccggagttgcaaaaactttaaggtcggatatccggaagagtcctgtaagctgcatcctctgacacaagagttcgagatggatcgcgatgatgtagggtcgacaaacatcgggatgcgtggtttcgggcttttacttggtcagaagtggttttagggatttctatcgtatttcactggtcgaattccgtggttcgccactaagttgacgccagtgaacctgttcaccgaagtgtttaagactctacctttgtcttttgatttaggcaaagttatcctgacagtcaccgtggacatagcgaaggagacactaagcaccgccttttcctctttgaaagagttgacgtctctcagcgggatcatggctggatgtcgtggcacggcgtcgtaaaatcgtaaaacaaaatgtattgacgcacatacaatggttttcttttgaagaacgatggtgtgtttgactgcgggaaatcaaactccctcaccttgcacgggagcagatgcagttttactctcctccttcctgccagatccaccctgtacataaatagaacgagtccgacaccaataataaagggacaacgggacagtaagttcatgggtaaaaaaaagaaaaatgcgaagtaatcaacaagagaaacacgcaaaccactcgacttaaatctttaactcaccgctttcatccctttccccagagctccaccgcccctgatctggtcgctcaggtcccggtagttctcctccgtcacgttgaacgtgaactcctgctcgcaccaaatgtcatccccacacctcttcttcttgacggtccagcccctgcccttccgcttgagacgacgtctggtgcacttgccactccaaccaaggccacggcagccccggtgcttgttcttgcgcccactcacgcctacacggcggcgactcctgttccggcaaacccggtaaactttctgcgggtggggcggggtggtgggcgtcggagcagtcgggggcgttggtgtcgccggtgccaccgctggtgccgccgcgcgtgcctgatacgccttcttcctcgccatggcacgcttgctgttcttcacctgcctcttcgtggcgaagacaggggtctcaacacccgcagcggcggcggcagtggagtcgggtgggatcgagaaaggggcctcgtcaccgccgttgacaactgttgccggggaaggaggcacttccgggaaacccggaaaatcgccgaaagagatgtcccacatgtttccgtcgtcgtcaccggaagaagacggggccgggtcgccagaaaaaggctcaccaccggaagaagacggggccgggtcgccagaagaaggctcaccaccggaagaagacggggccgggtcgccagaagcaggctccccgctggaagaagacggggccgggtcgccagaagaaggctccccaccggaagaagacggggccgggtcgccagaagcaggctccccactggaagaagacggggccgggtcgccagaagcaggctcccctccggaagaagacggggccgggtcgccagaagcaggctctccaccgaaagaagacggggccgggggagaagccgggccagacggagtggacgcgatttccgtggaagatagaatcgcttccaggtaatccagcatctcgtccacagagctcgtcgtaccgccagagaaaaagtgatcctgttgttgcgagagacaacaggaaacaaaaaaggagagaatacaaaatcaagtttagtactttacaagcattaatgccatcttgacaaacgggtgaaggtggatttacactctaattctatcacacaaacacgcaaacactccccgcttcaccttggtgacaaccgcctagatgtccacaggatgcgtccattctccctcaggggagtgctgaagccgtaggcgtccctcagcatgtaggtgtcgccctccaccatctgctggattatccgcacctcggttccgcactgctccgcaacaagccaaatgccgcggacatcgagaggtttgccatcgacgatctcctgtgcccatgtgtccaagtcggggagattggtcttctcaccgtcgaccgggtgatccgtgaaagatgtgtcgcgtgggagggaacgcacgtagtcgaccatccgtttgcggccctgtcggagcagcttcatcactcgtccccgactattcttgccgtacaacgcttgctgggcctgcgctgggtgaaagccgccgttgtccaccaagcacagcgtgaacaccgaaaggtcgccgcagtacccgctgccgaagttcttcagccaccacaggcccagctcgcgaagagcggtcgtgttctttttgtgcaaaatagcaggagccatgttcgtttacctggcatccatcgtattggtggggggtgggtggaagcagggtgggacatcggtaaatgcaggtgatgtgaaaagaagtgcacaagggtgagccaaggaggtggttgtttggttgtttggttgtttggttgtttgattgtttgattgtttgattgtttggttgtttggttgtttggttgtttggttgtttgtttgtttggttgttctgagaaatgagtgtcacccaatgcgtatctatgtgttggagaaagacagagaaacgaccactgtgtatttatgtgttaaataaatacagagaaacgactactatttatttatgtattagataaagacagatcacccaacttctgcgatttatgtggtagataacgacgggacagtccacgctcagttaaagtaactggtctgctgtgtctgctgttccactgttgtgttttacttcttcgctgtttggttgtttggttgtttggttgctgtagataaagacagaccacccaactactgcggtttatgtgatagataaagacaaatcactcgaaattgtgtattcatgtggtagataaaggcggggcactccacgctaagttaaagtagctggtctgctggtctgctggtctgctgttccgctgttgtgttttttacttcttcgctgtttggttgtttggttgtttggttgctgtagataaagacagagcacccaactaccgtggtttatgtgataggtaaagacaaatcactcgaaattgtgtattcatgtggtagataaaggcggggcactccacactaagttaaagtagctggtctgctgttctgcggttccactgttgtgttttaattcttcgctgtttggttgtttggttgtttggctgtttggttgtctggttgtttggttgatgtagataaacacagagcacccaactgccgtgatttatgtgttaggtaaagacagaggacctgaaaacccggatttatgtggtagatacatgcgggttgctctacactaagttcaagtagtaaggtgtgtgtttgagttatgctttagataaacccaacaaccaaacatccaaagtttgaaatggacgtatacctggcaaggccggcaaatataaatagcggcctcgaaggtatcattgcgatccgtagtttatattaggaaccacagcacacacacccgtggcatcaatcactcacgcgacaggcatgcgacgattgaccttcgatctcgacataatagactcagcccgcgactaacccacttcgtaccggtcaaggccggcgaatgtatatagcggcctcgaaggtatatcatggcgatccgtagtctagggggtatgggatactgattgatggtgtagcacgccgttaagctctatcatagagctgatacacgagtccccaatcgtcgtaaaaactgctgctgtatttcttttctggtactcgaatgcgtcgtatgtacgacgagacgacgagtaccgtagtagttacatttcgacgaatcaattgataacggttcaacaatgtagaggttgtcccgcttttttatttattgtagatttcaaaatggcccacacgacacgatactcacgagtagcatcgacgggatacaccatcatcaggtatcaacacaacacgtcaagacacctgtacaccatacgtagcacccacgagatatacgtcgcctgtccagcactacttgcccgtggttatcaaccacaggggtccgcatgaaagttaggcctctttttttcctggaattttattttagatatttttttttttcggtggcaaccaaaaaataccgaagagctcataataaagaatcatatatccaccatctctacaagataagcatagctgctggtataggcctgacgtgcttgcgatgaccgcactgacttggaggtgctctcgagaccactcctggctccgccgccctttagtggcgggagaaaaatacttcgatctggccgtgaggcttgtcgtttcgagctgcaaaaaatctgcaaaccgtctgtcccatctgcgttctgcgggatttttttcagcaccgccgtcggacgtcgcgcgcagctaaaagttggttcttgcccaccccaagacccaagggcaactttgtccgtgtttgcttttttgtttcgaggcgttcatcgaggaaggtgtgtcgtgatacgtactcgttcttatcagattcgcgtggaattgcggcatacctacctgggggtattggttggttaaaacgctggtcttaagtcattgttgcttggtgataaaatagtacacttcgaagcttgtcatgcacccgggtttccaccctgtcaggtatcactttccttgtgtggaaaatcgctcgaagattcttgagtataccagcagctcgtggcaaagggagatcacgtttccccgatgataagttggcataaagatagtatagctgtcgctaggaactcgctcagcaggatattagaaactgtcgtcaacttgtgtgcattggtggggagaagtacaggaaaaaacgtcgacgacgtgccccgagaacccccgctgccctgatcttgattgagtttctgattggtttggtggggttaaggttaggttgcggttttttattgatggttttctggcattaaaaattctgcctgtttactgattaaaatagtggatactgctgtgcagatatactgtttttggtcgaaccgtgatcgggagctgtattgttgattgtcagggagatattcaatgataataacggctggtctggtagttcggagaatacattgtacggtattgagatttgtattgaggatctgtcaggtttcgagattcttgcaacgtgcagtgattctgaagttagtactgctggataaacttgtatcgacctattggcaccgagctaatggccgtctgattatcgaggccatatgccctacagtagtttcggcagctgagtgtcttggaagtttgttgaagtttgagccagtatggtttagattttggtatctgaagttagtactactggataaacttgtatcgacctattgacaccgagctgatggccgtctgattatcgaggccttatgccctagtttcggcagctgagtgtcttggaagattgttgaagtttgagccagtatggttgagattttggtatttgagtttgaattaatttgcttgaatttctggtattcagtactttgaatttgcttgaggttttgggacattgttgtccactttcggtacgtgaatttggaatttgtgatattgattcgggaggatgatttgtggttttcgggacagctatgaggtgtgaccatgctatgatattgtgatgctttattgccacactgttcgtcatgcagggaggatattagttgaagggactgtacacctgttcggtatgcatactgcggatgtgtggtgtcgcacagtatcgattgcaaagcagggaggatatcgattgtgcttggtactcgatacagcaggtatgatgacggtttcatatattagggagttcatatacttgatgaggctttctccatctgtgaggtctcgtgcttgctggtgtcttgacttgacccgacttgcttgacttcgtctcgacgaggtccacctgcgaggtacgataatatatacgtggtttatgtctacatgaggagcgctccagctccctgaccctgcccgcctgtgctaggccccgtcatgcccccgaggccgtatcaatacaggcctataccagcaggtatgcttatcttgtagagctgctggagatatgattatttattatgagctcttctgtattttttggttgccaccgaaaaaaaaagatctaaaaccaacgcgcaaacgggtagggtggatcgtaaatgatccgagtctggcgggaaggtttcttggcctgggtttttgttagtggatgagcttcggcaagttccacactacccggagagtttactcttcgggtggctatccccaccgcaccgggccccttcgggggtcaggtcgggtcaacatgctcaagtctccggagtcgtaagcagcaagggctgatacttccgagggggcatggagtgaattgacacacgacacgaagtgagacgtggaagtgtggagggcgtaagctttatttttacccatccgccggaggatttaaaaaaaaaaaaaaaaaaaatctaaaaaaaaattccaggaagaaaaaagaggcctaaccttcatgcgcacccctgtgcgtacttgttcccgccgtatacttgacaatacttgacgatacacatacatataatatgtacgagtacccgtatgataagtactgctgtggggagttttcggagatcatgtcgtagatcttcgttgatctcgacgtcaatgcctcgtgcgaacgctacggcgtaaaccggcggattcacgacgccgcaacacgtatcatcgatcgatttgtgaggactatacagttgtgactcacatacgataccacccacgagagatacaaggtaccaggactcgtactgccaggtataaccctcaaccaactatcttcattccgactaatctgggatcgtggttacctcgtgttgcttctcgtgacggttgctgatcgtacgagcatgatctgttgttggacgcatgcatatttggtatgtgaaccggtatggtccgccttttttcgctgcatcggcggacacggctacgtacgagtacttaacgtatatatgtgttgtctagtaccggtatgtgcgacccggtatgttcgacacgattagacggcctggcgagcgcgcacactgggtgcagcagtgcaacaaaacaaccactttttctgtctttcgattaaaaaacaacaactcctatatcatcttcatattctacatgcatcaatctggccctaccgcagtgggagcgggagggcctttttttccctagtatatcatatgggcatcaagacccaactctatacttataatcccatggttaggtgggcatcagagcaaactgtatgtaagtaatagacacatacaaggttccccttcggggtgtggtcccgggggtgtcgcaagttgaaaaggggtaaaacatcgtcaggtgttcctgtttatatatatgacggggtaggttcaacgtcgtgtggcgtgtggtagattcggacgtggaaatctcctgctgcttgctgtagtcacgattttgcatgtcctggtggtgagcactgcacacaaaaacactaaaaaagcgccgtggccgtcacaaaggccagagtgtgacgcgcgggtgttgtgggactactgttgctgctgctgctgctgctgctgctgccgttgtacgacgtggctggcgcttctttatacttccgagtagatgtagtatcgtccggcccccgcagttcggtcatgagactacgggtatgtatgatatgtgttcattcctattccccaggacgacaggaatcatggcataaacatgcacacacgcagacgcaccgtccgtggccgccacaaaggaagagcttaatgtgcggatactattgtaccgtggctaccacaaagtagtagagggcttgaggactacaaccactgtgatacagtataccgtaataatgcgagtagacgccacccaccccgcaccgacttttcgagctcgatgtctccacagcaagcagctagaagaatatcagcaccgacaagggtggcgttggacagatctctcttaaaccgagggctgtccgaaaacatgtcatttggtattggcacctttgtttaggagcgttattgagctcgaaaaaatgatctggcggggggttgtttactcgcattattacgatagcagcgtatgatacatgtgatacagcagcagcaacttcacctctcggcacctccaacacgattacaagtattaataacgtacactcgattaacaaccatgcgtatataggaaagagaacaaaaccatagtattaataattgtacgtatgtcgcacccatcaaatcgggcgtggtgctaatcatggcatacagaaaactctggattgaccaaccgcacaagaacacccgccggagataaaaccggacgcttacagcgtcattggatcccacgatgactctacgccttcctccttttgaacctttccgcaaggtcgctagcctttgatccagttacagcgcgactttctgcggcaccttgaacaggcttcgattgagctcgacgaaggcgctcttgaagctcagaggtcttgtagccgttgttctgcttcaggggctgcggcctgcaagcacgagtggaaaattggtccaagattaaaaaagaaatgccaatgggtgcgatggtacaggtgattttgagcccgtatgtacagtagtcgtaaccaaactaaaagggcatattccacgtccacaaacaccggaatgcgccaaaacgcgaaaaaatacctgtccggtttgaagtcagcctgggaagatggggcgtgttccactccggagcctgagggtccagctgcccccatagccggttctcgtgtgcccaagccccccatccttctcctgatttcttgcaacctgtttggtcgaggctgggcggcatcttcgtccacgcgggtgacgtctatgaacactggccttacaatattttcgtctgcctcaaacgcaagagacttgcgcgttccttccatgtcctgccccctccgcgcagaccagccgccgtgcacgtctgccatacgtccacgcaggggggtgcttcgaactccgccgtctgcagcatgcggtgctttgcatccctcgaggataaactggcgaaaccgtggcttcaggcgaccaacctgtttcgcacaaaattggaatgttgttgcatgagctgtcatcgtcgcttcttagtgaaagtaatggtgtagtacgacgctaaacaagcagtatggacaaaacttgcacaaaaaaatcctgtgtgtacaccttcattacacgagttgctccaattctacacctacccggctttctagtctcaccacatgcagatcgcagacgcgtcgagtaaaaaggacagtacccacctggtcttcaagcgtggcctgcgcttctggccacctctctaggtagctctttagctcgttgagggcagtagagccatcttcaccaccaccgtgcacgctttgggattcagccgaaaccaacccgatcaaacgggcaatttccgcaacgtggtccgacttaaggtgcagaactggtgaagaatggcgacgacccgagtctccctgacgcaccgagcataaacagtgaaataagcaattggaaataagaaccgtcacaatgaacactgtttagctgtctaatagctcaaccacgggggtcgcagctcaaagcacgcactacatggtacagtaataagtcagatgcctcttccactgctagccttcttctgggacgatctagttgcgagtaaattacatttcgcctttggcacctgctaagcgtgaaaaaaggacaagcgctggggctgcaatgctctttccaacagaaggtatgaaaagtgttcacttcgtgcagaccaagaggttgcgtttcgtcttaacggcggaccagacaggcttgctggtcggtttgcgctcgacgaaatgccgttcattgaaggggaggcgcagttcgtgaggaaaactaacacactgattcacatgggcacggaataagtattggtctagcagacagcaaatgcgtacgtcaatcggacaatcggacaaacgcaaccttgtatgtaccagtaatatatatacgaataaactgctcacatcgttttccttcgacataaccaggagccggttcattgc

SEQ ID NO: 269 - DNA, 22304 bp, Saccharina sp.
  source 1..22304: mol_type = other DNA
agaacagagtgcgatgggagggggcagtccatacctagactgtcccctgtagcatgtgtgttcatacatgtactatctacggagacgtttccgttactagcacgtcacatgatctcatactcgtacgagtagtacgtattgcaccgctatatagccgtagtacgtgataccaacacattagcccaccctgaatagtcgtagatgcagatcacacgacgatcggaggggatgatcgtttcatcccagaaatcgggaagggaggtcgaagatgcggctattcgaaacacaggtaaaagaggctatacaactaccccacacctcgcaatgaggctacgacgcctcacacgttaattaacgcgccataccggaagaaattcctgcgaaaagccaacggtaagcgggctacggtgaagacaaaagccaagtgaacaaaccgaagcacgaaggtatatcgaaacaaaacaaagcagaaaaaaaaacgaagttaacagccggatgctgaatgtaacaggcaaaagagaaaataatgcatgcggctatgcagagaagcaaagccttgaacttggacttgggcttgaaatatgactgcatagcgtggggccacgggtccggctggaggaaagacaacagacgccggccggtgggaaacacgaaaaagaaaaacgcgaaggctgtaagcgcaacgaaagtgagaagtgtgctgcaaagcaagaccatgggggggtcggtaactgattacgcgtgcactgacaacaacgtggggccgattacgaaagagggacgtagaaacgtaggtggcaaacccactacaagcgcatgctgagacgcagcgaggtgatacgttcgaaaacgagcgaggtcaagaggaaatgcctcgtataccgcgagatgaaaagaagaaacgaacaggccctaaagtatactgcaggggttgaagctacgcgtacggcgcagggaggagtactcgcggttgaggcaggtatgtcgttgtcacaaaggccaagaaaagccaaacgctcggtacgatgcaacaaaaagcagggaatatgaaacccgtgttaaaacagacactcagaacaaaacaaaaagagggcgtgaagatataagcccaagtaaatatacggtagtaccacggtccggcggccttcatggagaagaagctgcgggaacggcggtgtaagttgaaaacaaaacagcccaagtaaatatacggtagtaccacggtccggcggccttcatggagaagaagctgcgggaacggcggtgtaagttgaaaacaaaacgcaaaacaaagaaaaatgattccgaaagggcaacacccccgaactatgctagtgggttaaagagattgggtcacaagaaaggaccacaaagcttcccaaggttgcaatgctacaaatcggcgaccctcgcgagagtatgcaaacggggtcgggggcgacatgattggagaaagaaagcaaaatagcacgaaaacaagtgaaaataacaaagggaccaacgcgcaaacgggtagggtggatagtaaatgatccgagtctggcgggaaggcttcttggcctgggtttttgttagtggatgagctgcggcaagttccacactacccggagaatttactcttcgggtggctatccccaccgcaccgggccccttcaggggtcaggtcgggtcaacatgctcaagttaccgaaggtcgtagacagcaagggctgatacttccgagggagcatggagtgaattgacacacgacacgaagtgcacgaagtgagacgtggaagtgtggagggcgtaagctttattttgacccatccgccggaggataaaaaataaacaaaataaaaaaaaataacaaagaacgaataaaaaaaacacaattacaccaacaatattatcgaaataatgttgttgctgaggttcggcggctctcgtgggaagaggcaagcggaacagtggtaggagtacataatacacctttacgtatgaaagtacaataccatggcggttcagcggccctcgcgagaggaggcaggccgaaccgatagtggttggttgaagtagaacactaatacgcccgaaagtacaataccatggcagttcagtggccctcgcgagaggaggcaggccgaaccgatagtggtaggttgaagtagcacgcaaatacgcccgaaagtacaataccatggcagttcagcggccctcgcgagaggaggcaggccgaaccgatagtggtagactggaaaatgaaacgcgaacccgaatcccttgtactaaacgcaacaaaagaaaacttatgtcagaagtcggcaacttgaggcaaacagaaaataaaacaaaacgatgcccaagcataatcagataactaatcatgggggggcaggagagacattcggagcgccacgggacgcgttcgaactgcgtagtaccccgcgagcgacgctcccagtcttgtagcgttgctaacaccacgatccgtggttggcgacgctggatgttgtgtagctagccggccgaaggttgatcttgatcggcccagggtcgtcgaggaaccggatgatgtaggtgttgtccgaagaggggcccgcgggcgttcgtgaaccggggtcctgggtggtgcggtgagcgatcttgcccagccaccacaggccgtcgcgggccttgtaccacaggtgtgcgcctcggggaaggatggtggagctgaaggtgcgaagccagacgtcacggggaacgagggtgtagccgggggcaaggaaaatctggccttgtgaccgcgacagttcccgctgcgccgaaccgatgcgcatctgtcggtagaggcggttctcttgtcggtgttgtgttggggtgccggaccagtagaggaggatgtagcgtcttgagtgttgaaggtctagttcccgctcccaggaaaggctgagcagtccgacccagtgggtctcgtacaggaccgaaataatcccaccacggccgcgcactagttccggcggtggcgagacatcgtcgagggtgacgtggaaagggggggacttggtggagaaggagctgagaacatacttggtgaggtcggacggtaggtacttgggcatgtcgcaggtgtcgtccgggttccgacagggcttacagcgctcgacaaccgacaaccgatcatactaaccgtgcgcgaaactcccaagtggcaggaggtggtggcgtggcaggtgtgtaatacccaagggcgcatcaaattcggaacgtaaatgcgcgggggtggggtggtggaagaagtggcgctggttccggggtcggggggcttaggggctcgtcggaccaagatgacggtgtcgtcgtctgtacggtggagttggctttttgcggcgagggaaagcacggctgagaggtgcgggcgcttagacgatggaaataaatccaggaagtcggtcggcgggggagcaggggggtcctaggaaagttagtggagtgtagcggagcagaggggctcagcccgttgttcacgcgcccagtccgagtgcgtgaagtgctggaagcaggaaagaaggtgggggtcgtcatcaggctcgacgacgggttccagcaggtggggcgggagccgaggagttgaacgtcgtggatgaagctctgttggggtcgatcttgaacgagcgccgtcgggctcgacgtcgggctcgacgtcgggctccggggagtgaggcgccggtggtggagaggacgaagttgaaggcggtcttgaaagggcgccgtcgggctcgacgtcgggttcgacgtcgggctccggggagtgaggcgccagtggtagagaggacgatgtcgaaggcgatcttggaagggcgccgtcgggcgcaaagtcgggctcgacgtctggctccggagagtgaggcgccagtggtgaagaggacgatgtcgaaggtgatcttggaccagcgggcgcctgcagtggggcctgcgccgactggagggaggagcggccagaggcgtggttggtggtgaaggcctcggcggtcccttatccgggggcgcagatgcgcggtggcgggcagatgtcgatcttgaaggccgtgcgctgaaaccatagtcggctgttgcacggggggttccagcggcggcggcggcgcgatggcgggtccgagaagagatcagatccggaggagctggagatgtggcgccaatggtgggtgtcggggagacgatgggcggcccgaaagccaagccgggaggagcgccggcgtccacggcggaagtcgtggaattgccgagcgcggcggtggcggtgtcgtgggccgaaataggcccgacgaaggtggttggggtggagaaggggccgaaggagtccatgtacggtccaaggcggcggaaatcgccgaagtcgtcgtcggtgaaggggattggtcggatgaccgggatgtggaaggagggagggggtactagcccacccaagccgatgcccggcatcgagcgcccgcaaggcgtaaagccgcagaaatgaatgaggaagatgcccacggtgtcagggctcgaaaaaaaagaacaaaacaaaaaaaacaacctactcggcagcgttttttaaacgagtagctctcgtgctttgctatgattttatccagcttcaaaagctgggtatatcaggcggacgcaagaccgcaggcagagcgagagagcgactgctttgaacatgcagtgctgctgcgcgttggcgaagctgatagctaatacaaagctaccaatgttcttaagctgctgatttgatgttgtgaggtaaaaatacaagggtgactctgatctcgcaagaaaggtacttatgatgctcacaaggtgagcagtccgttggagaggaggacaggacgatggcttcgaagaaggtgcgccaggctcagcgttgactcagtcctgccgacgacgccaaatgtaagagaataggcaatccaataaggccaggacacaggaatgtcgacgcaaaccagaggcacgcttcttcttgataaagttcttctcgctgctcatctcatggacctcaattgcgcacaagaacagagtgcgatgggagggggaagtccatacctagactgtcccctgaagcatgtatcttcatacatgtactatctacggagacgtttccgttactagcacgacacatgatctcatactgctattctctaaggagacgttcccgttactagcacgccacgtgactcataccggtacgtattgcaccgctttatagccgtagtacgtgataccatcacagtacacccattttctttggcattatgttgctgataagattatgaacaagccacaaagtggtaccataacctttctttgatcttagcttagttccactggaggcggtggttggactccaccagcttacagttctagtggtggtggctacggcggcggcggtaggtggggtgcggcggccgcgggtacctcttcgggtactcgtgcctcggctaccggcgctactggtggcggcagtaggcggggggcggcgcccgcgggtacgtcttctcgtgcctcggctaccggcactagtggtgttgatgccgaattttcgggtactcgttcctcggctaccggtgctactgccgcgggtacctcttcgggtgctcgttcctcggctaccggctacatccatggcgacagttgggccaaggttaggtggaaggatgaacttaacgattaccggtccccgccgaagttcaaagcggacggtggagtcgaagaatccaaaggaggcttcactgaacctgatggcggcggtaggtggggtgcggcgcccgcgggtaccacttcgggtactcgttcctcggctaccggcgccactggtggcggtagcaggcctggtggctcctttgacgatgatgccaacgaatccaaagaggaaggtaaactccaagagtctaaagagggagatggtggttggacggcgggcacgtattttgatcaccgtgccccaagtgatcggcctagtggcggtggttggagtttgggcccatctggtccgcctccaccagcttacagcttacagttctagtggtggtggtggtggtggtgactacggtggtggctacggtggtggtggtggtggctacggtggtggtggtggtagctacggcggtggtggtggtggtggtggctacggcggtggtggtggtggtagctacggcggcggtggtggtggtggtggtggaggctacggcggcggcggcagctacggtggtggtggcggcgctacagcggtagtgggggacagtcgcctaataaaaaactcacagttctcacagaactctaaattctctaagttacagaaacactagcatcctttacgagcttctcgggaaatatatcgcggtgagatagggtaggtccatttcaattcgggtagccccgttactctagaccggccgtcatcgccctgaaactgtatcaactgtgcttcctatgcagagtagtttcgaaaagccaaacaaaaaactactcaggggtaggccccaaagccaaagtggcgcattcattcttagactctctccttccaagtgagagtcagacgattctcgacacaactcttcatcaagatgttgcgagctccgttctcgtccctgtccatcaccaccgggcacgaaggacaactgaagaccttggacctccccaggttgtgatggagatgtccgcagcacgaacaggtcttggatgtgaactcctccgtgacgatgacaagtttcacaccttcgcggagagccgtggtttttagcaactccttgaacttgtagtgtgaccatgtcatcatcccccgggccgtgccgttaccgatgttccgcttcgccctgttgaccatgtctttcgtgttgaactccggaaggaagatgacgtcgtagttcttgcacaggtgcttcaccgtcttgttccttacgtccgtcaccaggtctttcactctcttgatggctcggtgccaggctttgcgtaagcgatacctctttttgctcttgacggacttgtcgaaagccttggactgtaacaaatccatgtggtgacagagacggtagattctccccacgtccccgggagcgaactccgtgacgtttcccttggaatccactccggtgttgaatgtcctcaccccgggatcgagcgcgactaccttcaagtcctcgtggttctcgacgcggggaggggtaacgccggactgcttcgtgacgcacgcgtagaagttcttggaccgatccatctggatgacgatctctcccgcgaaggaggtccagtcctcgaaacccttcagcttggattttccacaggtcttcttgaacatgtacccgttcttcacacacgctcccggaatcttgatgacctggacgtccctcctggaccgaaagctcatgtcgaaggtgtggctcggattcttctctcttttctttaggtttgtcacgaagccgttgtacagatccaccatggcggagtcccggatctcgaagggggtctccaacacccacgacgtcttgcactctctcttgaatgtcttcttgggtatcgaccagttgcctctcttgagacctcgcttcttctttttcttccccgtccttctcttgggatccccgtgattccacccgccgacgaccttcgacctaaagtcagtcttgttgattcggcagttacccttcttgtagtagtcaaggcaccggttgtacgtccacctcgccgtccccatccacttcctcagccgctccttccactccggcgacgggtccagcttgatctttctcgccctcacgtcttttacgcttttttgtgttcctgcctcccctcctcccattgtttctcgcgacgaagaaattgcagacggccaggagatcttcagagagttcttgctcggacccctcagtttctgacttgtggtggaccacgatcttcgtgccgtggaattcacagagctgttggacgagttcaaatccgtaccgacagagcctatccctgtaggacacgacaatctactggacattgccagcgtggacgcgtcccagaagggcctggaagttcttgcgtctgtagttgagtccggatccgatatccttgagagtcttgtggtccgggtaacttccctggaggtccttgacctgtctgacaaggtcggtggcctgcttggatgagctgactctggcgtagatatagctctcattgtgttttgattctgcggattcgagagagggtccgagccgttcatcgacgtctccgacgtggtagattcgttttcccgagcgtcctccatctccaagtctcctgatcctgatcttcccggagtctccccaggatgccaatgtggctctggagatgtcataccttttcttggtcttggaagccggctggaacatccagctcgtaataaacctattcttgcactcttgtttgtatacaatacataaatattttatttcgtggtggtcgagcgcgttgtgaccgcgtagggctgactcctgtgataaagtgagcttcacactttggtcgtgacatggtccgaaccagtactttcgggatcgttcgatttttatggttcgaatcagagttctggatgttctaaaagctttacatatttttaaaaaccacaatgttccaaaaatggtgttacgataaaatctcatcgggttcaacgttagctggtgtatttccagacgaagaacctgtgtgaatgtcaagttccgtgaaaactggaagaaagcagcaagcggtcgtgagacccatggcacgcattattgtaaacttaggcaccctgacaacttaataaatgtttatatatacaaacatcgagaaatgacctacttgactcacaacgaaatctatgatgcctttaaaaagtgcgatgcgcaatggatacaaaggcgccgcaaaatagacacatcttctcttttctacactctcacaaagtgttgtattcaggagagaggtattggtcacgttctgaggatggatagggaacactactcgccacaggcgattcactcggccaggaagaaattaccccagggggcgttcaaagaggttaatcgatatatacacagggggccacatgaaccacgtgtgtttgccgtagatggttcgaaagtccatgtacatccttcattcaccaacgctggatacaagactcgaacgaatgataagcccgtcccgcgtcccgcgaaaaggccgctagttatgctatcttcaatggtagatgtaaaaagtaaagcatgtgtggactttgaaattacaaaacatttcaatgaaagaaaggcagccgtatcaatgctccgaagtgtgcgaagcggtgacacattggtttttgaccgaggctattattcaaaagatttactacgcagtgttgatgatgcacatgcattcggggtttggagactcaagagaaacgcattcaagggtacccggtccttcttcaactcgtgtaaaacagaagcaatgtgccttattcttggagtcaaatcacgccttttgaaatacttcatcaacggaaagacgtacgtttgcctcactaacgacccctcgttaacacgtgaagaggtcaagtccgtgtacgcgtcgaggtggagggtggaggagagcttcaagcgactaaaatccaatcttaagcttgagaaagcccacgcgaggaccccggccctgtatatacaggaagtagaagcgagagttttactcgacacgatcacactgaggttacagaagaagattaaggaaccgtcctacatttacacgcttgatacgtacgtaacacacatcctccgtaatgtcaaaagtgtgtcgacaaagttcgcgagactcgagatggtctctagaccagtgttgaagcaccgtcgccgaatatggcgtattcccacgcatctcgacctgtccaatcgttctcgcggatgacgcacataatcctcaccaccaatcacgtcatcgtatggcgcacgccatcccgaccaatcatgttttgccacatacctagtgttctagaactatcagccaaagcttcctccaaagttgaggcgttcaaacttcgcaaatgagctcacaactcatcatggtccaaccatctctagagggaaacccgcgcaagaagaaaaaacgcaagacggcaacacacgaggcatcgcccaagaccgtcccgggttttctccaaaccgtggtaagactttatcctacgaagtgcctccctgcgtcggggaatctaccccggtcgtacaaggggactttctgctgccggctcttctcgaaagtgaggtttggagaacaagtttcccagcttttgcgaacgaggacagtgaatgttggctttcagtcagcaacaacttacgaaaaccgcgacaccttccagacgaaagtcgatgaggcggtcgatcacttttcccgggaaagagtgctggcctcccttttcgctaacttcttgttcatggaacgcctccgagacggatcaatcatccccgagccagatgaaaagttttacaattcctgcttgtcatcatgcatcaaaagtgccggaggcggcctcaacgaggacttcgaccgtttttccgtgctgacgggactcgcacggctcgagccaccgaagaagctcaatctttcccagattcgaagatacgaggccatttctatggctacctcggcgtcaacccgtgctcaacatcataccgaaaagaggaggattgtgatcacgagatggtttctgcgggggttggtgtccagacgagatatggtgtacaagaagtacgcgacgaaactctacaaccttgccaagaagattatcgttcagtttgacggcacaatcgagaaagaacaagagcttcggaaagacgcacttgatgtggacccggacaccgacatcgcttccatcaccgagtttgcccgaaaagagagggatttttctcttcgagtttccggcgacgaaacgtgtgcaccgacgatcaagcatctgaactggatgttcaaaacctacgtggctggatctcggcgaaggtacgaagaggtcgtctcccgatcccacgcgttttcccccggtgaagacaaggcgtccaggaagcggagggacgagttcgtgaagaaggagttgggggaagaggacaattgtgctccaccaagagacactgccgtgctgcccatctgctcatccggctcggtgttcatccggatcgatacgaagacgctcaagagctggggcttttggcattccgatgatgcgtggtggtacaacaatgtcttgcagcccttctcaaaagcggccaacataaagtgcctcaagagcgaggagaacgccaagtacgcgtcgaaccaacaagggtacctgtcgagtctgttagaaagtggtccggccaagtgcccctggatggttggtgagagttttttgacggatggtgttcagatcaaaatgctcctgttaaccctgagacacacgaggaaggccttccccgggtcaagtgagctgaatgatgcggggtacaacaagttgcctcgtgccgatgctccgttagagagtctactgagagttgggagaggtgtgtacaacattaaaagcctgactgagtccactaggttgccgggagatctcgttgtgatgtccgccgacccggggcaggcgaaggtcatcaacgtttgttcggccacttgcgaagaatgggctaggagagatccgaaagttattctccgaacagcgacttgcgttttcggggatgactaccgtagggacacccgtgcttcctgttcggacgagtacgagacttccagaagaagggatcgtccgtacgggaaagccatcgatcgtctgaggaacgagaaaaagaggacatcttgtctcgacactttcatccggtactgccgaagctggttcatcaacggaccggtggtggccaaggagactctggtgcacgaaaggaagctcaaccggttctcacgcttcagggctacgcaaaagacgttggctaagatagcgaacagatacatgggaactgtaggagaggcgtgtcgggtcatgttgttcggcaaagcgtctttccgcgcacagaaaggaagggcttcggctccgaggaaagctatgatcagagagatggccagtagaggagtggtgttgatggtaggggagtacaacacctccaagaagtgcccggggtgtttggaggatacggttgaggacaaagaacggaggatccggagttgcaaaaactttaaggtcggatatccggaagagtcctgtaagctgcatcctctgacacaagagttcgagatggatcgcgatgatgtagggtcgacaaacatcgggatgcgtggtttcgggcttttacttggtcagaagtggttttagggatttctatcgtatttcactggtcgaattccgtggttcgccactaagttgacgccagtgaacctgttcaccgaagtgtttaagactctacctttgtcttttgatttaggcaaagttatcctgacagtcaccgtggacatagcgaaggagacactaagcaccgccttttcctctttgaaagagttgacgtctctcagcgggatcatggctggatgtcgtggcacggcgtcgtaaaatcgtaaaacaaaatgtattgacgcacatacaatggttttcttttgaagaacgatggtgtgtttgactgcgggaaatcaaactccctcaccttgcacgggagcagatgcagttttactctcctccttcctgccagatccaccctgtacataaatagaacgagtccgacaccaataataaagggacaacgggacagtaagttcatgggtaaaaaaaagagaaatgcgaagtaatcaacaagagaaacacgcaaaccactcgacttaaatctttaactcaccgctttcatccctttccccagagctccaccgcccctgatctggtcgctcaggtcccggtagttctcctccgtcacgttgaacgtgaactcctgctcgcaccaaatgtcatccccacacctcttcttcttgacggtccagcccctgcccttccgcttgagacgacgtctggtgcacttgccactccaaccaaggccacggcagccccggtgcttgttcttgcgcccactcacgcctacacggcggcggctcctgttccggcaaacccggtaaactttctgcgggtggggcggggtggtgggcgtcggagcagtcgggggcgttggtgtcgccggtgccaccgctggtgccgccgcgcgcgcctgatacgccttcttcctcgccatggcacgcttgctgttcttcacctgcctcttcgtggcgaagacaggggtctcaacacccgcagcggcggcggcagtggagtcgggtgggatcgagaaaggggcctcgtcaccgccgttgacaactgttgccggggaaggaggcacttccgggaaacccggaaaatcgccgaaagagatgtcccacatgtttccgtcgtcgtcaccggaagaagacggggccgggtcgccagaaaaaggctcaccaccggaagaagacggggccgggtcgccagaagaaggctcaccaccggaagaagacggggccgggtcgccagaagcaggctccccgctggaagaagacggggccgggtcgccagaagaaggctccccaccggaagaagacggggccgggtcgccagaagcaggctccccactggaagaagacggggccgggtcgccagaagcaggctcccctccggaagaagacggggccgggtcgccagaagcaggctctccaccgaaagaagacggggccgggggagaagccgggccagacggagtggacgcgatttccgtggaagatagaatcgcttccaggtaatccagcatctcgtccacagagctcgtcgtaccgccagagaaaatgtgatcctgttgttgcgagagacaacaggaaacaaaaaaggagagaatacaaaatcaagtttagtactttacaagcattaatgccatcttgacaaacgggtgaaggtggatttacactctaattctatcacacaaacacgcaaacactccccgcttcaccttggtgacaaccgcctcgaagtggcacttagatgtccacaggatgcgtccattctccctcaggggagtgctgaagccgtaggcgtccctcagcatgtaggtgtcgccctccaccatctgctggattatccgcacctcggttccgcactgctccgcaacaagccaaatgccgcggacatcgagaggtttgccatcgacgatctcctgtgcccatgtgtccaagtcggggagattggtcttctcaccgtcgaccgggtgatccgtgaaagatgtgtcgcgtgggagggaacgcacgtagtcgaccatccgtttgcggccctgtcggagcagcttcatcactcgtccccgactattcttgccgtacaacgcttgctgggcctgcgctgggtgaaagccgccgttgtccaccaagcacagcgtgaacaccgaaaggtcgccgcagtacccgctgccgaagttcttcagccaccacaggcccagctcgcgaagagcggtcgtgttctttttgtgcaaaatagcaggagccatgttcgtttacctggcatccattgtattggtggggggtgggtggaagcagggtgggacatcggtaaatgcaggtgatgtgaaaagaagtgcacaagggtgagccaaggaggtggttgtttggttgtttggttgtttggttgtttgattgtttgattgtttgattgtttggttgtttggttgtttggttgtttggttgtttgtttgtttggttgttctgagaaatgagtgtcacccaatgcgtatctatgtgttggagaaagacagagaaacgaccactgtgtatttatgtgttaaataaatacagagaaacgactactatttatttatgtattagataaagacagatcacccaacttctgcgatttatgtggtagataacgacgggacagtccacgctcagttaaagtaactggtctgctgtgtctgctgttccactgttgtgttttacttcttcgctgtttggttgtttggttgtttggttgctgtagataaagacagaccacccaactactgcggtttatgtgatagataaagacaaatcactcgaaattgtgtattcatgtggtagataaaggcggggcactccacgctaagttaaagtagctggtctgctggtctgctggtctgctgttccgctgttgtgttttttatttcttcgctgtttggttgtttggttgtttggttgctgtagataaagacagagcacccaactaccgtggtttatgtgataggtaaagacaaatcactcgaaattgtgtattcatgtggtagataaaggcggggcactccacactaagttaaagtagctggtctgctgttctgcggttccactgttgtgttttaattcttcgctgtttggttgtttggttgtttggctgtttggttgtctggttgtttggttgatgtagataaacacagagcacccaactgccgtgatttatgtgttaggtaaagacagaggacctgaaaacccggatttatgtggtagatacatgcgggttgctctacactaagttcaagtagtaaggtgtgtgtttgagttatgctttagataaacccaacaaccaaacatccaaagtttgaaatggacgtatacctggcaaggccggcaaatatacatagcggcctcgaaggtatcattgcgatccgtagtttatattaggaaccacagcacacacacccgtggcatcaatcactcacgcgacaggcatgcgacgattgaccttcgatctcgacataatagactcagcccgcgactaacccacttcgtaccggtcaaggccggcgaatgtatatagcggcctcgaaggtatatcatggcgatccgtagtctagggggtatgggatactgattgatggtgtagcacgccgttaagctctatcatagagctgatacacgagtccccaatcgtcgtaaaaactgctgctgtatttcttttctggtactcgaatgcgtcgtatgtacgacgagacgacgagtaccgtagtagttacatttcgacgaatcaattgataacggttcaacaatgtagaggttgtcccgcttttttatttattgtagatttcaaaatggcccacacgacacgatactcgcgagtagcatcgacgggatacaccatcatcaggtatcaacacaacacgtcaagacacctgtacaccatacgtagcacccacgagatatacgtcgcctgtccagcactacttgcccgtggttatcaaccacaggggtccgcatgaaagttaggcctctttttttcctggaattttattttagatatttttttttttcggtggcaaccaaaaaataccgaagagctcataataaagaatcatatatccaccatctctacaagataagcatagctgctggtataggcctgacgtgcttgcgatgaccgcactgacttggaggtgctctcgagaccactcctggctccgccgccctttagtggcgggagaaaaatacttcgatctggccgtgaggcttgtcgtttcgagctgcaaaaaatctgcaaaccgtctgtcccatctgcgttctgcgggatttttttcagcaccgccgtcggacgtcgcgcgcagctaaaagttggttcttgcccaccccaagacccaagggcaactttgtccgtgtttgcttttttgtttcgaggcgttcatcgaggaaggtgtgtcgtgatacgtactcgttcttatcagattcgcgtggaattgcggcatacctacctgggggtattggttggttaaaacgctggtcttaagtcattgttgcttggtgataaaatagtacacttcgaagcttgtcatgcacccgggtttccaccctgtcaggtatcactttccttgtgtggaaaatcgctcgaagattcttgagtataccagcagctcgtggcaaagggagatcacgtttccccgatgataagttggcataaagatagtatagctgtcgctaggaactcgctcagcaggatattagaaactgtcgtcaacttgtgtgcattggtggggagaagtacaggaaaaaacgtcgacgacgtgccccgagaacccccgctgccctgatcttgattgagtttctgattggtttggtggggttaaggttaggttgcggttttttattgatggttttctggcattaaaaattctgcctgtttactgattaaaatagtggatactgctgtgcagatatactgtttttggtcgaaccgtgatcgggagctgtattgttgattgtcagggagatattcaatgataataacggctggtctggtagttcggagaatacattgtacggtattgagatttgtattgaggatctgtcaggtttcgagattcttgcaacgtgcagtgattctgaagttagtactgctggataaacttgtatcgacctattggcaccgagctaatggccgtctgattatcgaggccatatgccctacagtagtttcggcagctgagtgtcttggaagtttgttgaagtttgagccagtatggtttagattttggtatctgaagttagtactactggataaacttgtatcgacctattgacaccgagctgatggccgtctgattatcgaggccttatgccctagtttcggcagctgagtgtcttggaagattgttgaagtttgagccagtatggttgagattttggtatttgagtttgaattaatttgcttgaatttctggtattcagtactttgaatttgcttgaggttttgggacattgttgtccactttcggtacgtgaatttggaatttgtgatattgattcgggaggatgatttgtggttttcgggacagctatgaggtgtgaccatgctatgatattgtgatgctttattgccacactgttcgtcatgcagggaggatattagttgaagggactgtacacctgttcggtatgcatactgcggatgtgtggtgtcgcacagtatcgattgcaaagcagggaggatatcgattgtgcttggtactcgatacagcaggtatgatgacggtttcatatattagggagttcatatacttgatgaggctttctccatctgtgaggtctcgtgcttgctggtgtcttgacttgacccgacttgcttgacttcgtctcgacgaggtccacctgcgaggtacgataatatatacgtggtttatgtctacatgaggagcgctccagctccctgaccctgcccgcctgtgctaggccccgtcatgcccccgaggccgtatcaatacaggcctataccagcaggtatgcttatcttgtagagctgctggagatatgattatttattatgagctcttctgtattttttggttgccaccgaaaaaaaaagatctaaaaccaacgcgcaaacgggtagggtggatcgtaaatgatccgagtctggcgggaaggtttcttggcctgggtttttgttagtggatgagcttcggcaagttccacactacccggagagtttactcttcgggtggctatccccaccgcaccgggccccttcgggggtcaggtcgggtcaacatgctcaagtctccggagtcgtaagcagcaagggctgatactttcgagggggcatggagtgaattgacacacgacacgaagtgagacgtggaagggtggagggcgtaagctttatttttacccatccgccggaggatttaaaaaaaaaaaaaaaaaaaatctaaaaaaaaattccaggaagaaaaaagaggcctaaccttcatgcgcacccctgtgcgtacttgttcccgccgtatacttgacaatacttgacgatacacatacatataatatgtacgagtacccgtatgataagtactgctgtggggagttttcggagatcatgtcgtagatcttcgttgatctcgacgtcaatgcctcgtgcgaacgctacggcgtaaaccggcggattcacgacgccgcaacacgtatcatcgatcgatttgtgaggactatacagttgtgactcacatacgataccacccacgagagatacaaggtaccaggactcgtactgccaggtataaccctcaaccaactatcttcattccgactaatctgggatcgtggttacctcgtgttgcttctcgtgacggttgctgatcgtacgagcatgatctgttgttggacgcatgcatatttggtatgtgaaccggtatggtccgccttttttcgctgcatcggcggacacggctacgtacgagtacttaacgtatatatgtgttgtctagtaccggtatgtgcgacccggtatgttcgacacgattagacggcctggcgagcgcgcacactgggtgcagcagtgcaacaaaacaaccactttttctgtctttcgattaaaaaacaacaactcctatatcatcttcatattctacatgcatcaatctggccctaccgcagtgggagcgggagggcctttttttccctagtatatcatatgggcatcaagacccaactctatacttataatcccatggttaggtgggcatcagagcaaactgtatgtaagcaatagacacatacaaggttccccggggtgtggtcccgggggtgtcgcaagttgaaaaggggtaaaacatcgtcaggtgttcctgtttatatatatgacggggtaggttcaacgtcgtgtggtgtgtggtagattcggacgtggaaatctcctgctgcttgctgtagtcacgattttgcatgtcctggtggtgagcactgcacacaaaaacactaaaaaagcgccgtggccgtcacaaaggccagagtgtgacgcgcgggtgttgtgggactactgttgctgctgctgctgctgctgctgccgttgtacgacgtggctggcgcttctttatacttccgagtagatgtagtatcgtccggcccccgcagttcggtcatgagactacgggtatgtatgatatgtgttcattcctattccccaggacgacaggaatcatggcataaacatgcacacacgcagacgcaccgtccgtggccgccacaaaggaagagcttaatgtgcggatactattgtaccgtggctaccacaaagtagtagagggcttgaggactacaaccactgtgatacagtataccgtaataatgcgagtagacgccacccaccccgcaccgacttttcgagctcgatgtctccacagcaagcagctagaagaatatcagcaccgacaagggtggcgttggacagatctctcttaaaccgagggctgtccgaaaacatgtcatttggtattggcacctttgtttaggagcgttattgagctcgaaaaaatgatctggcggggggttgtttactcgcattattacgatagcagcgtatgatacatgtgatacagcagcagcaacttcacctctcggcacctccaacacgattacaagtattaataacgtacactcgattaacaaccatgcgtatataggaaagagaacaaaaccatagtattaataattgtacgtatgtcgcacccatcaaatcgggcgtggtgctaatcatggcatacagaaaactctggattgaccaaccgcacaagaacacccgccggagataaaaccggacgcttacagcgtcattggatcccacgatgactctacgccttcctccttttgaacctttccgcaaggtcgctagcctttgatccagttacagcgcgactttctgcggcaccttgaacaggcttcgattgagctcgacgaaggcgctcttgaagctcagaggtcttgtagccgttgttctgcttcaggggctgcggcctgcaagcacgagtggaaaattggtccaagattaaaaaagaaatgccaatgggtgcgatggtacaggtgattttgagcccgtatgtacagtagtcgtaaccaaactaaaagggcatattccacgtccacaaacaccggaatgcgccaaaacgcgaaaaaatacctgtccggtttgaagtcagcctgggaagatggggcgtgttccactccggagcctgagggtccagctgcccccatagccggttctcgtgtgcccaagccccccatccttctcctgatttcttgcaacctgtttggtcgaggctgggcggcatcttcgtccacgcgggtgacgtctatgaacactggccttacaatattttcgtctgcctcaaacgcaagagacttgcgcgttccttccatgtcctgccccctccgcgcagaccagccgccgtgcacgtctgccatacgtccacgcaggggggtgcttcgaactccgccgtctgcagcatgcggtgctttgcatccctcgaggataaactggcgaaaccgtggcttcaggcgaccaacctgtttcgcacaaaattggaatgttgttgcatgagttgtcatcgtcgcttcttagtgaaagtaatggtgtagtacgacgctaaacaagcagtatggacaaaacttgcacaaaaaaatcctgtgtgtacaccttcattacacgagttgctccaattctacacctacccggctttctagtctcaccacatgcagatcgcagacgcgtcgagtaaaaaggacagtacccacctggtcttcaagcgtggcctgcgcttctggccacctctctaggtagctctttagctcgttgagggcagtagagccatcttcaccaccaccgtgcacgctttgggattcagccgaaaccaacccgatcaaacgggcaatttccgcaacgtggtccgacttaaggtgcagaactggtgaagaatggcgacgacccgagtctccctgacgcaccgagcataaacagtgaaataagcaattggaaataagaaccgtcacaatgaacactgtttagctgtctaatagctcaaccacgggggtcgcagctcaaagcacgctctacatggtacagtaataagtcagatgcctcttccactgctagccttcttctgggacgatctagttgcgagtaaattacatttcgcctttggcacctgctaagcgtgaaaaaaggacaagcgctggggctgcaatgctctttccaacagaaggtatgaaaagtgttcacttcgtgcagaccaagaggttgcgtttcgtcttaacggcggaccagacaggcttgctggtcggtttgcgctcgacgaaatgccgttcattgaaggggaggcgcagttcgtgaggaaaactaacacactgattcacatgggcacggaataagtattggtctagcagacagcaaatgcgtacgtcaatcggacaatcggacaaacgcaaccttgtatgtaccagtaatatatatacgaataaactgctcacatcgttttccttcgacgtaaccaggagcc

SEQ ID NO: 270 - DNA, 21434 bp, unidentified
  misc_feature 1..21434: note = Fanzor polypeptide
  source 1..21434: mol_type = other DNA
  variation 18412: note = n is any nucleotide
  variation 6179..6236: note = n is any nucleotide
gttattcctgttgtctgtcgctcttgtttgcagccatgcgtctatggaactatttgtccccttttcgtgttgcattgctatcgcatgtgtcacgcctagtcgcgcgtccacttcagcccctctccccgccttcgtttggtggttggtggcctctctctttttgacaaaagagtccggtaccatccggctccctgaacgccacaatatgccatttcgtcgttgttttgtttctcatccctgtggcatccgcccacttctcattcttctgctgcccccatccccatgttctcaccaccccgttcctgctgttgatggtagatgacggcgctgggtttggcgaaaagggtgttgctaatgcgggtatcgttagcgccacgggaagagcagaggagctggtcgctcaggaggcttaagaaggatgccgagggcaacgtcaaaaaggcttcatgtagggagaagcacctggaggtgaaaagtaccgtcatacttgggaatatattgcattttaaagtggcgacaccagcagcgttttctgcacatctctctgtagcagaagccgcagcaacagacacaggcgcgtaaatggcaacaatcctttgagagagacgaactgaaaacactttggctaccccacaaccgcttacaccctccccgaaatccccacatctttctccctgcctgttcaagttgcgaccgagagcaaaggggggctctgtgggacatgaggaggagtaggccgacgccgccgtcgccgtcgccgactccttgagcatggattaagggcaaattccgcaggagcggcaccaggaacagcgacgtcagctacagcacctgctcgaagaggagcttcagctgaaactgtttgtgcggcaacacgaggggcagcggctccgggagcagttgattgtgtttgagcaactgcagcggcaccggcagacacaggtgcgtgaagggaaaacatcatttgagagagggagagttagagacgaaatgaaaacgcgtcggctgtacatttttgttgagtcgtcatccaaaacgagactccacgaagttccaacattatcacgtcatttctgaaaccgctatcgtcgcggggttctaattgttcccttcgtgatcgcccgagtcgatggcgtactttttgttttgagtcacggagacatttccgacgggaaaatagacagttttaatggaatgtaggtttagaagtcgggggacactgcaaatgtgccaaagaaaatggccgaaccgattacaaggactacgtgttcgttagcacgggatagtgtttggtcaaatcatctacattctgaaatatgtcctgctcaggttgagaccgagggcggtgggagctcggttgaattgaggaggaggccgccggcagagcctcagctgcagtcggagagggcgaggttggggccggtgatgcccaagcagcgccagcgtaccagagggcggacgaagggcagcatgcaggagaagctctcgcggaggcccagtcaggagcgtggcctacgggagggcttgtaaaggtgggtttcgtgtgtactgaagtagccaggaggcatgattgtgtatcctgaagtagtccggcatgcttcacgcgcccggatacacggccaaaaactcgtggaggtatgttgtgtatcctgacgaaacctggcctctctccccgtggccggatacaaggcaaaagagtcgtgatgggaagttttgtggatcctgaaacaatctggcattgctccccgctcccggatacccgatatgaagcgcgcagttcttggtgagatgtgtttttgcacacaaccgttttgaagattaccccgcttccttccccggcaccgccccccccaacgctgccgtctgcagatccatagcccgttcgtgcggaggccgaggcagaagggcgctcggcaacaagagcgagagtagcatgatgtattggagactgcggcacttgcatgctgagcttgtgaggaggaacggatacacggcgaaccaaatgggggactttcactggacgccatggaagacgccgcaggtagcacgagtagagcggagacaattcgcgtgctatccgtcggcacccgctttggtagttgtggtgttttgtgtgatttgtgtgttttgttttcttgcagtaaaacgcaaggtagaccacatcgaccatcgacgggcggataccgcaagaacgattgtagctgttgatgttggcgcctgcgttgatgagcaccaccatgcctgttcagaatcctttgctcgcggccacattgagcggtgtaccggacacacctcccactttgaagaagttgataagagcttcgatgtccgcgccagccttgaccaacgccttggttacagcaaggtgcttaccacagactaaaggtgtagagtggtatgcccgtgctcggtcttggtcgaaatatcagcaccccattgcagaagaactcgtatcaaatgcaagtaacccctgtacgcggcgaacatgagtggggtccagtcattgtcaccacgtgcgcggctaatactggctgaccctgtcgagaggagattaatcgtaagctcgacggaaccactggatgccgcatggtgtagcttgctcagagcagatggtatgttgaggatgtgtgttcgaaaacacgctcgtccaaacaaagtttatggtcaacaagtgtttgatcgaggccgttatctcgaaaagccaccaaatgcttttagcctggtacaaaatgagagtgggaatggcacggtatggtaaagcgtcacacaactcagctgaagaatttcctgagcgagaccgcgagcccgctacataatggcgccggtggtagtagaagtctgtcccgtgaccgacaggaacagtatgtcgttccaggcgttttgcgatgattgacgcattgtgagtttgtgtctatgtgcgagcggggttttgtctaagtgacaatgagtctcttttgtggagagcggcttgttcaagcacacaggtcgattttagaagttattcaaatcacatccatccggcacgcagtacccgctacaccgctagcctgactcttgtcctcggtgggggccacgcgccttgaaacatccccggcctttcaccgctgccgtcggagcgtgatgaatcgccgacagcgggtgctgaaagacgccgcaaactaggccgcctttcaaaggcatatttcaccgttcacgacatgaaacacccccatcttcttcgtcccgctcgactcacagcgatggaacattacttgcactcgtcaggacacgaaccaacggatgcagggctggaatcgttccccgagctctttgcagctgttggaggtgatcgtaatcacactaagggggaactcttgtgctgatgtggacgtcaaatgatgcgctgggcgcggcgttggttacggtgggtgcggccacgatgtatttcatcaaacgatttggggaagatggctagcgatggccgcgttgcaaagttgttaccggataatggaggcaattgttgcgcgcgatttccccgaccagaagtttattaacaggagcttccgctcggcggccctgcagttttctggcgacaggcaggtcccggacaggctcgatccgtaaagactggttgatgcggtgatcgcaacccgtacgtgatgtctgctgtagtccatcttggcgcggatcgggccatgatggttcgggactggcagcgggggctgagaaacacatcccttcgtcggttggcagagagtcagttcgtggatgtggtccaggcgttggtactgaatttgtcggcaaaggagatggggacgacggactaatttggctgtgctcctaccgaacatgtggcctcggaggcatacctttggcaacgtttctgattggtagggaggggtgtatcgtgtcccccctcgaccgcagcggcaatcaagtatcgcagacgttgtggggaatgaagcagcctttccgcgatttcagtcgtagcgcgtgatagggagaattcggccaagcgtcggggggttcttctttggcgcaagcgtggtgtcaatggtgatgctggtgaagtccctccgccaggaatagtcggagtgttgcaagaatctggtaggatttgttaaaacgaaagtgtttcaattgactcaggagcagccgctgtctgtccaagtgagacaattcttcagaccgccgccagttgcgttcactgagggtctagaccgcactctgcgtcatgttgacgagggaaagggactactgaacattctcgcgataatctgaagacatgcgccgcaggaggaatgtgatgagaagggggaaatccccggtgtttttgtgtcccggccgatcgttgtacagagatcatacacagaaatgcgtagtacaagacacctaaaacgaacaggtgacgccagacgccaatagatgggacgtgaaacacacacaccgcgttgcaattgctattgctgtttccgtctgacaaaacacaactctgcaggctaaaaaaacggtcgatgaaacttttttgtgggatgacaaaacactcggacagcgaccatcgaacaattgtcctttcccgtcaaaatggtccggagaaccacgagaaagtggacgcacacggagcacattgcttttctctgcggcgtgcagatgtgggagaggaactgggccgtggcctcgctagtgccggccgacccgctttgtggtccaaacaagaacgtcctcaaaatcgacaaaggagagcgattgacggatagattttcgaggagaattgacatttacaccgtggaccgcacgaaccacacgtttttgccgattacacctccctcaatcatgcgtttacgaaggaaatacgacgaacccctgcttgtcctccaagacactcaagcatcctagcgctcagaaatttaccttttggtttcattaccacgccccgtctgtatctacgttcgctttctcatgcccttggtcaccaacttgacgggtttgaagcggtagatctcgcgtgaatcgctgactatgaagcctaagcccttcttgttcttgagcagcgtctccactttgcggcaggctttcgacgcggctatgacattaaaagaaagttgcgtctttccctccttgagccatcctaaaacccactgcccgttgtacgcggaatcagagctgtccttaactcttgtgtagaatatatcaggaaactcccccttctcgtttggcttcacaagattgtacgggaatttgacgccctcttggaaaaacttcttctggaaggttctaaacctcgtctgcaatacagaaagcgacatgggggccaaaacatgcggttgttggtatgcgattgttggtaaatgtcacaagttgacaaatggatgaacgggtgcggaagcgacagatcggaccgagccgctctctacatacgattggaagctcgcgtttctgaccgaaattcacgctaacatgttttctgaaatgcgtaagctgtcttctcaccacagtttcgccttggaagtggtgaaccatctcctcccaaacttcatccgagtaacacgtcttgctcttatccttccgcgcattgagaagagcaggaagaaatcctgcgtgacagcgaacagggagaaacgcaacacatgtatgaatgaaatgacgtttggtgctccgatataaaaaccttccattcttactttggccactttcctcctcttcctcgtcgcctgcgttgcctgtgaaacgggcggcaacgagattagacaaccaatacatcgccaagtgagaaaaaaaacaagagaaggcgcaacgtgcgtccaaaaaaaaaactttcatgcgtaccgtggccgctccccccgccttcttcgtcctcgtcgccctcctcctcttgatcgtctaccgcgttgcctgtgcaaagggcaagacaaccaactattattcgacaaccaatacatcgccaaaagagaaagttatgtcaaggaggggcgccaggtgcatccaagaaaaaattagtccatgcttaccgtggccgcattcctcccctgcgtccgcgtcggcttgctcctcttcttcatcacctgcgatggctgtgacaacggtggcaacgtggtcacgcaaccaacattttgccaaatgaggaagcatttcaagtcgcttccccccgcttctacgtccattgtgccctcctgcaatgtagagaactacccccccccccnnnnnnnnnnnnnnnnnnnnnnnnnnnnnnnnnnnnnnnnnnnnnnnnnnnnnnnnnnctgcaatgtagagaactcccccccccccctcgccaccatcacgcgtgtccccggtgccttctggagacgaagagctggcaggaacaatgcgtgtgtcttcgtcggtgcatggcacaaggaagggcggcaccgtggttggacaaccaacacatcgccaaatgagaaaaagtgctaagctctcaccggtcttccttgacacacgcctagcggtagtcagacgagtagcaccaacagcagtagcagcagcagcacgctttggcctctttgacggccctgttacacgaaacaacaaatcgaacaacacaggaacaaacactcagaagatgccaagccgtcttcgtttcttccccggtggccatcgcgtccttctttcaagttcccgagcgcgtaccgcactcacctacgtccccatccgctcctcctgtcatcttcccctgcaccctctttcgcgagcattccggtagtgaaggggtttcacctgcgtattgatgtgcaaacacctcgccaaatgagaagatatttcgcgtattgctgcgatttgttggtgagcaggtgaatcgcgccatgtgagacaacaaatccacacataccgaactttcgtgccttaccgtggccatttcccttgtctccagcgttacgcgagcaagcaactataggggtcaatgctgtcgtcgaccggccttgccacagcaatgatggagttgtcaccaggggctgaggctagcatggcgttggtcgccgaggcgcgccgctggatgtccttgatgcgatcggcgaattcgatcccgtcgcgcccggagaattggttgacggactgcagttggtccctgcaggttctgcaaatgtcgatctcgttcagtgcaatggtttttttggccatgaccgaaacgaaaaagcccttttctcttcgtccgatgcgtactcaaaccaaaagggttcttccgaccgttgctttttggcgggtccttggtccaaaagaaagccctggtacgccctgccttcctccgtgctctgtaagcgatcgcagcgctgttcgatctcatcgcaaagacttgtgtcaccaccgagcaccctggtgatggtttgggctgattgacgcctgaattccttcgcagcgttcgaaggcagtagccaaatgatttctacgagagttgaagcgtcgcaaataggggtgacagggcccttgtcgttgatcctgacgtattcaatgcgttcagaaagtggaatcgtactctgtgcattttgtccaggcctttccatgccatcccttttttccttttcaaggacacgtgtgagcatttttgcagcatattcggcagacgcctcgggacacagcatgcggttgacatcgataatggaccctttcccagtgttctcgtcgatgcgcacggaaccatggattcccacggtcctcagcgccttttccaacctagcagttttcgtttcagcgtgagcgacatggtccgataactgatgttgcgcctgtgcacgcagacactgacaaacgcgctcgacgtggtttctgagcgattgtttaaatgcctctcccgacgtgtcccgccacgtgtcccaacctttcccagatatgttgttcaatatatagtcacatacttcgctcggaacgacagatgtgattctgccgtgtacctgacgcttcgaaatttttggaccactgaaatcattgttgtaaagttaagcatgttgacaacttaaatgttttttacaataagaaaaaaatgactcgcccgatatctcctgaaatatacgatgcattcaaaaagtgcgacgcgcaatggatgcagaggcggcgaaaactggacacatcttcagtgttctacacgatcacaaagtgctgtactcgagagagaggagtttctcatgttttgaaaatggaagccgaagaatattcgtcgcaggcggtacacttggccagaaagaagcttccgatcggggctttcaaagaggtgaaccgttttttgcatcgagggccacatgaaccacgcatatttgccattgatggttcgaaggtgcatgtacacccgtctttcatcaaggctggttacaaaacacgaacaaacgacaagccagtgccgcgtcctgctaaaagacctctggtcatgctttcgtcgatggtcgatgtgagaacgaaatcatgtatagactttgagcttacgaaacacttcgacgaacgaagggcagctgtttcgatgctccgtagtgtgcggaaaagtgacacgctgttgtttgacaggggatattactccaaagacctactccgcagtgtccatgactccggtgcatttggcgtctggcgactcaggataatgcgttcaagggtactaggtctttctttaactcgcaccacacggaggtagcgtgtctcattcttggtgttagggtgcgcctcttgaaatatttcatcaaaggtaagacgtatgtctgcctgacgaacgatccgtccttatctcgacgagacatcaagactatgtacgcatggagatggagagtggaggaatccttcaagcgattgaaatcaaatctcaagctcgagaaagctcacgcaaaaacacccgctctttatatccaggaggtggaagccagggtgttgttagacacgatcactctgagaatgcaaagcagtacgaaggagtcgtcatatctgtatacccttgatacacacgtcacacacattctccgtaacgttaaaagagtctccggtcacacgagctacaggtttgtagcagagctacagtcaaaaaggccgtttggtcggattcattgcagaccaccggatgacaaacgtcacaccaatcacgccctcggacgttacacgcggtggaataccggaagcgaaagtttactcaaaagttcttgactacaaaacctcgcaccccgtctcacacttcatcatcatcaccatcatccttttcgtcatggtgagaccgtcttcggatggaaactcgcacaagaagaagaaacacaagaagatacatccgagagctcctccaaaggacgtcccgggatttctgcggacggtggggagtctctaccccaagggatacctcaccgagtcaggaaatctaccaaagaaatacaagggtacttattgttgccagctcttctccagagtcaagttcgggaaagaagtgtctcaaaagacaaggctgagaaccgtgagcgtcggatttcgggcagcaacgaccgatgagaaacgcgacacttttcagtccaagatcgatgaggcggtgtatcacctctctcgcgaacgagttctggcgtctctcttcgcgaactttgtgttcttggaacgtcttcaaaacggatcagcccttccagagcccgacagtgccttttacaggtcatgcttgtcatcatgcatcgaaagcagcggaggagggagtcgcaacgacgacttcgatcgtttttccgacacaacgggactgacaaggctcgtgcctcccagaaaactgaaccttaaccaacagcgagagcacgaggcacaacgcatggcaacggcaacgtcgacgcgtgcaacacaccacgcggaaaagaggagaatttcgatcacgaggtggtttctgtgcttgcggatatccaggggcgacctcgtgtacaagaagtatgctaccaagctatacgatctagcgaagaaaatcatcacggagttcgacggcacacccgagtacgcagaagacctccgacaaaaggcacaatcaatagaccctggcacggacatcgacaccatcctcgacttcgctcggtaagaaaaggagttctccgatcgtcaggatgggaagtgcgcgtcgacgatcaaacacctgtactggatgttcaacacgtacgtcgccgactccagacgcatgtacgaggagaccgtatcccgagctcattcgtatttccccggtgaagacaaggagtgcaggaacaagaggtacgaattcgtgaagaacgagctcggagaagagttcacctacgctccccccaaagacaccgccgttctacccatttgctcaacgggttcggtgttcatctacatcgacatgaagacgcttaagtcatgggggcttctgcactccaacgatgcttggtggtacaaggacgtcctccgaccgttctccaaagaggccaatatcaagtgtctcgcgaacaaagagaactccaggtacgcgtcaagcgagcatggatacctctcgagtttgctaggaagtggtccggacaagtgcccctggatgattggtgagagttttttgacggacggtgtgcagatcaagcttctgcttgtgacactggaacatggaagaaaagctttccccgggtccacccagctgaacgaggcggggtacaacaaacttccccgggctgacgtgcaactagaaagtctgctgagagagggaagaggagtgtacaatatatccagcctcttggattctccaagcatcagggaagacgttgtcgtgatgtccgcggacccgggacaggcgaaggtgatcaacgtttcttcggccacggccagaacttgggcgaggcaggaccctggtgttattcttaacagttcgacgtgtgtgttcggggatgactatcgtcgcgatactcttgcctcacgttcagacaagtacgagactttcaggcgcaaggaccagccttacggagtggctatcgatcgtctacgcaacgagaagaaaagaacttcctgcctcgcgacgttcatccggtactgtaaaagttggtgtgcaaacggtgcggcactgttgcttgagacgcttcaggaagcaaggaagttcttgcgttttgatcgattcagagctacgcagaagacactcgccaagatagcggacaagtacatgggacatgtaggagacccctgcagggtcatgttgttcggtaaagcgtcttttcgtgcgcagaaagggagggcatccgccccaaggaaagctttgatcagagagatggccagcaggggagtagtgttgatggtggaagagtacaacacttccaagaagtgcccggggtgtggggaggacacggtcgaggacaaagaacggagaatccggagttgcaaaaactttaagatcggatcaccggaagagtcctgtagacttcaccccctgacaccagagtttgaaatggatcgcgacgacgtagggtcgactaacatcggtatgcgtggtttcggcaaattgctgggtcaggagtggttttaaggatttttttcggattttcacttgcggatgatactttatagttggttttggttttcctaaagttgacaatagtgactgaaatcacggagaattccctccaccttcctcagaatatctttttgatttatcgaaggcctagccgtttttatcagagaagcgactccgacatgacctgtggaagcatccacgaccaggttgtccatgatttacgtttgagagatgaaagacattttttattggcagttttgtacgcgccagtgttgaaggcaaacgagtctgtcgcccccagcaacgcgtgtggcactggtatcggagcgtgctacaaacgtaaacccggtcgcggaatttaaatacccctccacattcccgtggcccgtacctcatcgagaaagctcgtggtaccatcttgctccaaggccgatggcccgtcgctactgctctgccgccgaaccccgcccaaatggcgcctattgtggaaaaatgctgccctggcgcccccgcttggcaacccgacaaaaaatggaacgattgccctcctgctagcacctggctactgttctgccacctagcgcacgagggcacaattgcctacaatttcgacgacccgaccatctgtgtcagggtactacccaaggccggcggggcgcacatataccaatgccacagaaactgccataaatcggcaagaacgatgttaacttacggacagaagcggtcaagaatgcgtttactccaaccgcgtccccaactcgcaactgggcgctacatcaccggcgtctcgatcgcttacttgctcttttcggcggttgtggtcgctttgcccccttcggagggtcagcatattcgatggtaacctccgctcctacctcgatgtctgcacacgctacgatagagcattcataccaccatccatactccacaccccccgccctctcgtaccaccatggcttcattcgtcctccacccccatgtattaccaatttagcattcggcgcgaacgagtggttgagtagtcgcaacaagctgatttccatgaacgctcgacaggcggggatcgtgccgcgcatggttttgctcggatcgatcacgagcgctcctagaccatccgcatgcatgatgtaacccatgcacgtatatccaccacctttcttttcgtaccccgcgggcacatctacatccgggagaactaccgtcaagagagtatcgccttcggcaaaagcgaccttggtgccgagacccttgcagtggattaggctattgatttccttgagcgcgtcgtgcgaaaatagatctttttccatcacgtcgtgtacctgattgatttgcaaagggaatcagcggcgtttgtttggatgacgcgcatcgtatgagggcactgctttctgcaacaacatgtgaagcaccgactacatgcgcttaccgttaaagcgggccgctgtaccggcggttgctgctgtgtgctgcgccgcaggtggtcacgtgcgggtgggctagccttcttcagttggtcgcgtagtttgtctctgtcttgctgtactctcgcgagtcgccgctccaacttttctgtgtctgccttcgcttgtgccgctgcattgatttccgcctgctgctctcgtctcttggcctcgagctgcatattcccgggacacacaaggtcaagtcaaaacagcgcgtgtgtgcgtgttgactaccgtctatatagaaatgaaaatgccatgtgtgacaacaccaactcacagttgcaagcttgcgtcgcagctcgtcgttctcctctttcgccttgtctgctgcctctctctccctttcacgcacaagcttctccgattcttcctttcttttcttctctgcttgtgcaaccctctctgcatcctgtgagaaatgcgaaaactacagcatgcggtagcggtcaaagggtagacgcgcgaatgggcagctgtcgtggtttttttgttgcgcagaggagtgcatctgttttcgatttaaaacagaatttacagcgcctcagctactgctgtacatacaaatcgggaacatgtggatcccacactccccacctcgcgtccctgaacgcttgctgcttcggctgctgatacgaggacacttagcctgctgatcccttgctccgctccggtcgctggctcaacatcgctcgccgccgccgatcctgcaccgggcgatgcgctggactccatagcggtcacccccgctgcaacgaatgctgctgctgcgacgtctactgctgttgcaggtgctcgtggctgagggacgactggtcgctctgctgtacctttagatggaccagccattccgttcttcttgtgctggccacagtgagtccgagcgaggccaggaaagccatagctggctgtctttctacactcttcgcactttttgagcaaattggtcataccctccgcgacgtggtcggcacagcacctcttcttgccatccgccttgaaaccatacgaagggtacttgttgcaacccgtgtgactacacttttgggaatgtatgaggtgaaacaccccttccttcgcctcatccttgcactgcttgcatttcccgtcgattctaccctgtgtgtctgcaatgaaagcgccgttgccatctgaagggaacacgtcaaagttgaaaaaaggggcaagcaggagagatgccacaccctttttcagatgttttgtacttctgctgtcgtggaaacaaaaatgcgagactcgcacgcgtcactgtgttgtagtacagctgacgtccagccagagctctagagcgccaatagcataccgccttgaagcttgacgtgtcgagggctccatctacagtcttctccagatgcggcccaacagcacaaacagtacacacagcagcgtgctctcggtcggagctcggttttggaaacgatctctcacctttccttgcatacacccctctccctcgtccgcaactacattttcgtggcatgttgtgagctgacctcgggtcgactgtgctcaggttccctccctctctcctccgccctactgctgtctactattggccccggggcacgctttttgtactattggcccatatgcggggatggggtgtactattggccctggggcacagtgataagtgtactattggcccgcgttttttcggacggaagatcaagcagcgcacctcgagttgcgcacaagagcagaggaaacacacacaacgccgccgtgcctctgctgctgctccgctgctgatctgttgctctgctgctctgctgccctgctccgctgctctgctgctctgctgctccgctgctgctctgctgctccgctgctgctctgctgctctgctgccctgctgctcggctgcccttctgccctgctgctgccgaagcgctgccgccgctgctgctactctactggtgtgctgctgccgaagcgctgccgccgctgctgctcctctactggtgtgttggtgtactggtgtgctggtgtactggtgtgctggcgtactgatgtgctgctgctgctgccgctgctgtgctgctgtgctgccaagcgctgccgcgttgcaggtgagctcgatgttgcacgagagagagccgtgatgcgcgtgaatgaagcaaggagtaaaaagggtgttgtctacagcgccgtttcgtctccgtgaaggaaaggagaagctgggccacaatacggtttgcttttcggcgcaattgaccagcaccggtaaggcacgagccgagctttcagccgttgtgctgtgcgagcgtcaaggttttgagtgtgtttgatttaaaaaactgcttcagcaacaaagacagccggtgcacactgctgcaacaagatgctagagttcaaactcggcatcaagagtaccatcgtctaccagccgcgccacacacttctgtcgcattcccttgtcgtgaggtacttccgtaccgatgctcgagtgtgccaaaaaagaatggccggccagtggacgaacgagtcaccgccgctcggcggccaagccctgctgatttgcaacacggtcacaattaacatcgcaacatcaatccagagcgccaaatcctctgcctgtaaaactatcgaaacgcttcacgttgtcatggcccatccgccgaagcctcgcccaccggcaccgccacgcacgtaatcgaaccactgacagccgtagtttaacgcctctggacagtaataaattaacccgtaagaaatgaacaaaaccatccaaaattggtaggtctcgttgaatccggagggtctatattgtcgaaagtaactacttccggacagttattgccgtacccaaatacgacactcatcaacaaacaacgattttctaaagcttaaacaaggttaggggttctcgcgaaaactaatcggggctgactttctttcgaaatctgccgctcctctcgctgactgtcgatattagtcgctatcatgctattgaggagagtacctccattttatgtacacttttctatcgatgtagcctgtgatgatcaaacttccatttaacgactgatgtcgatcctcgtggaaacccctgtggaggcccttaaagagcgattcatggggatcgttggttgcgcgatgtagagctcgttgtagttttttcgtagcgtgttgaatttgacgaccctgtacagcagtgttgtgatgtcggccttcttcttcctcttcttttttttcctcgtctttgattttgtggcggtggttgccatggtgaaggtgaattgtgaccgatgtggacgatcaacacactccagtgtttaccgataaaattgaaatcaaacgtcttttttgcaacattttatttctcgccaatcgaacgcacttctagaaaaagctcttgattgccgaatttagtacacttgtcattcactagttgacaacacccctgatcctttccgcgaaccaatctttgtcgagttcgtcgaaacaccccaccgactccaactattctttacatgatgtcaaggtgtcaatctctgactgaaaattgatacccgctccacccctttgaccactcgtctcaataggttccggacgtttcgcaggagctcgcggctgcacaggtgactggcactcagccagacgaggcagtggcggcatctgcatctgcgtaggccgtggtcgagacggtgacgcctgtgcaagagacggagcatgagcagcctgttccggccagagaggccttggtgaaggtgacggggcggtgcaggcagctggagaggccgatgcaggcgaagtgacgtcagtgtctagcgcgttggctgtggtagcacaagagccgggcgaagcacagcgactacagaaaagccgcggctcgcacgacatgctcgggcatgcaccagcagcaacggcactccagtgtttaccgataaaattgaaatcaaacgtcttttttctagaacattttaggatagtactgtctactatgcttttttgcaacattttatttctcgccaatcgaacgcacttctagaaaaagctcttgattgccgaattaagtacatttttcattcactagtcgacaacaccatattttttggagctaaatttacgcagtacgttttacacgaaacatttggatatgtgaggtgacgacccgacgatctgtgtcagagtgagggagcgcaacgaagccggtggcccaaaaacgcatccgccgacgccatcaggcaaatagctaaaacagatggcggccgagaagcaagagtccgagacactcacgcgacagcacaacgacaacacgctgtggcgcaacggcgtgctgatgaaaaagttttttttaaaggcgggcgacggcatcgtccgtagctacgggtggaagaaggcgcccgaagagcaataactactcccaagccccgccaggcccaagcgcaccaaggttgcgtagctcatcccccaagcccccatcacccccactcgttccagcgtggcggcgcaccccgaaaccagtgtgtccgacctggcacagctgaaacatgtggccaagcataccctccccgcagcctaccccgccccgccgatttcaaaaacgacacccgccccggttgaaaacaatgctagaatcgtgtgcagtcgttaccccaccccctccaccccctgttccccccgtgcacagtcgcctaaaagtgcgcgacatggtccgatgactggttgcgcctgtgcacgccgtcgctactgctctgccgcctagcgcctccccccagcccgctggaccccgccccaatggcgcctattgtggaaaaatgctgccctggcgcccccgcttggcaacccgacaaaagaatggaaagattcctctacccactactgctctgccatctagcgcccgcccaccccgctcatcagatgccagcaaccatggctagtttcggttcgcagtctatcatttcatcagggcaatcgtaaccccatgcacggtacttgcaataaatctgaaaccgggcgtcctccttgtccgcgtcgacggcacggaggtccgcttcaacctctctatgtgtcttttccggagtcttaggaagtttccagccacttggcttcgtcagtgtcatcgtcttgatctttcccacgctttcgacactaacacttcgaatattagcctgctccgaccgaatgtggatccatttgcgatcccatgggttgagatccggcagggacaccgaactttcagacgatgaaatgaagtccttaaaaaccctgtcgagaacctccgtaggttgagaaggttgtggttttttatatcctccccgcttgcgcttggacttgaccgatgtcgtcatctcgtgtgcgatgtggtcaggtcgcctggcccctctgatccattcttcataatcgtaccagtcgatgagccagaagtcaaatagttcaacatcctcgtctttcattgttgaccagcgaagtccgtctgcgtagctcgaaagaaggttccactgatgttgcgtcttgaatacggcgtcgaagcgagagtcccatgtgtctncttggacttgaccgatgtcgtcatctcgtgtgcgatgtggtcaggtcgcctggcccctctgatccattcttcataatcgtaccagtcgatgagccagaagtcaaatagttcaacatcctcgtctttcattgttgaccagcgaagtccgtctgcgtagctcgaaagaaggttccactgatgttgcgtcttgaatacggcgtcgaagcgagagtcccatgtgtcttgcgaaaaatacttcgcatcaggaaataacattctcataggtacgagatcgttgtggaggttttccagcgcgtttgttgcctcttcttcagttggtttccagttggtgatttgtgatgccatgttttttgtaggaagtgtgagacggaatgcgcgttttaaagttcataacttttgagtaaactttcgtttgctgacgtcggggctcgactcatcctcgacactgagagagatccgatgtgacgatgagatgctccagctcggatgcaaatgcgagcgtctttcggatcacatctttcgcgctcccctttttcgatgttgtgtcaacgcggatagtagaactatccatgctttcgatgaggtccatgtttgtttgtttagttgaactttgagaacatatttttgggagctaaatttacgcagtacgttttacacgaaacatttggatatgtgccgagaaactggcagaggaaaagtgtccaaagtgtaatagagtaggaacgctttgtgggtgggattagtgggttacatttggttgccaccgccccgaccatcccggctatcgctagaataaacctgtctttacgaagttgactttgaattgtttgtaccccatttttgtccggatacgtttgaatcttccgccaataaccaattccaaactattgatttcatctagcaactcgttagatacgtcttttttgctctcaaggtgccggcgagccagcattctcccgaccaagcgtattactacaaaaagaacgatcaaaacgccgaagacaatgccagattttttcaacatgatgctgtcccgtatttataaataaaaacattttattttaatatatccagtcattttgtgacctcggcacccgctgatcaacccgctgccaactggtgcactcctcctactgtgcccacccgccattttgtgacctcggcacggttgaaaacaatgctagaatcgtgtgcagtcgttaccccaccccctccaccccctgttccccccgtgcacagtcgcctaaaagtgcgcgacatggtccgatgactggtgctgcgcctgtgcacgccgtcgctactgctctgccgcctagcgcctccccctctgccccgtctgggctgttcgcgaggcctctttttgcgacgagcttgtgtgccacacacatgagaaatcaagtcaccgatgcctctgacagtctactctagggcagcatccgccacacatgttgtatttgcacttcatcgcagacagggagccacaaccacatgtccttcccgtgccctgagaggacggcgtactattcccgaccatactcctcttcagcgctctcttttcgcgtgagaccagaatgctacgagcactgtttacatcataaccgcggcggagcaagaccaccgcttgttctccgtgcttacgaacgagtgcatacgggccgctcaattctcttccccgtttaagaactacactgtgcgcctcttcggacaggtctgcgttggcgcggatgatggttgccgcggcaacgctctcctccgccgacagcttggacacgaacttcttggcgaatttcgggaccgtgcgcatccacttgaggtaggtcgtgtcaaccatgccctcgatcgacgccctccggtcctcgtttaaaaccttctgccttttctgacgcgtaatcctctgctcctctgccgcgcgctcacgcttctcttgttttgctgtttcttccgcacgcactctctccagacaggcgttcaccttgtctccatgagccttgaagaaaaactcgagagtcatgctctcggggatgacgccagggatggccttggtgatgatggtgttgtattcgaactggccgtagtacgagctgtagccgcccctgacgttgaccgggatggtcgaccacacgaggcgcattagcccggtcagtattccgccgttgatgtagcgcacgttggtctctaggcccttggtacacgctggatgcgccgggattccccacggcgctcgaattccgcccatgtagctcttgtggcagacgagacacctgcgctccacgatggctttcaggtgcccgagtcccggattctcggcgagattgcacagagtttctttctggtatttggtcatgttgtgctgcgcggcattcaaggcgagcgggatgttgccgtacacgtcgtctttcgtgaacctatcggtccttgcgaacgctgccacaaatttcgtatcgggtaggaaggcgaccaccaggtcgatgctgaattcggcgagcatatgtagtgattgtaagagtgcttatgccttgccactattttaatgtttacagttaacaaagtaaggcaccttcgccaaattaattgcccaccagctacccctggtgcgtagaaatcaaccgccccatccccaaccaccgttactacgctgagaccacacgagtaaaaatattgccatggcacaagatggagaacctactcgaggtttgcggggagatgggccttgaggtagactacctcagtctgacagaacgcggggcgttcgcctttccgatgaaggaaaccactagggcgttcaacatgagcgaagataaccctcaaaccgtcacaactgtgcgcgataaaaacgatattgccaacaggaagatgtctgccacactgtacaaccggcggctaagtggggagagcgtgctcagtgcccctgaacaagactgcgagggagatattggtttaattttttgcaacggcgtcgtgcattcgtgggatcatcccaaatcggtctcagagtggagaaaatttttcaagtagtgtgcta

SEQ ID NO: 271 - DNA, 19877 bp, Ectocarpus sp.
  variation 1..5167: note = n is any nucleotide
  variation 18175: note = n is any nucleotide
  source 1..19877: mol_type = other DNA
nnnnnnnnnnnnnnnnnnnnnnnnnnnnnnnnnnnnnnnnnnnnnnnnnnnnnnnnnnnnnnnnnnnnnnnnnnnnnnnnnnnnnnnnnnnnnnnnnnnnnnnnnnnnnnnnnnnnnnnnnnnnnnnnnnnnnnnnnnnnnnnnnnnnnnnnnnnnnnnnnnnnnnnnnnnnnnnnnnnnnnnnnnnnnnnnnnnnnnnnnnnnnnnnnnnnnnnnnnnnnnnnnnnnnnnnnnnnnnnnnnnnnnnnnnnnnnnnnnnnnnnnnnnnnnnnnnnnnnnnnnnnnnnnnnnnnnnnnnnnnnnnnnnnnnnnnnnnnnnnnnnnnnnnnnnnnnnnnnnnnnnnnnnnnnnnnnnnnnnnnnnnnnnnnnnnnnnnnnnnnnnnnnnnnnnnnnnnnnnnnnnnnnnnnnnnnnnnnnnnnnnnnnnnnnnnnnnnnnnnnnnnnnnnnnnnnnnnnnnnnnnnnnnnnnnnnnnnnnnnnnnnnnnnnnnnnnnnnnnnnnnnnnnnnnnnnnnnnnnnnnnnnnnnnnnnnnnnnnnnnnnnnnnnnnnnnnnnnnnnnnnnnnnnnnnnnnnnnnnnnnnnnnnnnnnnnnnnnnnnnnnnnnnnnnnnnnnnnnnnnnnnnnnnnnnnnnnnnnnnnnnnnnnnnnnnnnnnnnnnnnnnnnnnnnnnnnnnnnnnnnnnnnnnnnnnnnnnnnnnnnnnnnnnnnnnnnnnnnnnnnnnnnnnnnnnnnnnnnnnnnnnnnnnnnnnnnnnnnnnnnnnnnnnnnnnnnnnnnnnnnnnnnnnnnnnnnnnnnnnnnnnnnnnnnnnnnnnnnnnnnnnnnnnnnnnnnnnnnnnnnnnnnnnnnnnnnnnnnnnnnnnnnnnnnnnnnnnnnnnnnnnnnnnnnnnnnnnnnnnnnnnnnnnnnnnnnnnnnnnnnnnnnnnnnnnnnnnnnnnnnnnnnnnnnnnnnnnnnnnnnnnnnnnnnnnnnnnnnnnnnnnnnnnnnnnnnnnnnnnnnnnnnnnnnnnnnnnnnnnnnnnnnnnnnnnnnnnnnnnnnnnnnnnnnnnnnnnnnnnnnnnnnnnnnnnnnnnnnnnnnnnnnnnnnnnnnnnnnnnnnnnnnnnnnnnnnnnnnnnnnnnnnnnnnnnnnnnnnnnnnnnnnnnnnnnnnnnnnnnnnnnnnnnnnnnnnnnnnnnnnnnnnnnnnnnnnnnnnnnnnnnnnnnnnnnnnnnnnnnnnnnnnnnnnnnnnnnnnnnnnnnnnnnnnnnnnnnnnnnnnnnnnnnnnnnnnnnnnnnnnnnnnnnnnnnnnnnnnnnnnnnnnnnnnnnnnnnnnnnnnnnnnnnnnnnnnnnnnnnnnnnnnnnnnnnnnnnnnnnnnnnnnnnnnnnnnnnnnnnnnnnnnnnnnnnnnnnnnnnnnnnnnnnnnnnnnnnnnnnnnnnnnnnnnnnnnnnnnnnnnnnnnnnnnnnnnnnnnnnnnnnnnnnnnnnnnnnnnnnnnnnnnnnnnnnnnnnnnnnnnnnnnnnnnnnnnnnnnnnnnnnnnnnnnnnnnnnnnnnnnnnnnnnnnnnnnnnnnnnnnnnnnnnnnnnnnnnnnnnnnnnnnnnnnnnnnnnnnnnnnnnnnnnnnnnnnnnnnnnnnnnnnnnnnnnnnnnnnnnnnnnnnnnnnnnnnnnnnnnnnnnnnnnnnnnnnnnnnnnnnnnnnnnnnnnnnnnnnnnnnnnnnnnnnnnnnnnnnnnnnnnnnnnnnnnnnnnnnnnnnnnnnnnnnnnnnnnnnnnnnnnnnnnnnnnnnnnnnnnnnnnnnnnnnnnnnnnnnnnnnnnnnnnnnnnnnnnnnnnnnnnnnnnnnnnnnnnnnnnnnnnnnnnnnnnnnnnnnnnnnnnnnnnnnnnnnnnnnnnnnnnnnnnnnnnnnnnnnnnnnnnnnnnnnnnnnnnnnnnnnnnnnnnnnnnnnnnnnnnnnnnnnnnnnnnnnnnnnnnnnnnnnnnnnnnnnnnnnnnnnnnnnnnnnnnnnnnnnnnnnnnnnnnnnnnnnnnnnnnnnnnnnnnnnnnnnnnnnnnnnnnnnnnnnnnnnnnnnnnnnnnnnnnnnnnnnnnnnnnnnnnnnnnnnnnnnnnnnnnnnnnnnnnnnnnnnnnnnnnnnnnnnnnnnnnnnnnnnnnnnnnnnnnnnnnnnnnnnnnnnnnnnnnnnnnnnnnnnnnnnnnnnnnnnnnnnnnnnnnnnnnnnnnnnnnnnnnnnnnnnnnnnnnnnnnnnnnnnnnnnnnnnnnnnnnnnnnnnnnnnnnnnnnnnnnnnnnnnnnnnnnnnnnnnnnnnnnnnnnnnnnnnnnnnnnnnnnnnnnnnnnnnnnnnnnnnnnnnnnnnnnnnnnnnnnnnnnnnnnnnnnnnnnnnnnnnnnnnnnnnnnnnnnnnnnnnnnnnnnnnnnnnnnnnnnnnnnnnnnnnnnnnnnnnnnnnnnnnnnnnnnnnnnnnnnnnnnnnnnnnnnnnnnnnnnnnnnnnnnnnnnnnnnnnnnnnnnnnnnnnnnnnnnnnnnnnnnnnnnnnnnnnnnnnnnnnnnnnnnnnnnnnnnnnnnnnnnnnnnnnnnnnnnnnnnnnnnnnnnnnnnnnnnnnnnnnnnnnnnnnnnnnnnnnnnnnnnnnnnnnnnnnnnnnnnnnnnnnnnnnnnnnnnnnnnnnnnnnnnnnnnnnnnnnnnnnnnnnnnnnnnnnnnnnnnnnnnnnnnnnnnnnnnnnnnnnnnnnnnnnnnnnnnnnnnnnnnnnnnnnnnnnnnnnnnnnnnnnnnnnnnnnnnnnnnnnnnnnnnnnnnnnnnnnnnnnnnnnnnnnnnnnnnnnnnnnnnnnnnnnnnnnnnnnnnnnnnnnnnnnnnnnnnnnnnnnnnnnnnnnnnnnnnnnnnnnnnnnnnnnnnnnnnnnnnnnnnnnnnnnnnnnnnnnnnnnnnnnnnnnnnnnnnnnnnnnnnnnnnnnnnnnnnnnnnnnnnnnnnnnnnnnnnnnnnnnnnnnnnnnnnnnnnnnnnnnnnnnnnnnnnnnnnnnnnnnnnnnnnnnnnnnnnnnnnnnnnnnnnnnnnnnnnnnnnnnnnnnnnnnnnnnnnnnnnnnnnnnnnnnnnnnnnnnnnnnnnnnnnnnnnnnnnnnnnnnnnnnnnnnnnnnnnnnnnnnnnnnnnnnnnnnnnnnnnnnnnnnnnnnnnnnnnnnnnnnnnnnnnnnnnnnnnnnnnnnnnnnnnnnnnnnnnnnnnnnnnnnnnnnnnnnnnnnnnnnnnnnnnnnnnnnnnnnnnnnnnnnnnnnnnnnnnnnnnnnnnnnnnnnnnnnnnnnnnnnnnnnnnnnnnnnnnnnnnnnnnnnnnnnnnnnnnnnnnnnnnnnnnnnnnnnnnnnnnnnnnnnnnnnnnnnnnnnnnnnnnnnnnnnnnnnnnnnnnnnnnnnnnnnnnnnnnnnnnnnnnnnnnnnnnnnnnnnnnnnnnnnnnnnnnnnnnnnnnnnnnnnnnnnnnnnnnnnnnnnnnnnnnnnnnnnnnnnnnnnnnnnnnnnnnnnnnnnnnnnnnnnnnnnnnnnnnnnnnnnnnnnnnnnnnnnnnnnnnnnnnnnnnnnnnnnnnnnnnnnnnnnnnnnnnnnnnnnnnnnnnnnnnnnnnnnnnnnnnnnnnnnnnnnnnnnnnnnnnnnnnnnnnnnnnnnnnnnnnnnnnnnnnnnnnnnnnnnnnnnnnnnnnnnnnnnnnnnnnnnnnnnnnnnnnnnnnnnnnnnnnnnnnnnnnnnnnnnnnnnnnnnnnnnnnnnnnnnnnnnnnnnnnnnnnnnnnnnnnnnnnnnnnnnnnnnnnnnnnnnnnnnnnnnnnnnnnnnnnnnnnnnnnnnnnnnnnnnnnnnnnnnnnnnnnnnnnnnnnnnnnnnnnnnnnnnnnnnnnnnnnnnnnnnnnnnnnnnnnnnnnnnnnnnnnnnnnnnnnnnnnnnnnnnnnnnnnnnnnnnnnnnnnnnnnnnnnnnnnnnnnnnnnnnnnnnnnnnnnnnnnnnnnnnnnnnnnnnnnnnnnnnnnnnnnnnnnnnnnnnnnnnnnnnnnnnnnnnnnnnnnnnnnnnnnnnnnnnnnnnnnnnnnnnnnnnnnnnnnnnnnnnnnnnnnnnnnnnnnnnnnnnnnnnnnnnnnnnnnnnnnnnnnnnnnnnnnnnnnnnnnnnnnnnnnnnnnnnnnnnnnnnnnnnnnnnnnnnnnnnnnnnnnnnnnnnnnnnnnnnnnnnnnnnnnnnnnnnnnnnnnnnnnnnnnnnnnnnnnnnnnnnnnnnnnnnnnnnnnnnnnnnnnnnnnnnnnnnnnnnnnnnnnnnnnnnnnnnnnnnnnnnnnnnnnnnnnnnnnnnnnnnnnnnnnnnnnnnnnnnnnnnnnnnnnnnnnnnnnnnnnnnnnnnnnnnnnnnnnnnnnnnnnnnnnnnnnnnnnnnnnnnnnnnnnnnnnnnnnnnnnnnnnnnnnnnnnnnnnnnnnnnnnnnnnnnnnnnnnnnnnnnnnnnnnnnnnnnnnnnnnnnnnnnnnnnnnnnnnnnnnnnnnnnnnnnnnnnnnnnnnnnnnnnnnnnnnnnnnnnnnnnnnnnnnnnnnnnnnnnnnnnnnnnnnnnnnnnnnnnnnnnnnnnnnnnnnnnnnnnnnnnnnnnnnnnnnnnnnnnnnnnnnnnnnnnnnnnnnnnnnnnnnnnnnnnnnnnnnnnnnnnnnnnnnnnnnnnnnnnnnnnnnnnnnnnnnnnnnnnnnnnnnnnnnnnnnnnnnnnnnnnnnnnnnnnnnnnnnnnnnnnnnnnnnnnnnnnnnnnnnnnnnnnnnnnnnnnnnnnnnnnnnnnnnnnnnnnnnnnnnnnnnnnnnnnnnnnnnnnnnnnnnnnnnnnnnnnnnnnnnnnnnnnnnnnnnnnnnnnnnnnnnnnnnnnnnnnnnnnnnnnnnnnnnnnnnnnnnnnnnnnnnnnnnnnnnnnnnnnnnnnnnnnnnnnnnnnnnnnnnnnnnnnnnnnnnnnnnnnnnnnnnnnnnnnnnnnnnnnnnnnnnnnnnnnnnnnnnnnnnnnnnnnnnnnnnnnnnnnnnnnnnnnnnnnnnnnnnnnnnnnnnnnnnnnnnnnnnnnnnnnnnnnnnnnnnnnnnnnnnnnnnnnnnnnnnnnnnnnnnnnnnnnnnnnnnnnnnnnnnnnnnnnnnnnnnnnnnnnnnnnnnnnnnnnnnnnnnnnnnnnnnnnnnnnnttcgcaccatgcatgtccgaatgacgtctccgatgcagcgggaaaataggctgtccacccccctttcaccgccatccgctgtcacctccacaccaatctgtcaagtcaatgcgcgtgcgacgagggtaaaaacgagcaaacacagatgaaaacatgtatttggaagaaataggtaagtgggagcgatgggacagagagagagagagagagagagagagagagagagagagagagatgtgcatgtacaacgttatatattcaagacttgttcgtaccatccatgcccgaacgacgtccccgatgcagcgggagaaggccacgacgattcgaagcaacgccaggatcgcacacgcgaacaggagcgttgaaagcaaagaagaggcggtgtctccggccccgcgaacacccccgcccgcggcatagtcgatggcgccgtcgagcagcccaaccgtgaacgttcgggtttcccactcctcggcggcgacaccttcctcctctacgccaagcttggagattcggggcccccattgctcgacggcgacaccttcctgctcgcacttctcgacggcgacacctgcctcctctacgtcatcggtcacctattgaagagttgtttgaaaaaaacgaagacaatgtgagggaaaatgcccgggctggctatcttccctaaaacaaagttgtacacgaatacacaacactctcttcatttcatttcgaggagacaggactcaccggaagcagttcctcgagtgatgcgagagcctcgaagtgcgcgtgtccgtcgaaaaagataggggcctccgcgttgtgcaccaggtcgttgaacgaaagaatctcgtccttgatgtcggagctgtgctcatcgaagacgtcgcggccgtgcgagttgctgacggtggcgtcgcgaatgcactgcagggcatccttgacatcacccgcgagctcgccattggtggcttcgatgatggcaggaatcggcactccgtcacggaccatcgatcgttggagcaaggagatggggccgcagctgttgctagagccactgttggacatggccacaaacatcttgccatccagagtgtaatatacacgttgcactctcttcgccgccgccgccgccgccgccgccgccgctgctgccgctgttgctgctgctgctgctgctgcccccgccggtgtctgcgcccgcgctcgtgtacgggaacgcctcttcgccttcgccctctctttcctctgcctgttcctcgtcttcgctgccatgcttcacctgacacatggacgtaacaaaagaggaggggttcagattacgacgacagatctgcaacagatcaatcttgctttggaaccatcctatcttcaggcataggagaaacagaaagcgatcaagtgtcgtggtctatcgcgcgccaaataaagattctggagggggttccgtgggtgcaagattcgggccggggtcccgtggatggaaatttcacagtggggcggtaggtggagtacaagtgtgggtgggggtgtcctatgtcatactccgtatatgattgtgcgtgggaacggagataacacacaacaaccctcttgcacaaaataagtcgcgcgacttatcgataagtcgcgcgacttcaaaatgacgtattggcccgaaaatgccacccagaggtcagaaatttaaaatctttatgcagtagatgttggcaaggggttttacttgagtttagtgtaggaatcgggcattttcatttatcttgtaggtaatgccgggactgtgagagggaatcgtccaaatcgatttataccatctgtacgatgatcctgtaccgtttgcgccgtggttcgtggtcgcgctggtcgaagaaaaagaagagggggatcagaggcagagagtctgttttgtcattgcgatgactttggtacacaacagcttacatctgtcggtagacaccagtacatttgctgtcttgcatcccgtctggagtacatattatatttcaagttcaccttcttctcgggagacggtgccattgctgtctaaaacgtcgacgtccgtctcctcatattcgctttcggtaaccgaatccgagacgccaggatccgtcttcgagtcttcgccgacggtaaccggatctgcgaacagcgatgaatttttttaggaaacgtcacatggtacacgaccggccctcttgtgtgtgctgaacagcagcgcctgcgtcaaagcaagcaccgatctggatgacgccagagccacccgaactgtattctttgtgcgggcgtcatctcaaatacaagatacgggcgtgcttcagggacccgggacgggcgacttacattatatgttcgtgtagtggattatgccatccttacgaaggctactgtggtagtactcatgtgtggttttgagctatgtaagtgcgcaagtgcttggccgtccatcggtcatttggatcttcggggtatctccggcagtagaatctttggccacgcgtcacgcgtcccgtgctgtctgtgttcccgagttccgaatgtgtcttgcgactgttgctcgcgtgcctcggcgtttgtgatacaccgtggtgcccactctcttccgttgcttgtgtctacgagggcgaccaatagtaaacgacttaaccatctcttcacattatcaaccgggacagccgtggttatccagcagcactcggctcggatcaaatcagcattataaagctaccgagccctcaccttccagtagttgaggatcttcatcatttgacgcgttggccgccatggatcttgatggaatgcggtggtctggagaaacgaggagtcagtgtaaggtgcaaggtggtgaaagcgtcgagatgagttaccagttagaggatcttcgtcgtttgacacgttggcccatgtagatcattgttgtaaacttaagcatgttggaaacttaaatgttttctatgataacatacaaaaatggctcgcccgatgtcacccgaaatatacgatgcattcagaaaatgcgaccaacaatggatacagagacggagaaaaatggatacatcttcgctgttcttcacgctcacgaggtgctgtgttcaaggtagaggtgttagccatgtccttaaaatggaagacgaggcttactcgtcgcaggcagtacactcggccaggaaaaagcttccgatcggggcctttaaagaggtgaatcggttcttacaccgaggaccacacgagccacgagtattcgccgtagatggatcgaaggtgcacgtgcacccctctttcatcaattctggttacaagacacgaacaaacgaccaaccagtatcgcgtcctgccaaaagacctctcgtcatgctctcttcgatggtagatgtcaaaaccaaagcgtgtatcgactttgagctcacgaagcatttcaatgaaagaagagcagcgacttcgatgctccgaagtgtacggaaaggtgacacgctgttgttcgatagaggatactattccaaagacttacttcgcagtgttcacgactctcatgcatttggcgtttggcggctcaagatagacgctttcaaaggcaccaggtctttctttaactcgtgtcgcacggaggccgcgtgccttattctcggtatcgaggcgcgtcttttgaaatattttatcgacggtaaaacatacgtttgcctcacgaacgacccgtcgctatctcgaagggatatcaagactatgtacgcctcgaggtggcgggtcgaagagtcgttcaaacgattaaaatcaaatctcaagctcgaaaaagctcacgcaaaaacaccggctttgtacatccaggaggtggaggccagagtgttgttagacacgatcactctgagaatgcaaagcagtacgaaggagtcgtcatatctctatactctcgacacgcatgtcacacacatccttcgtaacgtgaaaagagtctctagtcccacgagatacaagtttctacgagtagcagagctagagtcaaaaacgccgttcggtcggatgcactacagaccatcgggtgagaaacgtcttaccaatcatgtcctcggacgttacatgcggtggaataccgaaagcgaaagtttactcaaaagtttttgactgtgaaacctcgcatcccgtctcacaattcatcatcatctccatcatcctcttcatcatggtgagaccatcttcggatggaaactcgcacaagaagaagaaacacaagaagatacctccgagggcacctccaaagaacatcccgggctttctgcagacggtgaggggcctgtacccgaatcaatacctcacggcctcaggaaatctacccaaaagttgcaagggtacttactgctgccagctcttctcgagagtcaggttcggggagaaagtgtctcaaaaggagcggataagaaccgtgagcgtcggatttcgggcggcaacgaccgatgaggaacgcgacacatttcagtccaaggtcaatgatgcggtcgatcatctctcccgtgaacgagttctggcgtctctcttcgcaaactttgtgtttatggaacgtcttcaaaacgggtcagcccttccggagcccgacagggcttttttcaagtcgtgcttgtcatcatgcatcgaaagcagaggaggggggaatctcaacgccgacttcgaccgtttttccgagataacgggtttgacacgactcgtgcctcccaaaaaactgggccttgaccaacagcgagagcacgaggcacaacgcatggcaacggcaacgtcgacgcgtgcaacacaccacacggaaaagaggaggatttcgatcacgatgtgctttctgcgagggcggatatctcaaggagaccttgattacaagaagtacaagacgaagctctacaacctggcggagaagatcatcacaaacttcgacggcacacccgaagacacacaaaagcttcgaagaacgtcacgagcgttagacccttgacagacaccgacatcattatcgacttcgcacggagggagaaggacttctctgatcgagactgtggagacggcaaaatcgcaaaaacgatcaaacacctgtactggatgttcaacacctacgtcgccgagtcaagaagaatgtacgaggaggccgtgtcccgagcccacttgttcgctcccggtgaagacaaggcgtgcagaaagaagagggacgagttcgtgaagcacgagctgggcgagaagttcacctacgctccacccaaagacactgccgtgctacccatttgctcaacgggggcagtgttcatccacatcgacatgaagacgctcaagtcatgggggcttctgcactccaacgatgcttggtggtacaaggacgtcctccgacctttttccaaagaggcaaatatcaagtgtctcgtgaacaaggagaacgccaggtacgcgtcaagcgagcatggctacctctcgagtctgctaggaagtggtccggacaagtgcccctggatgattggcgagagtttcttgacggacggtgtacagatcaagcttctgcttgtgacactagaccacggaaggaaagctttttccgggtccagcgagctgaacgaggcggggtacaacaaactgccccgggctaacgctcagctagaaagcctcttgaaagagggaagaggggtgtacaacatatccagccttttggagtcgacaagcatcagggaagacgtcgtcgtgatgtccgcggacccgggccaggccaaggtgatcaacgtttcttcggctacggctagcacttgggcgaagcaagaccctggcgtcatcctcaaaacttcgacgtgtgtgttcggggacgattatcgtcgtgacactcttgcatcacgttcagacgagtacgagacgttcaggcgcaaggaccagccgtacggagtagccatcgatcgtcttagcaacgagaagaaaagaacttcctgcctcgcaacgttcatccagtactgcaaaagttggtgtgcaaatggtccggcgttattcctagagactttgcagacaggaaggaagttcatgaggtttgatcgtttcagagctacgcagaagacacttgccaagatagcggacaggtacatgggacacgtagaagacacttgcaggatcatgttgttcggtaaagcgtcttttcgtgcgcagaaagggagggcatctgccccaaggaaagctttgattagagagatggccagcagaggcgtggtgttgatggtgaaggagtacaatacttccaagaagtgcccggggtgtggagaggacacggtcgaggacaaagaacggagaatccggagttgcaaaaactttaagatcggatcaccggaagagtcctgtagacttcaccgcctgacaccagagtttgaaatggatcgcgacaacgtagggtcgactaacatcggtatgcgtggtttcggccaattgctcggtcaggtgtggttttaaggattttttccggattttcacttgcggatgatactttatagttggtttttctaaagttgacaatagtgatgtagatcaacggtggtggccagaagaggggtattgtagtgtcacaagcgtcgagatgagtagcgcagaacacgaggtcggtgcgttgatgcccatggttcattgctgcgcaattaaacatctgcacaagcacttaccactcgcgtcgacgcgctgaagctggtgctagttgcggtctcttgggtaggaggagagggggaggaatggagtggtgtggtggtcgaaagtgtgtgtggggaggcgggggtggatcatcggagttgcttcatatctgcactgtggccaacagccaatcagcgcatatcggaaaaagcaaataacgcattagactaaccgacatttatgttcttgattcgtgaacaatgtcccgttgcctgcacaaccacatcggaaaaagcaatcagtcgacaatgtttgcatcagccgatgcaaaggagcaacgcatactcagcacttgatttcacagatgaactgatttttcgcacgacgaacgaccgctgacgcaccgtgagccgctacagcgcagctgtggatcctgcacccgacagcagaaagcagtccccgcatgtacgtatatatatgtataccaaccttttcaacactccccttgtttttgtgctgttttcgatgctattccgtgtagacgtgcgtgcttttcaagtagtcttgcacagttcgagcacggttggcggtgtcgcaaaaacagttattcaggagggtttaccttgtcagtaacgcaaccaaccgcatgatgtatgccattacgtcgacagccaatgctaatggccatgaaccaaacgggtacacgtcttggaaaatgtacaaggagacatctgacgtacaggctgtcgtgaattaatttgagttggtgcccgtggtcgaaacaaatattcacaaaaaaaacgacagctgcgcaagcgtgtcaactgcttgtgaggaaaatctgggcatacccacgccgaagtctactttctctcgtacctaactcatcgccgaatgcatgcatactcacgaaacttcgcaggcgcatgcacacgacccgtacagcagtattgaaaaaaaaattaggtcaatccgatgatttggcgacattttattgcccttatttccaaaatatccgaagtggcaatcgaactcgggtcgggcatttctttgccgcgcagaacagcatcacacgccgccagcggcgctcacagcacgcaccgtggtcatacgaaccgaacgcaaaaaacccgaggtcaatcggagcacgtggtgtcgagaaaatgcccaaaaagctctctggctgaaaatgcctccatattgttttcgacagtcccgccacctgacagtcccgtgaccgtcgcgtgcctgcgtctgtgtcacacgctcgttctgcctcacacgacaacggaagcgagcggcgcagcagcgggatcggttaccagggtgcccgggggactctgtgcgacaggaaggtgtgtttgcgggtgtctgcgcgtgtagacgtgtgcacaggtagacgtgtgcgcgcgagatgtgtgtgctgcgcaccagctgccgcgccgcgcgcattctgggtttttggtcacgctcgtatgtgtcacacaactcgcccgcgcgctgcgtgaacgctggcaaatcgtccccgtaggtgtcccggtgccttcccgtgcaggaagttttattttagacgcgcctatcgtgcttgctgttttctcccccctgcgtgcgcacgtgacgtattgtacgtcgaataacacgggggtgtaaaattacaccccaccctcccctccccaaaaaaaacaaattatgtgggtttcacgcgtacccactgatcaaataatacggattggtgggtgtgggggtgttctgtctgtgtgtcggcagtaaatcacttgaaattagagacccccctggcgcgcgtaccacgtttaggcccgtatctcggccccaattatgggttgaccataaaaaaaatatacagcagtgcgcctgacctggcggaacaacacaccaaattacaagttaatcctcgaagatcctgaattttaaagctcgaaacaagctgtacagcagtgttcacgggtaaagtgtacgcataactctgcaccatttctagtgttcggccttgaaattttgcacgatggtgcccctgactcgtgcgcctgtgcacaaaaaatcagaaatgaaatcggagcatgtggaggcgctggcggccgatttcagtgctgtacagcagcagataacaccttacgctgccacagtcgcccctgtttttcttttttcgccttgatattttggcacgcttgccatctgttcacaggaccaccgttgtgtgtgtttatggtggaagatatgtacagctgcgcaagcgtgtcaaccgtttttataagggacataattattattaatttgcaaatcacactcacgtgtccatctacgaacttctgttattcattttcacacacatcacacacacgccgtctttctgaacttggtaaagcttgtctcgccttcatctttaaaaaacgtattctcggacctaaaccacttctcgccgtcccggagctgaccaactttgcgctttttcaccaaatcacgaaacatgagttttccatcccccccgtacttgtgtagagacgtgcgaatgtcatctatgaacaccatcctcgctgcgttaagtctcttgccgtatggatggttaaccttctccgacgctccccccgtgcaagccgagtcaactacgccacctagcacgacgttgcctattgtgtgggcagctgtgtttgcagaggcagctgcatagctactccttaacgtggcactcgacacctggagataggagctaaagtcgtcgatattactgctattgacttggcccgaattcagggcgtgtgtggcccaaaacgtacggcacacatggggagagaagttttcaattcctagccagtacgccccaatctttttgaaacgcgaccgagtgtcgtttggggtccacccttcccccttcgaattgacaaacagcctcctgttgccgtcgcgcatgtctacgtcgcagaagcggtggcccacacaggctacaaaatgtatcatcatgctttggtctgctgacatttcaaagtgactaacgggaagagccccactcgacgctgaggcggtagccgtcttccaagttcggtccttgaaagtgtgcctgaagtgggtgccgtccggaacaagagcgaactcgttcatcgttgcctcccgcatgacctgggacctctgaaaacagttgcttagcgcgagtaagacgcagagattggctacgtcggagtatagcacacccttattcttagcgtgctcgtacaggagctcggcctcctgattggaaattttaagaaacgcggaggggtgttccatgctaaccccgagttcctcaccgatcaggctcttcagggggtgccaaacgccgaaacagacgcctttgagcatgtcgtacatcatctccaccgccttggggtccgtgggatccaacatacgcccgccatccaccttcttgttgaggccggcggggtccaggttggtgctgacggtgtttgccattttgagccttttcctcgttttccaaagctggctgtcgaagtgcgccatgatctccgtcagtttcgccgacactagcgtcgaagagcgttgggccgccctgcggtgtgttgcaagcagccttcgccgcgacgcctgctctctctccatacgtcaaatgtatggaacccaacacggagccgtccatgcggccgacagagtccacgggtcgctgtcggattatgtccagactcccaaccacaggtccgcactcgatcccatactttgttttttcggtgtacgcccgaaacagtgtagctatcctctcggcgtcacccggggccgagcgggttgccttaaaaagaccgtacgcgtctcctacgtggaacccctcaatgtacttgtcttggcacgcccgctccaacattatgtaggctatgtttctgtgcggtacgtttatcgcacgaaacacgcccctccagtctgtctcccagccgcggatagcgccgtccaagtggcagggggggcaaagccacctctcctcgagcacgcgacgctccatcacgttcaggggcaagacgaccgattcgaaagctgtggggcgcccgatgatgacggtcgcgaaccacataagcccgattgcagaagaacatgacgcatacacactcgaagagctggtctcccctcgcttcccagatattgtggcaaaatctcgctgcaggaagaaccgctgcctcgaatcgtcgtcgtcgaaatccatgttcatgaactgtagtatactcttcgatttgtccacagagtacgggagcccgtgaaacaccgaactagccgagccgacccgttggagtcttgtgagggcttctcggcgctgctctagttgcgtcctgccctcgggcgtcgcgcggtcgatgtctctgtagtggtggctcgccttgttcagtttgattcgattttcgagtaggctcgggaagagctgggcgtagacgtgaaaaccgatcagggtcaggttgtctctcagagactcttgccacgcgagcttctcggtttgaggtaaccgatcgtatgaagtgccactaaaatttctggcgccgtagaactgccgcacctggccgtcggtgggttcaagaaatatttttctgggtgagacgggacacttgaagctgctggtggtctccttggtcgcgcgcttgacctcgtttgcgttgaaattcggttttttcagggtggtgatttgtttcttcaccttcgagatacttgaaactttaatgcgcttgggtgcggtagaaacaggagccatggttgaggtcgggggagtgagcttggatggggcatgaagccacacaaaagttgttcgttcagaatgcaggggggccacgcgtacgagaccgattttgcacgaggggtgtaggggttgttcaaggtgtgttcacagacagatttgttggttttaatttactctcgtgaagcgcactaccgacctcactttcctcgaatctgcgccaaaccaaaccatggctgagatgtggcacgaacacttcctgtcggacattatcggtgaaataacacttcacgaccggcgcacctgtttgttggatgaagggcagttcattgatcgcttgatccgatacaatgctgttgaagactacaacatatgcatcgaaaagcaggagattatttgggcggtgatagtatactatgaagcgtatgatgtcgctggttggatggatgccaagggatacactgcaacaggggacagttatgaagacgctgcgtcgtgtgtcccctacgacgcagccaggtgggaccagtggttgcgatcccgtttgatgctgcctccttcttcaagtcttccggaaaatcacgtagagaatgtcgcctgcgggatggtcagtatggggtacattaaaatccccctgaattcgggttatccgacctacgtctggttgctcgatggacacacgcaggacgatttttgcgagccgtacagttgcatacagttcttcactgagcatttccactcgggaaactacaccgaattgtggtcttttacgctgatagaagagtgtctcgagtttcatctagacgaatgtatgcgggctggtacagctatctacatggtccgggcgttatcggaacgttctcctgtggtcgcgcaacagtacattggaaaggttctcgctaagttgctggggaaaatatatcgaaagacagggccaggaagcagctggcggcaactaggattcagtgtgcgttccgggtgtatagtagcacgaagagagtgaatgtcctccggtcgcaccctgacaatctcttttccgagttcagtgtgttgaggaagaggaagctcgaaatagacacggtttggggccgtagtgcagtgaatcgggtggtgttcatacgcatacgcgtgcttatgtgctggggtgacgtttgctgggcggcggtaaacacgcatgcgcgtgcttatgcgctggggtgacgtttgctgggcggcggtaaacatgctggttcgactgaaatgaaaaaaaaaacactccatacattttcaaaaaaatggcgccgcactgggatcctagccaactgctcaggaaaaggggcaatgcatcgccacgagtacgagtttgctttcaatatttggccaacgtcaccactagacacagaagagtcatatcgggacatcacgggtttttttctcggccccgtctggtcaccgggtcgttgtttttgtgatcgcccgtagggcacaaatgtgtgcggtgtgaggaatacatgcctcgtgtccgagttcagcctgggcacactgctggcacgatgcgcgggggtcagcagcaacccgtacacacatcacacatacatacagagtacgcacgcacgcacgcacgcacgtgaaaaaaatcgtgttaatgaccgcggggacgccacaatacgttggaggtgctgatgaaggttatcaccagcagcaacacaccnaaaaaaaacgaggtcaaacggagcccgtagcggcgaggaaccgccgttttggtattccccccgcatctccgccgaaacggcaaatttgtttttccggaactggaagtttgcgctctgcacgaattttgcctctcacatcccacatcccacctccctctttctccccctcgacacagctcggacatcgtaatccacggcagcgtagcgtaacaggacttagctgagaggcatctggagagctgtgaggaagcgaggtatgcggtgttgtctctctttccgctctcgggcacgttctcagtttgtttcaaccatggcaggcggtggggcgtaccacgtcgcgcatttgagagcttagctggcgaccgcgcgctcatgaaacgcccccgcggcgcgcgagaccggtcgctttcgcctcctatgatgtgtatgtggctttgtgcgcgcctcctctttatgttttgagcggcgctgtgatgttgagttgatcgcttttgcctgactgtattttcgtagtctgctacgcaaaataacacccccaaatgttcgaatttggtttttttggcgccaaaacactcccacttcatgcaaatacagacttaggtacccgtacccaccccctacatcccaaataatgcatgtgggtggtttgggggtgcacgcagctttggatttaacctgagaccagcgctgacagcagactttcagctgtttacagcagtaccccggcccaaaagtctagacatttggctgcacagctccccgccaccttcgaatctgaggatgaaactttgcacgaggctccccctcgccgatgcgcattcgaagagttttttttatcgaaatcggagcacttctcgatttttagagcccccaacagtgtactctcagcagcactatgtacgcgtttcgctgcctcactacgcccaacacgtgtgtctcgcccccaaactcggtgggcatgcgtattggggccacagctgtccatggctgccccagtggtcaccatctgcgcgcacgtttgttgatgcatgtctacccacccccttgcccgcactgccaggcaccgcccagcactgccgtgtattacccgccattgctatcaccaccccctccctccccattcgcattttttgagctaacctgtcacactttcaacatctagtctagtgctggtgccacgatacaacagccttcattgcatccggccccctgacgacaccaccaggcaccgccccagcaccgccgtgtattacccgcgatcgcgtatcatgcccccccccccctctcttttcgcattttttaactcgcctacggcaggtgccgcacgagacgcaaacgagagaggcgaggagttcctgaatcgtgtttcatgcagcttttgcaggggcgttgaatcggaacgtgtatcggcaactttttcgtagttgatacgccccgtagtttttcttgtgcagtccaataggaaggttagagggggtgttgaatcggacagtgtatcggacaggttttggtgccgatacatcctatagggatcgaatcggcaacgaatcggcgcatagtgttttcaagacattgtatctgattcgagtccgattcgggaggtcgcaattccgtttatacagcaggtatctctaccagatctacgaaatggaggaagctggcgggtctcattctacgcaggcgtgcatggcacatgcgggga

SEQ ID NO: 272 - DNA, 21434 bp, unidentified
  variation 6176..6233: note = n is any nucleotide
  misc_feature 1..21434: note = Fanzor polypeptide
  variation 18409: note = n is any nucleotide
  source 1..21434: mol_type = other DNA
attcctgttgtctgtcgctcttgtttgcagccatgcgtctatggaactatttgtccccttttcgtgttgcattgctatcgcatgtgtcacgcctagtcgcgcgtccacttcagcccctctccccgccttcgtttggtggttggtggcctctctctttttgacaaaagagtccggtaccatccggctccctgaacgccacaatatgccatttcgtcgttgttttgtttctcatccctgtggcatccgcccacttctcattcttctgctgcccccatccccatgttctcaccaccccgttcctgctgttgatggtagatgacggcgctgggtttggcgaaaagggtgttgctaatgcgggtatcgttagcgccacgggaagagcagaggagctggtcgctcaggaggcttaagaaggatgccgagggcaacgtcaaaaaggcttcatgtagggagaagcacctggaggtgaaaagtaccgtcatacttgggaatatattgcattttaaagtggcgacaccagcagcgttttctgcacatctctctgtagcagaagccgcagcaacagacacaggcgcgtaaatggcaacaatcctttgagagagacgaactgaaaacactttggctaccccacaaccgcttacaccctccccgaaatccccacatctttctccctgcctgttcaagttgcgaccgagagcaaaggggggctctgtgggacatgaggaggagtaggccgacgccgccgtcgccgtcgccgactccttgagcatggattaagggcaaattccgcaggagcggcaccaggaacagcgacgtcagctacagcacctgctcgaagaggagcttcagctgaaactgtttgtgcggcaacacgaggggcagcggctccgggagcagttgattgtgtttgagcaactgcagcggcaccggcagacacaggtgcgtgaagggaaaacatcatttgagagagggagagttagagacgaaatgaaaacgcgtcggctgtacatttttgttgagtcgtcatccaaaacgagactccacgaagttccaacattatcacgtcatttctgaaaccgctatcgtcgcggggttctaattgttcccttcgtgatcgcccgagtcgatggcgtactttttgttttgagtcacggagacatttccgacgggaaaatagacagttttaatggaatgtaggtttagaagtcgggggacactgcaaatgtgccaaagaaaatggccgaaccgattacaaggactacgtgttcgttagcacgggatagtgtttggtcaaatcatctacattctgaaatatgtcctgctcaggttgagaccgagggcggtgggagctcggttgaattgaggaggaggccgccggcagagcctcagctgcagtcggagagggcgaggttggggccggtgatgcccaagcagcgccagcgtaccagagggcggacgaagggcagcatgcaggagaagctctcgcggaggcccagtcaggagcgtggcctacgggagggcttgtaaaggtgggtttcgtgtgtactgaagtagccaggaggcatgattgtgtatcctgaagtagtccggcatgcttcacgcgcccggatacacggccaaaaactcgtggaggtatgttgtgtatcctgacgaaacctggcctctctccccgtggccggatacaaggcaaaagagtcgtgatgggaagttttgtggatcctgaaacaatctggcattgctccccgctcccggatacccgatatgaagcgcgcagttcttggtgagatgtgtttttgcacacaaccgttttgaagattaccccgcttccttccccggcaccgccccccccaacgctgccgtctgcagatccatagcccgttcgtgcggaggccgaggcagaagggcgctcggcaacaagagcgagagtagcatgatgtattggagactgcggcacttgcatgctgagcttgtgaggaggaacggatacacggcgaaccaaatgggggactttcactggacgccatggaagacgccgcaggtagcacgagtagagcggagacaattcgcgtgctatccgtcggcacccgctttggtagttgtggtgttttgtgtgatttgtgtgttttgttttcttgcagtaaaacgcaaggtagaccacatcgaccatcgacgggcggataccgcaagaacgattgtagctgttgatgttggcgcctgcgttgatgagcaccaccatgcctgttcagaatcctttgctcgcggccacattgagcggtgtaccggacacacctcccactttgaagaagttgataagagcttcgatgtccgcgccagccttgaccaacgccttggttacagcaaggtgcttaccacagactaaaggtgtagagtggtatgcccgtgctcggtcttggtcgaaatatcagcaccccattgcagaagaactcgtatcaaatgcaagtaacccctgtacgcggcgaacatgagtggggtccagtcattgtcaccacgtgcgcggctaatactggctgaccctgtcgagaggagattaatcgtaagctcgacggaaccactggatgccgcatggtgtagcttgctcagagcagatggtatgttgaggatgtgtgttcgaaaacacgctcgtccaaacaaagtttatggtcaacaagtgtttgatcgaggccgttatctcgaaaagccaccaaatgcttttagcctggtacaaaatgagagtgggaatggcacggtatggtaaagcgtcacacaactcagctgaagaatttcctgagcgagaccgcgagcccgctacataatggcgccggtggtagtagaagtctgtcccgtgaccgacaggaacagtatgtcgttccaggcgttttgcgatgattgacgcattgtgagtttgtgtctatgtgcgagcggggttttgtctaagtgacaatgagtctcttttgtggagagcggcttgttcaagcacacaggtcgattttagaagttattcaaatcacatccatccggcacgcagtacccgctacaccgctagcctgactcttgtcctcggtgggggccacgcgccttgaaacatccccggcctttcaccgctgccgtcggagcgtgatgaatcgccgacagcgggtgctgaaagacgccgcaaactaggccgcctttcaaaggcatatttcaccgttcacgacatgaaacacccccatcttcttcgtcccgctcgactcacagcgatggaacattacttgcactcgtcaggacacgaaccaacggatgcagggctggaatcgttccccgagctctttgcagctgttggaggtgatcgtaatcacactaagggggaactcttgtgctgatgtggacgtcaaatgatgcgctgggcgcggcgttggttacggtgggtgcggccacgatgtatttcatcaaacgatttggggaagatggctagcgatggccgcgttgcaaagttgttaccggataatggaggcaattgttgcgcgcgatttccccgaccagaagtttattaacaggagcttccgctcggcggccctgcagttttctggcgacaggcaggtcccggacaggctcgatccgtaaagactggttgatgcggtgatcgcaacccgtacgtgatgtctgctgtagtccatcttggcgcggatcgggccatgatggttcgggactggcagcgggggctgagaaacacatcccttcgtcggttggcagagagtcagttcgtggatgtggtccaggcgttggtactgaatttgtcggcaaaggagatggggacgacggactaatttggctgtgctcctaccgaacatgtggcctcggaggcatacctttggcaacgtttctgattggtagggaggggtgtatcgtgtcccccctcgaccgcagcggcaatcaagtatcgcagacgttgtggggaatgaagcagcctttccgcgatttcagtcgtagcgcgtgatagggagaattcggccaagcgtcggggggttcttctttggcgcaagcgtggtgtcaatggtgatgctggtgaagtccctccgccaggaatagtcggagtgttgcaagaatctggtaggatttgttaaaacgaaagtgtttcaattgactcaggagcagccgctgtctgtccaagtgagacaattcttcagaccgccgccagttgcgttcactgagggtctagaccgcactctgcgtcatgttgacgagggaaagggactactgaacattctcgcgataatctgaagacatgcgccgcaggaggaatgtgatgagaagggggaaatccccggtgtttttgtgtcccggccgatcgttgtacagagatcatacacagaaatgcgtagtacaagacacctaaaacgaacaggtgacgccagacgccaatagatgggacgtgaaacacacacaccgcgttgcaattgctattgctgtttccgtctgacaaaacacaactctgcaggctaaaaaaacggtcgatgaaacttttttgtgggatgacaaaacactcggacagcgaccatcgaacaattgtcctttcccgtcaaaatggtccggagaaccacgagaaagtggacgcacacggagcacattgcttttctctgcggcgtgcagatgtgggagaggaactgggccgtggcctcgctagtgccggccgacccgctttgtggtccaaacaagaacgtcctcaaaatcgacaaaggagagcgattgacggatagattttcgaggagaattgacatttacaccgtggaccgcacgaaccacacgtttttgccgattacacctccctcaatcatgcgtttacgaaggaaatacgacgaacccctgcttgtcctccaagacactcaagcatcctagcgctcagaaatttaccttttggtttcattaccacgccccgtctgtatctacgttcgctttctcatgcccttggtcaccaacttgacgggtttgaagcggtagatctcgcgtgaatcgctgactatgaagcctaagcccttcttgttcttgagcagcgtctccactttgcggcaggctttcgacgcggctatgacattaaaagaaagttgcgtctttccctccttgagccatcctaaaacccactgcccgttgtacgcggaatcagagctgtccttaactcttgtgtagaatatatcaggaaactcccccttctcgtttggcttcacaagattgtacgggaatttgacgccctcttggaaaaacttcttctggaaggttctaaacctcgtctgcaatacagaaagcgacatgggggccaaaacatgcggttgttggtatgcgattgttggtaaatgtcacaagttgacaaatggatgaacgggtgcggaagcgacagatcggaccgagccgctctctacatacgattggaagctcgcgtttctgaccgaaattcacgctaacatgttttctgaaatgcgtaagctgtcttctcaccacagtttcgccttggaagtggtgaaccatctcctcccaaacttcatccgagtaacacgtcttgctcttatccttccgcgcattgagaagagcaggaagaaatcctgcgtgacagcgaacagggagaaacgcaacacatgtatgaatgaaatgacgtttggtgctccgatataaaaaccttccattcttactttggccactttcctcctcttcctcgtcgcctgcgttgcctgtgaaacgggcggcaacgagattagacaaccaatacatcgccaagtgagaaaaaaaacaagagaaggcgcaacgtgcgtccaaaaaaaaaactttcatgcgtaccgtggccgctccccccgccttcttcgtcctcgtcgccctcctcctcttgatcgtctaccgcgttgcctgtgcaaagggcaagacaaccaactattattcgacaaccaatacatcgccaaaagagaaagttatgtcaaggaggggcgccaggtgcatccaagaaaaaattagtccatgcttaccgtggccgcattcctcccctgcgtccgcgtcggcttgctcctcttcttcatcacctgcgatggctgtgacaacggtggcaacgtggtcacgcaaccaacattttgccaaatgaggaagcatttcaagtcgcttccccccgcttctacgtccattgtgccctcctgcaatgtagagaactacccccccccccnnnnnnnnnnnnnnnnnnnnnnnnnnnnnnnnnnnnnnnnnnnnnnnnnnnnnnnnnnctgcaatgtagagaactcccccccccccctcgccaccatcacgcgtgtccccggtgccttctggagacgaagagctggcaggaacaatgcgtgtgtcttcgtcggtgcatggcacaaggaagggcggcaccgtggttggacaaccaacacatcgccaaatgagaaaaagtgctaagctctcaccggtcttccttgacacacgcctagcggtagtcagacgagtagcaccaacagcagtagcagcagcagcacgctttggcctctttgacggccctgttacacgaaacaacaaatcgaacaacacaggaacaaacactcagaagatgccaagccgtcttcgtttcttccccggtggccatcgcgtccttctttcaagttcccgagcgcgtaccgcactcacctacgtccccatccgctcctcctgtcatcttcccctgcaccctctttcgcgagcattccggtagtgaaggggtttcacctgcgtattgatgtgcaaacacctcgccaaatgagaagatatttcgcgtattgctgcgatttgttggtgagcaggtgaatcgcgccatgtgagacaacaaatccacacataccgaactttcgtgccttaccgtggccatttcccttgtctccagcgttacgcgagcaagcaactataggggtcaatgctgtcgtcgaccggccttgccacagcaatgatggagttgtcaccaggggctgaggctagcatggcgttggtcgccgaggcgcgccgctggatgtccttgatgcgatcggcgaattcgatcccgtcgcgcccggagaattggttgacggactgcagttggtccctgcaggttctgcaaatgtcgatctcgttcagtgcaatggtttttttggccatgaccgaaacgaaaaagcccttttctcttcgtccgatgcgtactcaaaccaaaagggttcttccgaccgttgctttttggcgggtccttggtccaaaagaaagccctggtacgccctgccttcctccgtgctctgtaagcgatcgcagcgctgttcgatctcatcgcaaagacttgtgtcaccaccgagcaccctggtgatggtttgggctgattgacgcctgaattccttcgcagcgttcgaaggcagtagccaaatgatttctacgagagttgaagcgtcgcaaataggggtgacagggcccttgtcgttgatcctgacgtattcaatgcgttcagaaagtggaatcgtactctgtgcattttgtccaggcctttccatgccatcccttttttccttttcaaggacacgtgtgagcatttttgcagcatattcggcagacgcctcgggacacagcatgcggttgacatcgataatggaccctttcccagtgttctcgtcgatgcgcacggaaccatggattcccacggtcctcagcgccttttccaacctagcagttttcgtttcagcgtgagcgacatggtccgataactgatgttgcgcctgtgcacgcagacactgacaaacgcgctcgacgtggtttctgagcgattgtttaaatgcctctcccgacgtgtcccgccacgtgtcccaacctttcccagatatgttgttcaatatatagtcacatacttcgctcggaacgacagatgtgattctgccgtgtacctgacgcttcgaaatttttggaccactgaaatcattgttgtaaagttaagcatgttgacaacttaaatgttttttacaataagaaaaaaatgactcgcccgatatctcctgaaatatacgatgcattcaaaaagtgcgacgcgcaatggatgcagaggcggcgaaaactggacacatcttcagtgttctacacgatcacaaagtgctgtactcgagagagaggagtttctcatgttttgaaaatggaagccgaagaatattcgtcgcaggcggtacacttggccagaaagaagcttccgatcggggctttcaaagaggtgaaccgttttttgcatcgagggccacatgaaccacgcatatttgccattgatggttcgaaggtgcatgtacacccgtctttcatcaaggctggttacaaaacacgaacaaacgacaagccagtgccgcgtcctgctaaaagacctctggtcatgctttcgtcgatggtcgatgtgagaacgaaatcatgtatagactttgagcttacgaaacacttcgacgaacgaagggcagctgtttcgatgctccgtagtgtgcggaaaagtgacacgctgttgtttgacaggggatattactccaaagacctactccgcagtgtccatgactccggtgcatttggcgtctggcgactcaggataatgcgttcaagggtactaggtctttctttaactcgcaccacacggaggtagcgtgtctcattcttggtgttagggtgcgcctcttgaaatatttcatcaaaggtaagacgtatgtctgcctgacgaacgatccgtccttatctcgacgagacatcaagactatgtacgcatggagatggagagtggaggaatccttcaagcgattgaaatcaaatctcaagctcgagaaagctcacgcaaaaacacccgctctttatatccaggaggtggaagccagggtgttgttagacacgatcactctgagaatgcaaagcagtacgaaggagtcgtcatatctgtatacccttgatacacacgtcacacacattctccgtaacgttaaaagagtctccggtcacacgagctacaggtttgtagcagagctacagtcaaaaaggccgtttggtcggattcattgcagaccaccggatgacaaacgtcacaccaatcacgccctcggacgttacacgcggtggaataccggaagcgaaagtttactcaaaagttcttgactacaaaacctcgcaccccgtctcacacttcatcatcatcaccatcatccttttcgtcatggtgagaccgtcttcggatggaaactcgcacaagaagaagaaacacaagaagatacatccgagagctcctccaaaggacgtcccgggatttctgcggacggtggggagtctctaccccaagggatacctcaccgagtcaggaaatctaccaaagaaatacaagggtacttattgttgccagctcttctccagagtcaagttcgggaaagaagtgtctcaaaagacaaggctgagaaccgtgagcgtcggatttcgggcagcaacgaccgatgagaaacgcgacacttttcagtccaagatcgatgaggcggtgtatcacctctctcgcgaacgagttctggcgtctctcttcgcgaactttgtgttcttggaacgtcttcaaaacggatcagcccttccagagcccgacagtgccttttacaggtcatgcttgtcatcatgcatcgaaagcagcggaggagggagtcgcaacgacgacttcgatcgtttttccgacacaacgggactgacaaggctcgtgcctcccagaaaactgaaccttaaccaacagcgagagcacgaggcacaacgcatggcaacggcaacgtcgacgcgtgcaacacaccacgcggaaaagaggagaatttcgatcacgaggtggtttctgtgcttgcggatatccaggggcgacctcgtgtacaagaagtatgctaccaagctatacgatctagcgaagaaaatcatcacggagttcgacggcacacccgagtacgcagaagacctccgacaaaaggcacaatcaatagaccctggcacggacatcgacaccatcctcgacttcgctcggtaagaaaaggagttctccgatcgtcaggatgggaagtgcgcgtcgacgatcaaacacctgtactggatgttcaacacgtacgtcgccgactccagacgcatgtacgaggagaccgtatcccgagctcattcgtatttccccggtgaagacaaggagtgcaggaacaagaggtacgaattcgtgaagaacgagctcggagaagagttcacctacgctccccccaaagacaccgccgttctacccatttgctcaacgggttcggtgttcatctacatcgacatgaagacgcttaagtcatgggggcttctgcactccaacgatgcttggtggtacaaggacgtcctccgaccgttctccaaagaggccaatatcaagtgtctcgcgaacaaagagaactccaggtacgcgtcaagcgagcatggatacctctcgagtttgctaggaagtggtccggacaagtgcccctggatgattggtgagagttttttgacggacggtgtgcagatcaagcttctgcttgtgacactggaacatggaagaaaagctttccccgggtccacccagctgaacgaggcggggtacaacaaacttccccgggctgacgtgcaactagaaagtctgctgagagagggaagaggagtgtacaatatatccagcctcttggattctccaagcatcagggaagacgttgtcgtgatgtccgcggacccgggacaggcgaaggtgatcaacgtttcttcggccacggccagaacttgggcgaggcaggaccctggtgttattcttaacagttcgacgtgtgtgttcggggatgactatcgtcgcgatactcttgcctcacgttcagacaagtacgagactttcaggcgcaaggaccagccttacggagtggctatcgatcgtctacgcaacgagaagaaaagaacttcctgcctcgcgacgttcatccggtactgtaaaagttggtgtgcaaacggtgcggcactgttgcttgagacgcttcaggaagcaaggaagttcttgcgttttgatcgattcagagctacgcagaagacactcgccaagatagcggacaagtacatgggacatgtaggagacccctgcagggtcatgttgttcggtaaagcgtcttttcgtgcgcagaaagggagggcatccgccccaaggaaagctttgatcagagagatggccagcaggggagtagtgttgatggtggaagagtacaacacttccaagaagtgcccggggtgtggggaggacacggtcgaggacaaagaacggagaatccggagttgcaaaaactttaagatcggatcaccggaagagtcctgtagacttcaccccctgacaccagagtttgaaatggatcgcgacgacgtagggtcgactaacatcggtatgcgtggtttcggcaaattgctgggtcaggagtggttttaaggatttttttcggattttcacttgcggatgatactttatagttggttttggttttcctaaagttgacaatagtgactgaaatcacggagaattccctccaccttcctcagaatatctttttgatttatcgaaggcctagccgtttttatcagagaagcgactccgacatgacctgtggaagcatccacgaccaggttgtccatgatttacgtttgagagatgaaagacattttttattggcagttttgtacgcgccagtgttgaaggcaaacgagtctgtcgcccccagcaacgcgtgtggcactggtatcggagcgtgctacaaacgtaaacccggtcgcggaatttaaatacccctccacattcccgtggcccgtacctcatcgagaaagctcgtggtaccatcttgctccaaggccgatggcccgtcgctactgctctgccgccgaaccccgcccaaatggcgcctattgtggaaaaatgctgccctggcgcccccgcttggcaacccgacaaaaaatggaacgattgccctcctgctagcacctggctactgttctgccacctagcgcacgagggcacaattgcctacaatttcgacgacccgaccatctgtgtcagggtactacccaaggccggcggggcgcacatataccaatgccacagaaactgccataaatcggcaagaacgatgttaacttacggacagaagcggtcaagaatgcgtttactccaaccgcgtccccaactcgcaactgggcgctacatcaccggcgtctcgatcgcttacttgctcttttcggcggttgtggtcgctttgcccccttcggagggtcagcatattcgatggtaacctccgctcctacctcgatgtctgcacacgctacgatagagcattcataccaccatccatactccacaccccccgccctctcgtaccaccatggcttcattcgtcctccacccccatgtattaccaatttagcattcggcgcgaacgagtggttgagtagtcgcaacaagctgatttccatgaacgctcgacaggcggggatcgtgccgcgcatggttttgctcggatcgatcacgagcgctcctagaccatccgcatgcatgatgtaacccatgcacgtatatccaccacctttcttttcgtaccccgcgggcacatctacatccgggagaactaccgtcaagagagtatcgccttcggcaaaagcgaccttggtgccgagacccttgcagtggattaggctattgatttccttgagcgcgtcgtgcgaaaatagatctttttccatcacgtcgtgtacctgattgatttgcaaagggaatcagcggcgtttgtttggatgacgcgcatcgtatgagggcactgctttctgcaacaacatgtgaagcaccgactacatgcgcttaccgttaaagcgggccgctgtaccggcggttgctgctgtgtgctgcgccgcaggtggtcacgtgcgggtgggctagccttcttcagttggtcgcgtagtttgtctctgtcttgctgtactctcgcgagtcgccgctccaacttttctgtgtctgccttcgcttgtgccgctgcattgatttccgcctgctgctctcgtctcttggcctcgagctgcatattcccgggacacacaaggtcaagtcaaaacagcgcgtgtgtgcgtgttgactaccgtctatatagaaatgaaaatgccatgtgtgacaacaccaactcacagttgcaagcttgcgtcgcagctcgtcgttctcctctttcgccttgtctgctgcctctctctccctttcacgcacaagcttctccgattcttcctttcttttcttctctgcttgtgcaaccctctctgcatcctgtgagaaatgcgaaaactacagcatgcggtagcggtcaaagggtagacgcgcgaatgggcagctgtcgtggtttttttgttgcgcagaggagtgcatctgttttcgatttaaaacagaatttacagcgcctcagctactgctgtacatacaaatcgggaacatgtggatcccacactccccacctcgcgtccctgaacgcttgctgcttcggctgctgatacgaggacacttagcctgctgatcccttgctccgctccggtcgctggctcaacatcgctcgccgccgccgatcctgcaccgggcgatgcgctggactccatagcggtcacccccgctgcaacgaatgctgctgctgcgacgtctactgctgttgcaggtgctcgtggctgagggacgactggtcgctctgctgtacctttagatggaccagccattccgttcttcttgtgctggccacagtgagtccgagcgaggccaggaaagccatagctggctgtctttctacactcttcgcactttttgagcaaattggtcataccctccgcgacgtggtcggcacagcacctcttcttgccatccgccttgaaaccatacgaagggtacttgttgcaacccgtgtgactacacttttgggaatgtatgaggtgaaacaccccttccttcgcctcatccttgcactgcttgcatttcccgtcgattctaccctgtgtgtctgcaatgaaagcgccgttgccatctgaagggaacacgtcaaagttgaaaaaaggggcaagcaggagagatgccacaccctttttcagatgttttgtacttctgctgtcgtggaaacaaaaatgcgagactcgcacgcgtcactgtgttgtagtacagctgacgtccagccagagctctagagcgccaatagcataccgccttgaagcttgacgtgtcgagggctccatctacagtcttctccagatgcggcccaacagcacaaacagtacacacagcagcgtgctctcggtcggagctcggttttggaaacgatctctcacctttccttgcatacacccctctccctcgtccgcaactacattttcgtggcatgttgtgagctgacctcgggtcgactgtgctcaggttccctccctctctcctccgccctactgctgtctactattggccccggggcacgctttttgtactattggcccatatgcggggatggggtgtactattggccctggggcacagtgataagtgtactattggcccgcgttttttcggacggaagatcaagcagcgcacctcgagttgcgcacaagagcagaggaaacacacacaacgccgccgtgcctctgctgctgctccgctgctgatctgttgctctgctgctctgctgccctgctccgctgctctgctgctctgctgctccgctgctgctctgctgctccgctgctgctctgctgctctgctgccctgctgctcggctgcccttctgccctgctgctgccgaagcgctgccgccgctgctgctactctactggtgtgctgctgccgaagcgctgccgccgctgctgctcctctactggtgtgttggtgtactggtgtgctggtgtactggtgtgctggcgtactgatgtgctgctgctgctgccgctgctgtgctgctgtgctgccaagcgctgccgcgttgcaggtgagctcgatgttgcacgagagagagccgtgatgcgcgtgaatgaagcaaggagtaaaaagggtgttgtctacagcgccgtttcgtctccgtgaaggaaaggagaagctgggccacaatacggtttgcttttcggcgcaattgaccagcaccggtaaggcacgagccgagctttcagccgttgtgctgtgcgagcgtcaaggttttgagtgtgtttgatttaaaaaactgcttcagcaacaaagacagccggtgcacactgctgcaacaagatgctagagttcaaactcggcatcaagagtaccatcgtctaccagccgcgccacacacttctgtcgcattcccttgtcgtgaggtacttccgtaccgatgctcgagtgtgccaaaaaagaatggccggccagtggacgaacgagtcaccgccgctcggcggccaagccctgctgatttgcaacacggtcacaattaacatcgcaacatcaatccagagcgccaaatcctctgcctgtaaaactatcgaaacgcttcacgttgtcatggcccatccgccgaagcctcgcccaccggcaccgccacgcacgtaatcgaaccactgacagccgtagtttaacgcctctggacagtaataaattaacccgtaagaaatgaacaaaaccatccaaaattggtaggtctcgttgaatccggagggtctatattgtcgaaagtaactacttccggacagttattgccgtacccaaatacgacactcatcaacaaacaacgattttctaaagcttaaacaaggttaggggttctcgcgaaaactaatcggggctgactttctttcgaaatctgccgctcctctcgctgactgtcgatattagtcgctatcatgctattgaggagagtacctccattttatgtacacttttctatcgatgtagcctgtgatgatcaaacttccatttaacgactgatgtcgatcctcgtggaaacccctgtggaggcccttaaagagcgattcatggggatcgttggttgcgcgatgtagagctcgttgtagttttttcgtagcgtgttgaatttgacgaccctgtacagcagtgttgtgatgtcggccttcttcttcctcttcttttttttcctcgtctttgattttgtggcggtggttgccatggtgaaggtgaattgtgaccgatgtggacgatcaacacactccagtgtttaccgataaaattgaaatcaaacgtcttttttgcaacattttatttctcgccaatcgaacgcacttctagaaaaagctcttgattgccgaatttagtacacttgtcattcactagttgacaacacccctgatcctttccgcgaaccaatctttgtcgagttcgtcgaaacaccccaccgactccaactattctttacatgatgtcaaggtgtcaatctctgactgaaaattgatacccgctccacccctttgaccactcgtctcaataggttccggacgtttcgcaggagctcgcggctgcacaggtgactggcactcagccagacgaggcagtggcggcatctgcatctgcgtaggccgtggtcgagacggtgacgcctgtgcaagagacggagcatgagcagcctgttccggccagagaggccttggtgaaggtgacggggcggtgcaggcagctggagaggccgatgcaggcgaagtgacgtcagtgtctagcgcgttggctgtggtagcacaagagccgggcgaagcacagcgactacagaaaagccgcggctcgcacgacatgctcgggcatgcaccagcagcaacggcactccagtgtttaccgataaaattgaaatcaaacgtcttttttctagaacattttaggatagtactgtctactatgcttttttgcaacattttatttctcgccaatcgaacgcacttctagaaaaagctcttgattgccgaattaagtacatttttcattcactagtcgacaacaccatattttttggagctaaatttacgcagtacgttttacacgaaacatttggatatgtgaggtgacgacccgacgatctgtgtcagagtgagggagcgcaacgaagccggtggcccaaaaacgcatccgccgacgccatcaggcaaatagctaaaacagatggcggccgagaagcaagagtccgagacactcacgcgacagcacaacgacaacacgctgtggcgcaacggcgtgctgatgaaaaagttttttttaaaggcgggcgacggcatcgtccgtagctacgggtggaagaaggcgcccgaagagcaataactactcccaagccccgccaggcccaagcgcaccaaggttgcgtagctcatcccccaagcccccatcacccccactcgttccagcgtggcggcgcaccccgaaaccagtgtgtccgacctggcacagctgaaacatgtggccaagcataccctccccgcagcctaccccgccccgccgatttcaaaaacgacacccgccccggttgaaaacaatgctagaatcgtgtgcagtcgttaccccaccccctccaccccctgttccccccgtgcacagtcgcctaaaagtgcgcgacatggtccgatgactggttgcgcctgtgcacgccgtcgctactgctctgccgcctagcgcctccccccagcccgctggaccccgccccaatggcgcctattgtggaaaaatgctgccctggcgcccccgcttggcaacccgacaaaagaatggaaagattcctctacccactactgctctgccatctagcgcccgcccaccccgctcatcagatgccagcaaccatggctagtttcggttcgcagtctatcatttcatcagggcaatcgtaaccccatgcacggtacttgcaataaatctgaaaccgggcgtcctccttgtccgcgtcgacggcacggaggtccgcttcaacctctctatgtgtcttttccggagtcttaggaagtttccagccacttggcttcgtcagtgtcatcgtcttgatctttcccacgctttcgacactaacacttcgaatattagcctgctccgaccgaatgtggatccatttgcgatcccatgggttgagatccggcagggacaccgaactttcagacgatgaaatgaagtccttaaaaaccctgtcgagaacctccgtaggttgagaaggttgtggttttttatatcctccccgcttgcgcttggacttgaccgatgtcgtcatctcgtgtgcgatgtggtcaggtcgcctggcccctctgatccattcttcataatcgtaccagtcgatgagccagaagtcaaatagttcaacatcctcgtctttcattgttgaccagcgaagtccgtctgcgtagctcgaaagaaggttccactgatgttgcgtcttgaatacggcgtcgaagcgagagtcccatgtgtctncttggacttgaccgatgtcgtcatctcgtgtgcgatgtggtcaggtcgcctggcccctctgatccattcttcataatcgtaccagtcgatgagccagaagtcaaatagttcaacatcctcgtctttcattgttgaccagcgaagtccgtctgcgtagctcgaaagaaggttccactgatgttgcgtcttgaatacggcgtcgaagcgagagtcccatgtgtcttgcgaaaaatacttcgcatcaggaaataacattctcataggtacgagatcgttgtggaggttttccagcgcgtttgttgcctcttcttcagttggtttccagttggtgatttgtgatgccatgttttttgtaggaagtgtgagacggaatgcgcgttttaaagttcataacttttgagtaaactttcgtttgctgacgtcggggctcgactcatcctcgacactgagagagatccgatgtgacgatgagatgctccagctcggatgcaaatgcgagcgtctttcggatcacatctttcgcgctcccctttttcgatgttgtgtcaacgcggatagtagaactatccatgctttcgatgaggtccatgtttgtttgtttagttgaactttgagaacatatttttgggagctaaatttacgcagtacgttttacacgaaacatttggatatgtgccgagaaactggcagaggaaaagtgtccaaagtgtaatagagtaggaacgctttgtgggtgggattagtgggttacatttggttgccaccgccccgaccatcccggctatcgctagaataaacctgtctttacgaagttgactttgaattgtttgtaccccatttttgtccggatacgtttgaatcttccgccaataaccaattccaaactattgatttcatctagcaactcgttagatacgtcttttttgctctcaaggtgccggcgagccagcattctcccgaccaagcgtattactacaaaaagaacgatcaaaacgccgaagacaatgccagattttttcaacatgatgctgtcccgtatttataaataaaaacattttattttaatatatccagtcattttgtgacctcggcacccgctgatcaacccgctgccaactggtgcactcctcctactgtgcccacccgccattttgtgacctcggcacggttgaaaacaatgctagaatcgtgtgcagtcgttaccccaccccctccaccccctgttccccccgtgcacagtcgcctaaaagtgcgcgacatggtccgatgactggtgctgcgcctgtgcacgccgtcgctactgctctgccgcctagcgcctccccctctgccccgtctgggctgttcgcgaggcctctttttgcgacgagcttgtgtgccacacacatgagaaatcaagtcaccgatgcctctgacagtctactctagggcagcatccgccacacatgttgtatttgcacttcatcgcagacagggagccacaaccacatgtccttcccgtgccctgagaggacggcgtactattcccgaccatactcctcttcagcgctctcttttcgcgtgagaccagaatgctacgagcactgtttacatcataaccgcggcggagcaagaccaccgcttgttctccgtgcttacgaacgagtgcatacgggccgctcaattctcttccccgtttaagaactacactgtgcgcctcttcggacaggtctgcgttggcgcggatgatggttgccgcggcaacgctctcctccgccgacagcttggacacgaacttcttggcgaatttcgggaccgtgcgcatccacttgaggtaggtcgtgtcaaccatgccctcgatcgacgccctccggtcctcgtttaaaaccttctgccttttctgacgcgtaatcctctgctcctctgccgcgcgctcacgcttctcttgttttgctgtttcttccgcacgcactctctccagacaggcgttcaccttgtctccatgagccttgaagaaaaactcgagagtcatgctctcggggatgacgccagggatggccttggtgatgatggtgttgtattcgaactggccgtagtacgagctgtagccgcccctgacgttgaccgggatggtcgaccacacgaggcgcattagcccggtcagtattccgccgttgatgtagcgcacgttggtctctaggcccttggtacacgctggatgcgccgggattccccacggcgctcgaattccgcccatgtagctcttgtggcagacgagacacctgcgctccacgatggctttcaggtgcccgagtcccggattctcggcgagattgcacagagtttctttctggtatttggtcatgttgtgctgcgcggcattcaaggcgagcgggatgttgccgtacacgtcgtctttcgtgaacctatcggtccttgcgaacgctgccacaaatttcgtatcgggtaggaaggcgaccaccaggtcgatgctgaattcggcgagcatatgtagtgattgtaagagtgcttatgccttgccactattttaatgtttacagttaacaaagtaaggcaccttcgccaaattaattgcccaccagctacccctggtgcgtagaaatcaaccgccccatccccaaccaccgttactacgctgagaccacacgagtaaaaatattgccatggcacaagatggagaacctactcgaggtttgcggggagatgggccttgaggtagactacctcagtctgacagaacgcggggcgttcgcctttccgatgaaggaaaccactagggcgttcaacatgagcgaagataaccctcaaaccgtcacaactgtgcgcgataaaaacgatattgccaacaggaagatgtctgccacactgtacaaccggcggctaagtggggagagcgtgctcagtgcccctgaacaagactgcgagggagatattggtttaattttttgcaacggcgtcgtgcattcgtgggatcatcccaaatcggtctcagagtggagaaaatttttcaagtagtgtgctacaa

SEQ ID NO: 273 - DNA, 21257 bp, Ectocarpus sp.
  source 1..21257: mol_type = other DNA
gacgcgaataaaaagtgctcccggagttttcgactctgaccactgcaacacattcatttctattataaaaagaacccgactggtgtcgggcgtgtgcaacagttaccactgataattgcgggcgtccagattccatgtactctcttggtacaaaaacaattgccctcgggcaatggcttagctgcatagcttgaaaggccaggctttccattcaaaaagggaagtctattacacttgcggggacttggtgaaaggaccgaggtcttattaaccatgttcctccgtaatacaaaactattttctttgcgaggcagcggctacggcgctggcggcaccgcgccctgcgtcgacagtggtgtgtgatcaacgccagcaagggcagcggcggcaggaacaagaaccacccggctacatgtcctcagtaaattctcacaggaaagccacaacctcacggaacactgcatcctcattcagcgataacacaaatttgagtgggcagactccacccccaccccctctttttttcggctcggggatgtccacaggttcccccgccgccagcgtgtgcgcacgaagcatgacgagccatccccggcgacgccatgctctgtccttgggagcgttcaccaggaggtggcggacgcgctcagccacagctggatcgagattccggatgcggccgaggtaatcggcgggagttttgcccctctcatccttcatggtctcgtccgccccccagcggagaagaagatccacgacagaaggtacgcagctcccacggttcattatgtggtggagaggcgtttgtccgccatacgaacaaaagttgaccggtgctccacgttgcaggagcatgagacgagcgtcgtacatgttctcgagcgtgcttgttttgcacacgccgacggagagcaaatatcccagctcttcttcgtctggctctgcgccgctgtcgagaatggcctccatcaccgccttagtcttcgtagcgctataatcgtactcgcgctcggcaccagcgtttaacagagcctttatgatgcgaacatgaccaaagcgcatggccgatgacagcggcgtttcgccatccatcctgacttcattcgggtccgcttcgttctcgagtagtagagtcacgattgcatcatgtccaccgcccgcagcacagatgagtggctggtcaaaatcgaattggctggttttgacgtcacaaccattgtctagaagagtcttcaccacggcaaagtgacctctgcggcacgccagtatgatggtgaattcgaggaaacagtctccgtcaatgtcgctcaaaagggcagtcatgatatcattgtctcctcgcagtgcagcaaagtcaatggggcgcaatgacatgtctccgaggtctctcatactacatccaacatcaagtgttgcatcggcgcctttggagagcagtgtttgcacaacgggaaagtgaccattctcgattgcttccaccagcggggttttcagattggccccaactgtccatgtcgaggacaatcctctgccggcatcctcttccgcccccgcctccaacaggatgttcaccaccgtgttgtgccccttgccggcagcaagatgtatggcatggcgaccgtcgttggggctacggaagttgacatcggcaccagcagccaccagttcctccacgacaagcacgtggccttcgcgggatgcaagctgtagaggggttctccctgcatcctgaacgctattcaaagcaagccttccgtcagccgacttcaccagcgttcgcaccttccacacgtccccgtattcagaagcactgtgtaggttacacccggataaatccgacatcttggtggtgtgctggacgctgttgtagtttatgattgtgacacggaagcgcgacggaaagaattacagagattcgtgttcagcataaacgagagctacttgtctcggttatggattcccccgtaatctgcgttttttatgttgacccgtgtgtgtcgatttgaataaccttaacacagacccgcctgcgtacagcacgctgaacgtcccggactgcaagacaaaacagaaaagtgattgtgaccaaacgccgggatgtcaactttatggtgacgagtgtgtaccaaaagttcaggaaacaatcgccagcttgtacggaggaagagcgggcgaggtccagaggactttctccgccgtgcccggaagagactgtgctccgcagtttcgggagatgtacgaggacaaccttgactcgatcgacgcgcgagcaaaccgagacaaaacgatggcggcgaagctcgcacgcaatgtgtctggaggagacacggagtcattaccgtcaacttaagaaaatggtaggtagaaaattcgttaactgtgtcttaacacatgtaactctccgcgagggagtttgcttcgttctcgtccgtctgactttctcagcgagacacacgagaacattcacaactatcatcgagaaggctgtgtttttgtctcaagccattgactgaggtgacgctcagagagcaggttttttttcacaatgataaacacataccgggattcgaacccgtgacctttgacacaagagtccaggtgtgtacagcttgtttcatgctttaaaaatcaggatcttcgctggtggtctgcagtgcatccgaccaaacggcactttcgccttcagatctgctacgcctggacatttgtatctcgagggaccggagactcttttcacgttacggaggatgtatgtgacatgcgtgtcaagggtatagagatatgacgattctttcgtactgccttgcattctcagagtgatcgtgtctaacaacaccctggcctccacctcctggatgtaaagatccggtgttcttgcgtgagctttttcgagcctgaggtttgatttcaatcgtttaaacgactcttctacccgccacctcgaagcgtacatagtcttgatatcccttcgagatagcgacgggtcgttcgtgaggcaaacgtacgttttaccgtcgataaaatatttcaaaagacgcgcctcgataccgagaatcaagcacgcggcctccgtgcgacacgagttaaagaaagacctggtgcctttgaaagcgtctatcttgagccgccaaacgccaaatgcatgagagtcatgaacgctcctcagcaagttcttggagtagtagcctctgtcaaacaccagagtatcccctttgcgtacacctcggagcatctcagtggctgcctttctttcgttgaagtgtttcgtgagctcaaagtccacacacgcttttgtttttacgtccaccatcgaagaaagcatgacaagaggtcttttcgcgggacgcgggaccggtttattgttcgtccgggtcatatatccagccccgatgaacgaagggtgcacgtgcactttcgaaccatctacagcgaatacacgtggttcgtgtggtcctcgttgcaagaaccggtttacttccttgaaagctcctggtggaagcttctttctggccgaatgtatcgcctgagacgagtactgttcgttttccatcctcagtatgtgagcgacacctctctcttgaatacaacacttagtgagcgtatagaaaagggaagatgtatctagctttcgtcgtctctgcatccactgtccgtcgcactttttaaaagcatcgtatatttcaggagacatcggtttagtcatttttttggtttataatgaaaaacattttaagtttccaacatgcttaagttgacgacactgcaacagatgggttgccttctgtgtatataggcactgctgtgcctgctgtatttcgtcaagaatatgaagattgcctgccgagggcgtggcccccaaagcttttagatactgctgtacacagacacaaaatacttcaagacacgcgccctgacaccaagaataaggcatgttgcttccgtgcgacacgagttgaagaaaggcctagtgcctttgaacgcatttatcttgagtcgccaaaccccgaacgcatgcgagtcatgaacgcttctcagcaagttcttggagttgtagcctctgtcaaacaccagagtattacacacacaaccacgcgacacccttcggtcagaacgctacagcagcagcaatcgaacgtagggcggcatttcgctcagctcagaaaagcgaaccaaacaacacccttcggtcagaactctacagcagcagcaatcgaacgtagggcggcatttcgctcagctcagaaaagcgaaccaaacaacacccttcggtcagaactctacagcagcagcaatcgaacgtagggcggcatttcgctgcatttcgctcagctcagaaaagcaaaccaaacaacacccttcggtcagaacgctacagcagcagcaatcgaacgtagggcggcatttcgctcagctcagaaaagcgaaccaaacaacacccttcggtcagaactctacagcagcagcaatcgaacgtagggcggcatttcgctcagctcagaaaagcgaatcaaacaacacccttcggtcagaactctacagcagcagcaatcgaacgtagggcggcatttcgctcagctcagaaaagcgaatcaaacaacacccttcggtcagaactctacagcagcagcaatcgaacgtagggcggcatttcgctcagctcagaaaagcgaaccaaacaacaccctccggtcagaacgctacagcagcagcaatcgaacgtagggcggcatttcgctcagctcagaaaagcgaaccaaacaacactcttcggtcagaacgctacagcagcagcaatcgaacgtagggcggcatttcgctcagctcagaaaagcgaaccaaacaacacccttcggtcagaactctacagcagcagcaatcgaacgtagggcggcatttcgctcagctcagaaaagcgaaccaaacaacactcttcggtcagaacgctacagcagcagcaatcgaacgtagggcggcatttcgctcagctcgtaaaggcgaagcaaacaacatacttttgatactggcacgcgtttgaaattcatccacgctacctgccacatcgctctcacctagcacacacactaaacacgtttcccacaatgtcgcttccacacaacacacgccctgcgcacgtcgttccgttgtgtggctcttgattgagtcacgccttgcgggcggaaaggttgggccatataattcgatttcatttctgatttcttgtgcacatgcgcatgagtgaggggcacaattgtgaaaattttcaaggccgaacactgcagcttgcttcgagctttaaaaatcaggatcctgccggatcaacgtaaaattagagtatgttgttccgctaggtcaggcacactgctgtataattttttcatggtcaacggatattttggggctgagatacgggcctagacgtggaacgcgcggcaggggggtctctaatttcaagtaacttacttcaggcgggccgggagaccacccccgtacccaccattttgttttatttgaccagtgggtacgtgcaaaactcacataatttgtttttttggcaagggaggggtgtggggtgtagttttacaccccgtgttatttaacgtacaatacgccacgtgcgcacacatgggggagaaaacggcacacacgatagccgcgtctaaaataaaacttttcgcacagggaagcaccagcacacacacaggaacgatttgccggcgttcacgcagcgcgcgggcgagttttgtgacctatacgagcgtgaccaaaagtctagaattcgcgccacaggttcttggtggacagcacacacatcaggcgcgcacacgtctacctgtgcacacgttttcacacacagacgcccgcaataacaccttcttttcgaacagagtcccccgagcaccctggtaaccgatcccggtgctccaccgctcgctcctgttgtcgtgtgaggcaggacgagcgtgtgctagcggaatgcggtgttgtggaaaagcgtgacgacagggaggggttacgtgcatggaatattattacatacatgctccaatgccaaatgcgagattccgcggagcatcctttgcgtcaaggggtgttggggtgttgtcctgcttgtctgctactgccaccgtgctcccgcagacttacccaccacgactaccacgaccgcgtttctgcgagatggatcgaaagcggtggaaaaccgatcctcatcgtcccaccgaggtgtggctacgtcgatactacacaatagtttacagggcacgcagcggttccaaggctggtcaaggagacagcatcacttaggaaggctctgttcaccaatcaatcacggccaacacacagcacaacagtaaaccatgaccactctcgtcaccccctgtcgtgccttgtatacaggcgaaacggaacaaatccgccaaaaggtcctgggaaaggcgccaggcgaaacaggcgaaaaaacggttacaagaggaagcgggcgaggccggtgagttttgcgcacagagaattgccaaaatagaccacgtgcacacatacaccgttgcagtcttttcaatcgaaactctgtacaacacaaacaaaactaatatcagctacattgctgctgctaccgcggatgctgctaccgcggatgctgctatcttggccactaaccctgccactactcctgctaccacaaccacagcttctactgctactgctgctgccgctgctgccaccgctaccaccaccgctgccgctgctacaacagcttctactactgctacctctcctgctacacatgccgctacccctgctacaacagcttctactgctgctacaacggttgctcctacacccgtagctgccgctgctgctaccgctaccgctgccgctaccgctaccgctgccgctgctgctgctgctgctgctgctgctgctgctactgctgctgcatctgaccgcccgatcggcaaatccacgggagttgtgccgacccccgcgcaggacgccagggatgcggtgcagaatctcatggcttcactcgatgcagcagcagcagagaatcaaagcggcgccatcgaggttgcgtgccaagatttccgggagacggcgttcggcaaagaggtcatgcacgatctccacgtcgacggtatcgtgaacatcccgtacgggacgtcggaagcggacgctctcagcatggcgggcgttgtgcgtggtgcggcgcaagacttggtgctgggtgagaaaccccatagggagagggtaaagatcaagggacagacgcggtacgcgctagaggcgatatacatggggggtggggcagttgccgcgttcgaggagatcgcctctctgctggccgcggtcctgtgtgctgtcgtggacggcgcgtccggcggggtggtaacccacaagcacgtggcactggccaacgcgatggggacgggggtgcaaatgtggcaccgggacgggcgagccaaggaggttttggccaagacgaacccgtctcacaaggacaacaggaagaggccggaaccacaccccttctcggccgtgattgctttcgaggagaacaccgtgcttcacgtggtcagaggttcgcacaacagggggaaggaaaacgacttcagccaagatgcaccccacgcccaccacatcaccatcggatatgcagcggtgttttactccattctcgtgcaccgcggaatgggtaccgacggcgattgcccgagcgagaacgtccgcgggcacatgtacctcacggtagcgggctgtacgttgccgtcgttcggaaagattgaagccaacatcaaggggcccgaggccgatgctaccgctcctgctgcatccacccccgtcgccgcaaccacttcgccttcggatgacaccgctgctgctgctgctgctgctgctgctgctgctgccggtacttctggtgccggtgttgccggtgctgctggtgctggtgctgccggtgctgccggtgctgctggtgccggtgctgctggtgccggtgctgccggtacttctggtgctggtgctgccggtgctgctggtgctggtgctgctggtgctgctgatgctactggtgcttctgttgccggtgttgccggtacttttggtgccggtgctgctgctgctgctcctgatgctcctgctgcttctgctgctcctgccgcttctgctgctggtgctgcatctgctgctggtgctgcatccactgctcctgctgctgctgcatccactgctcctgctggtgctggtgttgccggtgctcctgctgctgctgctgctgctgctgcatccgctcctcctgctgctgctgctgctgctgctgcacacgagtacaccgacgcctggacagggatagtcgatgatgtcgggacgggaacgaagggagggttcgatggcacatcgggtgccatgttggttgcggggacggatgttgatgctactaccgctgctactaccgctgctactactactgctgctgctacacctgcttctactgctaccactaccactaccactgctgctgcaacgacggtgacgcatggtacgagaaaggacttggcggctcgattcgagtcgttcatattccatcttgacaaggggacacgcagagtactgatgtgtttactggagacaaacagcgttttggacggcattgagtcgttcggagaagacggcaaggacgagggcttgggtaacggactgttttcctgtctccttcgcaaagacactgcccccaaggaggatacatctagacgaccctgtcctttctggagcaacggttccaggaaagaactctcagagaatgtcgctatcgcatgcacgaaagcacagatccccctcgtactggagggcgacgcacctgcacaatcaccaatgggtgagatgatgcagtacgccgctggtaaaggcgtggcccgcattggctacataggcaaaacgtctggacgggggcctctcaaactggctccgggcttgacggatgcctggcgcactggtgctgtgacggataagcaactgcgggacacgctcaacggaggaacgttcaccatcgacaatacagaggtgcggtataatattatttatttattatatttagtattggcgaagatgttgtcgtcttcacatccttgcacaatatccggactggtcatactgacgccgacgccttccgtggtctcctgttgtgcgacaggaaaataagcgcacggacaagacgtgctacgccactctggaaaacgacaccgtgactgcgatgattcgagaagggactcggatgggagagctttgttttccacgcaggggaaaccacctccaatatgggacattgaccggaaaggaagctgacggcgttgcgtggtcgggcagcgagtgcatgctatttgccaaagacggcggaatgacaaacccacacgtggacgtgcaatctgtcccgggaggaacagggagaataatccacatgcccgcagcgggagtcattcgcagagtcaactatgttgaagaaaataggccggcaaaacaggccatcgtggtgcatgcggacgatatgtcgagggtgattgaaactctgaaaatcaataccaagaaggagtccgccagtcagtacggcggtccgccgcgaacgcttccggagttcgcgagggtgttgaaatccaagggaattcggtttgttgtgatgaactttccttcgcgctgctcgtacgcccttccagcgaggtgtgcgcacgtgtttgtcacgatagggttggttgagagctcggcttggcaccctgtttacaagcaggatatgtgatatccaggattttttttcggcaccatgcacttgattgtggtcgggtagcgagtgcatgcttttcgccaaagacgggggggggatgaccaacccgcacgtagacatgcagtggtggagagcgcggcatggcaccccgtgtttaagcaggacatgccgtacccgaagttgattgcgtaacacttgaagtattttaagggcgttttttctcgtcactgaggtcacaccattcctgccggttttactccaacccgtggtctcacaagagagctcctaacgatacttttgcctacgagagctaggccctctttcatgcgtgcacacgaactggcgctacgggggctcctgcactccaacgatgcttggtggtacaaggacgtcctccgacctttttcaaaagaggcaaatatcaagtgtctcgtgaataaggagaacgccaggtacgcgtcaagcgagcatggctacctctcgagtctgcagggaagtggtccggacaagtgcccctggatgattggcgagagtttcttgacggacggtgtacagatcaagcttttacttgtgacacttgaacatggaaggaaagctttttccggttccagcgagctgaacgaagcggggtacaacaaactgccccgggctgacgctcagctagaaagccttttgaaagagggaagaggggtgtacaacatatccagccttttggagtcgacaagcatcagggaagacgtcatcgtcatgtccgctgacccgggccaggccaaggtgatcaacgtttcttcggctacggctagcacttgggcaaagcaagaccctggcgtcatcctcaaaacttcgacgtgtgttttcggggacgattatcgtcgtgacactcttgcatcacgttcagacgagtacgagacgttcaggcgcaaggaccagccgtacggagtagccatcgatcgtcttggtaacgagaagaaaagaacttcatgcctcgcaacgttcatcaagtactgcagacggtggtgtgcaaatggtccggtgttattcctagagactttgcagacaggaaggaagttcatgaggtttgaccgtttcagagctacgcagaagacactcgccaagattgcggacaagtacatgggacacgtcgaagacacttgcagggtcatgttgttcggaaaagcgtcttttcgtgcgcagaaaggaagggcatctgcaccaaggaaagctttgatcagagagatggccagtagaggcgtggtgttgatggtgaaggagtacaacacttccaagaaatgcccagggtgtggagaggacacggtcgaggacaaagaacggagaatccggagttgcaaaaactttaagatcggatcaccggaagagtcctgtagacttcaccgcctgacaccagagtttgaaatggatcgcgacgacgtagggtcgactaatatcggtatgcgtggtttcggccaattgctcggtcaggagtggttttagggattttttccggattttcacttgcggataatactttatagttggttttcctaaagttgacaatggtgatcttgacaaggagacacgtaaagtactgatgcgtttactggagataaacagcatgttggacggcactgagtcgttcggagaagatggcaaggacgagggcttgggcaacggactgttttcctatttccttcgcacagacgttgcccccaaggaggatgcatctagacgaccctgttcttactggagcaatagtcccgagaggaaagaattctcggagaaggtcgctatcgcatgtgcgaaggcgcagatcccgctcgtactggagggcgacgcacccgtacgatcaccaatcactaatatcaacttaagaaaaccggaactattaagttgtagtgaacaaaaacagatagaaacaactaagttgtctcctcaagggtccagcttttagggttttttaaacctcggaatatcccactgtttccaggcaagtcgtttgttgaaacttcggttgcgaaagcttgtcgtcgtttcttcgtagcgtgttgatgttgtagacctcgtgtagccgtgttgtgatgtcggccttcttctttctcttttttttcttcttcgtcttcgaatttgtagtggtggttgccatggtgaaggtgaattgtgagcagcgtgggctaccaatacactcaaatgtttacgtataaaattgaaaaatgtggtctttcttctagatcgtttcgagttggtaagattcgccaaattgttctagaaagcttaagttgataacaatgtcaccaatgggcgagatgatgaagtacgccgctggtaaaggtgtggcccgcattggccacatcggcaaaacgtctggacgagggcctctcacactgacaccgggcttgacggatgcctggcgccttggtgatgtgacgggcaagcaactgcgagacacgctcaacggaggaacgttcaccatcgacaatacagaggtgcgtagatgttgtcgtctgcctacaattaaaaattgaaaagtagaaagcacaatatacgaactggtcatactgacgcccacccccttccatgatcgcctgttgtgcgacaggaggataagcgcacggacaagacgtgctacgccacgctgaggaacgacaccgtgactgcgatgattcgagaagggactcggatgggagagctttgttttccacggaggggaaaccaccaccaatgtgggacattgaccggaagtgaggctgacggcgttgcgtggtcgggtagcgagtgcatgctatttgccaaagacggcggaatgacaaacccacatgtggcattgttatcaacttaagctttctagaacaattttgcgaatcttacctactcgaaacgatctagaagaaagaccacatttttcaattttatatgtaaatatttgagtgtattggtagcccacgctgctcacaattcaccttcaccatggcaaccaccactacaaaatcgaagacgaagaagaagaaaaagagaaagaagatggccgacatcacaacacggctacacgaggtctacaacatcaacacgctacgaagaaacgacgacgagctttcgcaaccgaagtttcaacaaacgacttgcctggaaacagtgggatattccgaggtttaaaaaaccctaaaagctggacccttgaggagacaacttagttgtttctatctgtttttgttcactacaacttaatagttccggttttcttaagttgatattagtgacatgtggacgtgcaatctgtcccgggaggaacagggagaataatcgctatgcccgcagcgggagtcattcgcagagtcaaccatgctgacgcacacgggccggcgaaacaggccatcgtggtgcatgcggatgatatgttgagggtgattgaaactctgcaaataaataccgacaaggagtccaccagtcagtacggaggtccgccgcgaacgctgccggagtttgcgagagtgttgaaatccaatacggtttgttgtgatgaattttccttcgcgctgctcgtacgcccttcccgcgaggtgtgcgcacgtgtttgtcacgatagggttggttgagagctcggcttggcaccctgtgtacaagcaggctatgtgatttccattcgggtcataacgtttgacgagagatgtattttgtgggggtgtccaacccgcgcgtggacgtgcgtagacgcgcgtgtacatgcccgcagcgggcgtcattcggagagtcgtacagcggtaggctcaccacgctccccgagtttgcacgagagctcagcggggtggtagagagcgcggcattggcaccccgtgttcaatcaggacatgccgtacccaaagtaaccattgttatcaacttaagctttctagaacaatttggcgaatcttaccaactcgaaacgatctagaagaaagaccacatttttcaattttatacgtaaacatttgagtgtattggtagcccacgctgctcacaattcaccttcaccatggcaaccaccactacaaattcgaagacgaagaagaaaaaaaagagaaagaagaaggccgacatcacaacacggctacacgaggtctacaacatcaacacgctacgaagaaacgacgacaagctttcgcaaccgaagtttcaacaaacgacttgcctggaaacagtgggatattccgaggtttaaaaaaccctaaaagctggacccttgaggagacaacttagttgtttctatctgtttttgttcactacaacttaatagttccggttttcttaagttgatattagtgaaagtaacattttgcggttaggcgatctttttttatcggcttttaaaatgttgtactgaatgtaacatcccttcgagtcgtgacgagaagcttcagcaaagtcactctatcgactatgagcacaggcggggtcctcaacttttccgagctggagctgtacgataacgatgacaataacatcgctctcctcggaaccgcctccgcgacctccatgatatatggctctgcgggtttaggcaacgatggtatcacagatcatgtattcggaggccctgacaatccagttttacataccgagggttcggcgatatggacgcttgacctggacagaagttatctcttgacggaactccaaaaggcggatagctttgttttcgataacaaaaagtgtgtagtgcaaagtgcttaatcaaggccttcgtgtcgcgcgtcgtatgacgatggagcatattctcttgaaaataatgccttcagtatatcaacagtaaacaatgctcaccaaaaacatctggtctcagatcggggtaaaccccgcggatgcccttttaccaccagtgcacaatctgggcatgatcatccttcgggaagagttgacggaagccgaaagcgatttgcacgccgcgcgcgtagcactgaaaacactcgaagaagccggtgccagcggtgacacgagcgacctctatacagcgatgtggaagctacaaaaaaaagaacaagcatactttgcgagacgctacttgcagacaaacaaggccgtgcttcggggatggcacaaccaagtttccaagtacgaactctcgggggaaaaggtggggcatggagtccagggagttgtctacggcgtgatcaaccacccggacaaagttgtcaaactgtatcctacacgtttccagcttgcacacaactctatcaccacgaagcaattcgtctacgacaagaccgcctccgacaacgggttcggtcccaaaatatacgagatttcttccgatggtcgagtcgttgacctgtcggacaaaagcacagtgcccaaatatcgttataaaagaaattttatggtagtcatggaaaggttagcaggtatagacatggataaacagtatgttggaattgttaacgtgtggaagaaaatgagacaacacgggctctttagtggagacggattctatggatactcgcttcaacacaaggcaatcgttcatgcagattttggtgcagtatggaaaataaaagacgatgatgagttcaaagatgcagtgtatgaacacttggaagaacgcaaggacagcaagggccttgagccggacattgcgaaaagatacagagacgagttcccgggagacccgttcactcaaggcatcttggtaccagtgttggcaaagttaggcatctaatctattaacacgaaggtcgccggacggagtgcagttttgctttgtttaaatattgacgtgcgttaagataccacgaaatggatactctgacaacaagactcatggcccgcagcggtctcagcaacgccactcgtcctcccgcgcgcagcacacccatggtcaaggccggtatcgggctcaatccgtccaacccactgcttcctcccgtgcacaacttgcgcatgatttatctgaaggaaccttttggggatgctgaaaaggatttgcacgcggcgcgtgtagcacttaaagcattggaaacgactaacgacgacaccaccaggaaagcgctgtacaaagcaatggcgaaactacagggaaaagaatcacattactttgcgaccagatacatcggcagagacaagccgcttgtcctaagtggctggaagtcacacttcttttcgcacaaagcccacgacttgtttaaaaaatcaagtattcgtttttatttccccccttccggtatgcatcaagacgccatcgatgccgcagaaataagcttttatgctgcggaagacctttgggaaatggaccaagaattcctagagcctaatccggagccgaaagcgtggttcgatttgaggaaaggcgatattaaaatggatattgccagtattgaacaagttattcaaaatacaaacaccacatccaatgatgacattacatctatgaatgaatctcttgccaacgcgaaaatcatacaaaggcttgctctcctagtggataacgtacgagaagttccgcacgatttgctgtagttgtgaacatcggacgaaacgtagttttgtattttttaaatgttgacgtgtgttaagataccacgaaatggatactctgacagcaagactcatggcccgcagcggtctcagcaacgccgctcgtcctcccgcgcgcagcacacccatggtcaaggccggtatcgggctcaatccgtccaacccactacttcctcccgtgcacaacgtgcgcatgatttatctgaaggaaccttttggggatgccgaaatacatttgcacgaggcgcgcgttgcgctggaaagtgtccaagctggtggtccatcggcacccttgtacgcagcaatggctaagctggaggtggccgaacgagactacttcgccagacggtacttcggtggagaaaaagctatactgaaaggatggaattgttctaaattcaaacaaaaaattaaagaactaatcagtaccgcctcagcaagatccagtttcttaaatactaacagtacacggtacgacacccgagcaacaacagctgcaggacaagcttcagcagcgtctctccagcttaaattgatgaacaataaatggtataccaccgccggcaaccgacaacaaacaaaaccaacaacatttggcaacaattttaccgcaattgaactcgcgattgggcgcattaacaagtatctgggcgaagtgttggccttaccggactctgacacaaaaaagcaaccttccgttacatccatcaaagattcccttaaacacgcaaaaatatgtcagcgcctcgctcgactggtcgaggccaaccagtgtgatcttccggatgacgtgtaaacatcggacgaagtgtagttttgcttctttaaaatattgacgtgggttaagataccacgaaatggatactctgacagcaagactcatggcccgcagcggtctcagcaacaccgctcgtcctcccgcgcacagcacacccgtggtcaaggccggtatcgggctcaatccatccaacccactgcttcctcccgtgcacaacttgcgcatgatttatctgaaggaaccactcacagatgctgaaaaggatttgcacgcggcgcgtgtagcacttaaaacgttggaaacgacggacaacccagcaaacagggaagcgctgtacaaagcaatggcgaaactacaaggaaaagaatcacattactttgcgaccagatacatcggcagagacaagccacttgtcctacgtggctggatttcgcacaactttacggacaaggtccgcgagttggtgcggtcggctgcagtacgtcagatagctaaccgaggtgacccgaaagtgacaccttccacacgtcaaggtgtcgctattacggcactactttccgggatgaacgacgatcgcctcgacccaacgaaaacgaacctcccgcgtgcacgatacgagaccggtcttgctgtgatcaagctaagagtggctactattgacgctgaccgtcaatccatgacagtcggttctcatagtacagctcaagcttatgtcataaagaagtcattagccgaatctcagcagtgcatgaggcttgcggaattgctagtggacaacaaacgcgaagttccgtacgacatgctgtagttttcagtggaactggttggtgccggggagcaagtagttacacaagagagactggtaatttttccaccaagacgttaccgaggtgctgcgcttgagtcacacaaatcccacaatattctgaaacaccccgaattccaccagaaaggcaacttccaacaccaggcgatcaccgtcatcaccgtcgtcggcatcaacaccgcgcttgcgcaacaaaatgaagccccggcgcttggcccagttctcttcgcaaacacgcgctgcgatcaatccgcggaacggctgcctctgaccccaaaaagtaccagacacccgtctaccaccgttgtcgaacgggagacacgacgcccccctctccaccaaccagtcgaaacgtagccgaaggtagtctacgctctcagtcctctcgctcaggagagtcatcatgggagtgaagccgaattcgtcctgcacactccattcctctggcgacagattttgagccaaggcctgaaatacgatggaagagtgagtctccgccactcgatggagtgcggtgttccgcaaccctctctcccaatcccaaacaaacctggtcctatccgcaccaagactgatcaaagcagataccacgaaagggttgcgatgcacgcagttcgccagagtgccacatcggttcacgctcgccccgtacacatctaccagtatccgtatgcccgacatgtcctgttcatgcccgtcgttcgacagccgcagagctgccgcgttgagactcctgtctacaaactcttgatccggagcatcccgcgcgacaatcgcccgcatcgtaccacggaagccccttgcagcagcgattgataatcccctcttccacacgcccttgtgggaataatacgcggaagcacccgcccaaaccaacgccatcccgagattatcactcgcattccgcatcaacaaagaattcccatcgcgatccttgtgatccaggtcgccaccgatagcttcatacagttgcaacaccgtcaaaaagtcacccgcacaggcgtcgaaggactccaggttgaagagaacggttcgctggtgcacatcctgcgaatgcacatttagcatgccgtgggaaagaaggtaccagaagtgctccatgtctgagagggagggattgaccgggggcggcgagggaaagggaaagggggcaaacaatgtttaccaataactttgtaggcgtggtgctcaccatttttgcgacactgttaatagcatcatcatcaccatgccatctaccaccagcacactctacaacgccgcgtggactgggtcggtcgaacgcacgcttgatctgttgtcggatggattcaccgaaatcgaccggcggtgcgaagaaaatggggtgacggctctcatgtgtgccgccaacaaggggtatctgcgtattgtcagggtgctcctccgattcggggccgacgtgtcggtcagtactgacgatggacacaccgctctgtacttcgccatcggtggtcgaaacctcgccgtcaccaaagcactcatcggggccggtgccgacgtcgaagcaaaggcagacttcctccacccggaccaagaggtagttcaaggtcagacacccttgcacttggccacgggagaagggttctgtgacgggatggtggcactgatcgacgccggtgcgaatgtcgacagtcgcatgagcaacggatcgacggcaatgtacatcgccgcatgcaccgggaacttggacgcggtcaagattctcctacaggaaagggcaaaccccatgctatgcgtcggtccaacacatcctctcgacatcgccacacacgggggacacctgggggttgtacaggagcttgtgcagagattcggagtggatggctgttccgacgaaggagccataggcgccctggagacagccgcatacgaaaatcaccaaactattctgacgttcctactcgacgccggtgtcaaagacacggacggcacggccctgtgtgatgccatcgagggtcgcagcgaggcgtgtttgaagctgttggtgggccgacgaggggggaatgctcacatggcggagagccattacacgaacacggacagcgcctgtgacaatgccctcgtctgtgcattcggtgcgggacgcgggtatgctccgaggatgactcggttcttgcttgaccacggggccgataccaagaagaaagtgcgtttcgaaataaaagggttgggtgagatagcaggcggacccctggtcgccgccaagatcattctacggcacgagcagacccacttcgaggacgcagatgaggagggggtggacgggctaaaggaagtcgttcgtctccttcggcaggaggatgcagttcacgccaactcctgggcgtggccgatcgacaccgaccgcgccacgaaaatcgtacgcaagacgccggccttcaaaatacaccccggtccgaggccatgtgtgctgttggcggcgatgggaaggtgcgtggagtggtgtcgatatccttaggtagtaacatcaatagggaaagtgtgaatagaagacgacctgaccccgatgatcctcgtgtatcgccggcaggtacatcaacaaacaggacggcgcgttcgaagggtaacgcttcctcggatgctcatctctaacgattggtacatcacggaaaataaaatattgcctttgaattataaatacaatttgcagccatgtctgtcacatggaccaagagcgccgacaacaagtttgaggtggcgacaaaggagcacttgctacagatcatgaaccaaggcgccttgtacacagacagtggtgtaatacccaccaactactgggggtctgactatgtgcagacgagcgacatcgacttggtggacgatcacgcgagcatccttccgatcggggactctacgaccgcttttacaggggagtacgacggaggtcttttcgaaatcaagaactggtcgtattccagcagcaccgagttgtaccagggcttgttcgggagagcgagttctgctaccctgcaacgcatccgcctgtcgggtgtctggacactgagtggttcaccgagtggttccgcgtcaggaaccgctttcatgtgcgggaacgtcactaatggaagcgttgatgatgtagagggagactttgccgaagggtcggtcatgacttcaaccgcagataatcgcggcgctttgttcggctcgatcaccaattgttctctcgaccgtgtgacgttgcgtgggtctgtgaactttgattccagttccaccggagactgtgggggtatgatggggatgatctcctacaacgccacggccactaattggcgcaatcttgcaacattttccaacggcctcagtggcgaaaatgttggtggaatctgcggaaattttgacggttatggggtgacggcatcaaa

SEQ ID NO: 274 - DNA, 21257 bp, unidentified
  misc_feature 1..21257: note = Fanzor polypeptide
  source 1..21257: mol_type = other DNA
gcgaataaaaagtgctcccggagttttcgactctgaccactgcaacacattcatttctattataaaaagaacccgactggtgtcgggcgtgtgcaacagttaccactgataattgcgggcgtccagattccatgtactctcttggtacaaaaacaattgccctcgggcaatggcttagctgcatagcttgaaaggccaggctttccattcaaaaagggaagtctattacacttgcggggacttggtgaaaggaccgaggtcttattaaccatgttcctccgtaatacaaaactattttctttgcgaggcagcggctacggcgctggcggcaccgcgccctgcgtcgacagtggtgtgtgatcaacgccagcaagggcagcggcggcaggaacaagaaccacccggctacatgtcctcagtaaattctcacaggaaagccacaacctcacggaacactgcatcctcattcagcgataacacaaatttgagtgggcagactccacccccaccccctctttttttcggctcggggatgtccacaggttcccccgccgccagcgtgtgcgcacgaagcatgacgagccatccccggcgacgccatgctctgtccttgggagcgttcaccaggaggtggcggacgcgctcagccacagctggatcgagattccggatgcggccgaggtaatcggcgggagttttgcccctctcatccttcatggtctcgtccgccccccagcggagaagaagatccacgacagaaggtacgcagctcccacggttcattatgtggtggagaggcgtttgtccgccatacgaacaaaagttgaccggtgctccacgttgcaggagcatgagacgagcgtcgtacatgttctcgagcgtgcttgttttgcacacgccgacggagagcaaatatcccagctcttcttcgtctggctctgcgccgctgtcgagaatggcctccatcaccgccttagtcttcgtagcgctataatcgtactcgcgctcggcaccagcgtttaacagagcctttatgatgcgaacatgaccaaagcgcatggccgatgacagcggcgtttcgccatccatcctgacttcattcgggtccgcttcgttctcgagtagtagagtcacgattgcatcatgtccaccgcccgcagcacagatgagtggctggtcaaaatcgaattggctggttttgacgtcacaaccattgtctagaagagtcttcaccacggcaaagtgacctctgcggcacgccagtatgatggtgaattcgaggaaacagtctccgtcaatgtcgctcaaaagggcagtcatgatatcattgtctcctcgcagtgcagcaaagtcaatggggcgcaatgacatgtctccgaggtctctcatactacatccaacatcaagtgttgcatcggcgcctttggagagcagtgtttgcacaacgggaaagtgaccattctcgattgcttccaccagcggggttttcagattggccccaactgtccatgtcgaggacaatcctctgccggcatcctcttccgcccccgcctccaacaggatgttcaccaccgtgttgtgccccttgccggcagcaagatgtatggcatggcgaccgtcgttggggctacggaagttgacatcggcaccagcagccaccagttcctccacgacaagcacgtggccttcgcgggatgcaagctgtagaggggttctccctgcatcctgaacgctattcaaagcaagccttccgtcagccgacttcaccagcgttcgcaccttccacacgtccccgtattcagaagcactgtgtaggttacacccggataaatccgacatcttggtggtgtgctggacgctgttgtagtttatgattgtgacacggaagcgcgacggaaagaattacagagattcgtgttcagcataaacgagagctacttgtctcggttatggattcccccgtaatctgcgttttttatgttgacccgtgtgtgtcgatttgaataaccttaacacagacccgcctgcgtacagcacgctgaacgtcccggactgcaagacaaaacagaaaagtgattgtgaccaaacgccgggatgtcaactttatggtgacgagtgtgtaccaaaagttcaggaaacaatcgccagcttgtacggaggaagagcgggcgaggtccagaggactttctccgccgtgcccggaagagactgtgctccgcagtttcgggagatgtacgaggacaaccttgactcgatcgacgcgcgagcaaaccgagacaaaacgatggcggcgaagctcgcacgcaatgtgtctggaggagacacggagtcattaccgtcaacttaagaaaatggtaggtagaaaattcgttaactgtgtcttaacacatgtaactctccgcgagggagtttgcttcgttctcgtccgtctgactttctcagcgagacacacgagaacattcacaactatcatcgagaaggctgtgtttttgtctcaagccattgactgaggtgacgctcagagagcaggttttttttcacaatgataaacacataccgggattcgaacccgtgacctttgacacaagagtccaggtgtgtacagcttgtttcatgctttaaaaatcaggatcttcgctggtggtctgcagtgcatccgaccaaacggcactttcgccttcagatctgctacgcctggacatttgtatctcgagggaccggagactcttttcacgttacggaggatgtatgtgacatgcgtgtcaagggtatagagatatgacgattctttcgtactgccttgcattctcagagtgatcgtgtctaacaacaccctggcctccacctcctggatgtaaagatccggtgttcttgcgtgagctttttcgagcctgaggtttgatttcaatcgtttaaacgactcttctacccgccacctcgaagcgtacatagtcttgatatcccttcgagatagcgacgggtcgttcgtgaggcaaacgtacgttttaccgtcgataaaatatttcaaaagacgcgcctcgataccgagaatcaagcacgcggcctccgtgcgacacgagttaaagaaagacctggtgcctttgaaagcgtctatcttgagccgccaaacgccaaatgcatgagagtcatgaacgctcctcagcaagttcttggagtagtagcctctgtcaaacaccagagtatcccctttgcgtacacctcggagcatctcagtggctgcctttctttcgttgaagtgtttcgtgagctcaaagtccacacacgcttttgtttttacgtccaccatcgaagaaagcatgacaagaggtcttttcgcgggacgcgggaccggtttattgttcgtccgggtcatatatccagccccgatgaacgaagggtgcacgtgcactttcgaaccatctacagcgaatacacgtggttcgtgtggtcctcgttgcaagaaccggtttacttccttgaaagctcctggtggaagcttctttctggccgaatgtatcgcctgagacgagtactgttcgttttccatcctcagtatgtgagcgacacctctctcttgaatacaacacttagtgagcgtatagaaaagggaagatgtatctagctttcgtcgtctctgcatccactgtccgtcgcactttttaaaagcatcgtatatttcaggagacatcggtttagtcatttttttggtttataatgaaaaacattttaagtttccaacatgcttaagttgacgacactgcaacagatgggttgccttctgtgtatataggcactgctgtgcctgctgtatttcgtcaagaatatgaagattgcctgccgagggcgtggcccccaaagcttttagatactgctgtacacagacacaaaatacttcaagacacgcgccctgacaccaagaataaggcatgttgcttccgtgcgacacgagttgaagaaaggcctagtgcctttgaacgcatttatcttgagtcgccaaaccccgaacgcatgcgagtcatgaacgcttctcagcaagttcttggagttgtagcctctgtcaaacaccagagtattacacacacaaccacgcgacacccttcggtcagaacgctacagcagcagcaatcgaacgtagggcggcatttcgctcagctcagaaaagcgaaccaaacaacacccttcggtcagaactctacagcagcagcaatcgaacgtagggcggcatttcgctcagctcagaaaagcgaaccaaacaacacccttcggtcagaactctacagcagcagcaatcgaacgtagggcggcatttcgctgcatttcgctcagctcagaaaagcaaaccaaacaacacccttcggtcagaacgctacagcagcagcaatcgaacgtagggcggcatttcgctcagctcagaaaagcgaaccaaacaacacccttcggtcagaactctacagcagcagcaatcgaacgtagggcggcatttcgctcagctcagaaaagcgaatcaaacaacacccttcggtcagaactctacagcagcagcaatcgaacgtagggcggcatttcgctcagctcagaaaagcgaatcaaacaacacccttcggtcagaactctacagcagcagcaatcgaacgtagggcggcatttcgctcagctcagaaaagcgaaccaaacaacaccctccggtcagaacgctacagcagcagcaatcgaacgtagggcggcatttcgctcagctcagaaaagcgaaccaaacaacactcttcggtcagaacgctacagcagcagcaatcgaacgtagggcggcatttcgctcagctcagaaaagcgaaccaaacaacacccttcggtcagaactctacagcagcagcaatcgaacgtagggcggcatttcgctcagctcagaaaagcgaaccaaacaacactcttcggtcagaacgctacagcagcagcaatcgaacgtagggcggcatttcgctcagctcgtaaaggcgaagcaaacaacatacttttgatactggcacgcgtttgaaattcatccacgctacctgccacatcgctctcacctagcacacacactaaacacgtttcccacaatgtcgcttccacacaacacacgccctgcgcacgtcgttccgttgtgtggctcttgattgagtcacgccttgcgggcggaaaggttgggccatataattcgatttcatttctgatttcttgtgcacatgcgcatgagtgaggggcacaattgtgaaaattttcaaggccgaacactgcagcttgcttcgagctttaaaaatcaggatcctgccggatcaacgtaaaattagagtatgttgttccgctaggtcaggcacactgctgtataattttttcatggtcaacggatattttggggctgagatacgggcctagacgtggaacgcgcggcaggggggtctctaatttcaagtaacttacttcaggcgggccgggagaccacccccgtacccaccattttgttttatttgaccagtgggtacgtgcaaaactcacataatttgtttttttggcaagggaggggtgtggggtgtagttttacaccccgtgttatttaacgtacaatacgccacgtgcgcacacatgggggagaaaacggcacacacgatagccgcgtctaaaataaaacttttcgcacagggaagcaccagcacacacacaggaacgatttgccggcgttcacgcagcgcgcgggcgagttttgtgacctatacgagcgtgaccaaaagtctagaattcgcgccacaggttcttggtggacagcacacacatcaggcgcgcacacgtctacctgtgcacacgttttcacacacagacgcccgcaataacaccttcttttcgaacagagtcccccgagcaccctggtaaccgatcccggtgctccaccgctcgctcctgttgtcgtgtgaggcaggacgagcgtgtgctagcggaatgcggtgttgtggaaaagcgtgacgacagggaggggttacgtgcatggaatattattacatacatgctccaatgccaaatgcgagattccgcggagcatcctttgcgtcaaggggtgttggggtgttgtcctgcttgtctgctactgccaccgtgctcccgcagacttacccaccacgactaccacgaccgcgtttctgcgagatggatcgaaagcggtggaaaaccgatcctcatcgtcccaccgaggtgtggctacgtcgatactacacaatagtttacagggcacgcagcggttccaaggctggtcaaggagacagcatcacttaggaaggctctgttcaccaatcaatcacggccaacacacagcacaacagtaaaccatgaccactctcgtcaccccctgtcgtgccttgtatacaggcgaaacggaacaaatccgccaaaaggtcctgggaaaggcgccaggcgaaacaggcgaaaaaacggttacaagaggaagcgggcgaggccggtgagttttgcgcacagagaattgccaaaatagaccacgtgcacacatacaccgttgcagtcttttcaatcgaaactctgtacaacacaaacaaaactaatatcagctacattgctgctgctaccgcggatgctgctaccgcggatgctgctatcttggccactaaccctgccactactcctgctaccacaaccacagcttctactgctactgctgctgccgctgctgccaccgctaccaccaccgctgccgctgctacaacagcttctactactgctacctctcctgctacacatgccgctacccctgctacaacagcttctactgctgctacaacggttgctcctacacccgtagctgccgctgctgctaccgctaccgctgccgctaccgctaccgctgccgctgctgctgctgctgctgctgctgctgctgctactgctgctgcatctgaccgcccgatcggcaaatccacgggagttgtgccgacccccgcgcaggacgccagggatgcggtgcagaatctcatggcttcactcgatgcagcagcagcagagaatcaaagcggcgccatcgaggttgcgtgccaagatttccgggagacggcgttcggcaaagaggtcatgcacgatctccacgtcgacggtatcgtgaacatcccgtacgggacgtcggaagcggacgctctcagcatggcgggcgttgtgcgtggtgcggcgcaagacttggtgctgggtgagaaaccccatagggagagggtaaagatcaagggacagacgcggtacgcgctagaggcgatatacatggggggtggggcagttgccgcgttcgaggagatcgcctctctgctggccgcggtcctgtgtgctgtcgtggacggcgcgtccggcggggtggtaacccacaagcacgtggcactggccaacgcgatggggacgggggtgcaaatgtggcaccgggacgggcgagccaaggaggttttggccaagacgaacccgtctcacaaggacaacaggaagaggccggaaccacaccccttctcggccgtgattgctttcgaggagaacaccgtgcttcacgtggtcagaggttcgcacaacagggggaaggaaaacgacttcagccaagatgcaccccacgcccaccacatcaccatcggatatgcagcggtgttttactccattctcgtgcaccgcggaatgggtaccgacggcgattgcccgagcgagaacgtccgcgggcacatgtacctcacggtagcgggctgtacgttgccgtcgttcggaaagattgaagccaacatcaaggggcccgaggccgatgctaccgctcctgctgcatccacccccgtcgccgcaaccacttcgccttcggatgacaccgctgctgctgctgctgctgctgctgctgctgctgccggtacttctggtgccggtgttgccggtgctgctggtgctggtgctgccggtgctgccggtgctgctggtgccggtgctgctggtgccggtgctgccggtacttctggtgctggtgctgccggtgctgctggtgctggtgctgctggtgctgctgatgctactggtgcttctgttgccggtgttgccggtacttttggtgccggtgctgctgctgctgctcctgatgctcctgctgcttctgctgctcctgccgcttctgctgctggtgctgcatctgctgctggtgctgcatccactgctcctgctgctgctgcatccactgctcctgctggtgctggtgttgccggtgctcctgctgctgctgctgctgctgctgcatccgctcctcctgctgctgctgctgctgctgctgcacacgagtacaccgacgcctggacagggatagtcgatgatgtcgggacgggaacgaagggagggttcgatggcacatcgggtgccatgttggttgcggggacggatgttgatgctactaccgctgctactaccgctgctactactactgctgctgctacacctgcttctactgctaccactaccactaccactgctgctgcaacgacggtgacgcatggtacgagaaaggacttggcggctcgattcgagtcgttcatattccatcttgacaaggggacacgcagagtactgatgtgtttactggagacaaacagcgttttggacggcattgagtcgttcggagaagacggcaaggacgagggcttgggtaacggactgttttcctgtctccttcgcaaagacactgcccccaaggaggatacatctagacgaccctgtcctttctggagcaacggttccaggaaagaactctcagagaatgtcgctatcgcatgcacgaaagcacagatccccctcgtactggagggcgacgcacctgcacaatcaccaatgggtgagatgatgcagtacgccgctggtaaaggcgtggcccgcattggctacataggcaaaacgtctggacgggggcctctcaaactggctccgggcttgacggatgcctggcgcactggtgctgtgacggataagcaactgcgggacacgctcaacggaggaacgttcaccatcgacaatacagaggtgcggtataatattatttatttattatatttagtattggcgaagatgttgtcgtcttcacatccttgcacaatatccggactggtcatactgacgccgacgccttccgtggtctcctgttgtgcgacaggaaaataagcgcacggacaagacgtgctacgccactctggaaaacgacaccgtgactgcgatgattcgagaagggactcggatgggagagctttgttttccacgcaggggaaaccacctccaatatgggacattgaccggaaaggaagctgacggcgttgcgtggtcgggcagcgagtgcatgctatttgccaaagacggcggaatgacaaacccacacgtggacgtgcaatctgtcccgggaggaacagggagaataatccacatgcccgcagcgggagtcattcgcagagtcaactatgttgaagaaaataggccggcaaaacaggccatcgtggtgcatgcggacgatatgtcgagggtgattgaaactctgaaaatcaataccaagaaggagtccgccagtcagtacggcggtccgccgcgaacgcttccggagttcgcgagggtgttgaaatccaagggaattcggtttgttgtgatgaactttccttcgcgctgctcgtacgcccttccagcgaggtgtgcgcacgtgtttgtcacgatagggttggttgagagctcggcttggcaccctgtttacaagcaggatatgtgatatccaggattttttttcggcaccatgcacttgattgtggtcgggtagcgagtgcatgcttttcgccaaagacgggggggggatgaccaacccgcacgtagacatgcagtggtggagagcgcggcatggcaccccgtgtttaagcaggacatgccgtacccgaagttgattgcgtaacacttgaagtattttaagggcgttttttctcgtcactgaggtcacaccattcctgccggttttactccaacccgtggtctcacaagagagctcctaacgatacttttgcctacgagagctaggccctctttcatgcgtgcacacgaactggcgctacgggggctcctgcactccaacgatgcttggtggtacaaggacgtcctccgacctttttcaaaagaggcaaatatcaagtgtctcgtgaataaggagaacgccaggtacgcgtcaagcgagcatggctacctctcgagtctgcagggaagtggtccggacaagtgcccctggatgattggcgagagtttcttgacggacggtgtacagatcaagcttttacttgtgacacttgaacatggaaggaaagctttttccggttccagcgagctgaacgaagcggggtacaacaaactgccccgggctgacgctcagctagaaagccttttgaaagagggaagaggggtgtacaacatatccagccttttggagtcgacaagcatcagggaagacgtcatcgtcatgtccgctgacccgggccaggccaaggtgatcaacgtttcttcggctacggctagcacttgggcaaagcaagaccctggcgtcatcctcaaaacttcgacgtgtgttttcggggacgattatcgtcgtgacactcttgcatcacgttcagacgagtacgagacgttcaggcgcaaggaccagccgtacggagtagccatcgatcgtcttggtaacgagaagaaaagaacttcatgcctcgcaacgttcatcaagtactgcagacggtggtgtgcaaatggtccggtgttattcctagagactttgcagacaggaaggaagttcatgaggtttgaccgtttcagagctacgcagaagacactcgccaagattgcggacaagtacatgggacacgtcgaagacacttgcagggtcatgttgttcggaaaagcgtcttttcgtgcgcagaaaggaagggcatctgcaccaaggaaagctttgatcagagagatggccagtagaggcgtggtgttgatggtgaaggagtacaacacttccaagaaatgcccagggtgtggagaggacacggtcgaggacaaagaacggagaatccggagttgcaaaaactttaagatcggatcaccggaagagtcctgtagacttcaccgcctgacaccagagtttgaaatggatcgcgacgacgtagggtcgactaatatcggtatgcgtggtttcggccaattgctcggtcaggagtggttttagggattttttccggattttcacttgcggataatactttatagttggttttcctaaagttgacaatggtgatcttgacaaggagacacgtaaagtactgatgcgtttactggagataaacagcatgttggacggcactgagtcgttcggagaagatggcaaggacgagggcttgggcaacggactgttttcctatttccttcgcacagacgttgcccccaaggaggatgcatctagacgaccctgttcttactggagcaatagtcccgagaggaaagaattctcggagaaggtcgctatcgcatgtgcgaaggcgcagatcccgctcgtactggagggcgacgcacccgtacgatcaccaatcactaatatcaacttaagaaaaccggaactattaagttgtagtgaacaaaaacagatagaaacaactaagttgtctcctcaagggtccagcttttagggttttttaaacctcggaatatcccactgtttccaggcaagtcgtttgttgaaacttcggttgcgaaagcttgtcgtcgtttcttcgtagcgtgttgatgttgtagacctcgtgtagccgtgttgtgatgtcggccttcttctttctcttttttttcttcttcgtcttcgaatttgtagtggtggttgccatggtgaaggtgaattgtgagcagcgtgggctaccaatacactcaaatgtttacgtataaaattgaaaaatgtggtctttcttctagatcgtttcgagttggtaagattcgccaaattgttctagaaagcttaagttgataacaatgtcaccaatgggcgagatgatgaagtacgccgctggtaaaggtgtggcccgcattggccacatcggcaaaacgtctggacgagggcctctcacactgacaccgggcttgacggatgcctggcgccttggtgatgtgacgggcaagcaactgcgagacacgctcaacggaggaacgttcaccatcgacaatacagaggtgcgtagatgttgtcgtctgcctacaattaaaaattgaaaagtagaaagcacaatatacgaactggtcatactgacgcccacccccttccatgatcgcctgttgtgcgacaggaggataagcgcacggacaagacgtgctacgccacgctgaggaacgacaccgtgactgcgatgattcgagaagggactcggatgggagagctttgttttccacggaggggaaaccaccaccaatgtgggacattgaccggaagtgaggctgacggcgttgcgtggtcgggtagcgagtgcatgctatttgccaaagacggcggaatgacaaacccacatgtggcattgttatcaacttaagctttctagaacaattttgcgaatcttacctactcgaaacgatctagaagaaagaccacatttttcaattttatatgtaaatatttgagtgtattggtagcccacgctgctcacaattcaccttcaccatggcaaccaccactacaaaatcgaagacgaagaagaagaaaaagagaaagaagatggccgacatcacaacacggctacacgaggtctacaacatcaacacgctacgaagaaacgacgacgagctttcgcaaccgaagtttcaacaaacgacttgcctggaaacagtgggatattccgaggtttaaaaaaccctaaaagctggacccttgaggagacaacttagttgtttctatctgtttttgttcactacaacttaatagttccggttttcttaagttgatattagtgacatgtggacgtgcaatctgtcccgggaggaacagggagaataatcgctatgcccgcagcgggagtcattcgcagagtcaaccatgctgacgcacacgggccggcgaaacaggccatcgtggtgcatgcggatgatatgttgagggtgattgaaactctgcaaataaataccgacaaggagtccaccagtcagtacggaggtccgccgcgaacgctgccggagtttgcgagagtgttgaaatccaatacggtttgttgtgatgaattttccttcgcgctgctcgtacgcccttcccgcgaggtgtgcgcacgtgtttgtcacgatagggttggttgagagctcggcttggcaccctgtgtacaagcaggctatgtgatttccattcgggtcataacgtttgacgagagatgtattttgtgggggtgtccaacccgcgcgtggacgtgcgtagacgcgcgtgtacatgcccgcagcgggcgtcattcggagagtcgtacagcggtaggctcaccacgctccccgagtttgcacgagagctcagcggggtggtagagagcgcggcattggcaccccgtgttcaatcaggacatgccgtacccaaagtaaccattgttatcaacttaagctttctagaacaatttggcgaatcttaccaactcgaaacgatctagaagaaagaccacatttttcaattttatacgtaaacatttgagtgtattggtagcccacgctgctcacaattcaccttcaccatggcaaccaccactacaaattcgaagacgaagaagaaaaaaaagagaaagaagaaggccgacatcacaacacggctacacgaggtctacaacatcaacacgctacgaagaaacgacgacaagctttcgcaaccgaagtttcaacaaacgacttgcctggaaacagtgggatattccgaggtttaaaaaaccctaaaagctggacccttgaggagacaacttagttgtttctatctgtttttgttcactacaacttaatagttccggttttcttaagttgatattagtgaaagtaacattttgcggttaggcgatctttttttatcggcttttaaaatgttgtactgaatgtaacatcccttcgagtcgtgacgagaagcttcagcaaagtcactctatcgactatgagcacaggcggggtcctcaacttttccgagctggagctgtacgataacgatgacaataacatcgctctcctcggaaccgcctccgcgacctccatgatatatggctctgcgggtttaggcaacgatggtatcacagatcatgtattcggaggccctgacaatccagttttacataccgagggttcggcgatatggacgcttgacctggacagaagttatctcttgacggaactccaaaaggcggatagctttgttttcgataacaaaaagtgtgtagtgcaaagtgcttaatcaaggccttcgtgtcgcgcgtcgtatgacgatggagcatattctcttgaaaataatgccttcagtatatcaacagtaaacaatgctcaccaaaaacatctggtctcagatcggggtaaaccccgcggatgcccttttaccaccagtgcacaatctgggcatgatcatccttcgggaagagttgacggaagccgaaagcgatttgcacgccgcgcgcgtagcactgaaaacactcgaagaagccggtgccagcggtgacacgagcgacctctatacagcgatgtggaagctacaaaaaaaagaacaagcatactttgcgagacgctacttgcagacaaacaaggccgtgcttcggggatggcacaaccaagtttccaagtacgaactctcgggggaaaaggtggggcatggagtccagggagttgtctacggcgtgatcaaccacccggacaaagttgtcaaactgtatcctacacgtttccagcttgcacacaactctatcaccacgaagcaattcgtctacgacaagaccgcctccgacaacgggttcggtcccaaaatatacgagatttcttccgatggtcgagtcgttgacctgtcggacaaaagcacagtgcccaaatatcgttataaaagaaattttatggtagtcatggaaaggttagcaggtatagacatggataaacagtatgttggaattgttaacgtgtggaagaaaatgagacaacacgggctctttagtggagacggattctatggatactcgcttcaacacaaggcaatcgttcatgcagattttggtgcagtatggaaaataaaagacgatgatgagttcaaagatgcagtgtatgaacacttggaagaacgcaaggacagcaagggccttgagccggacattgcgaaaagatacagagacgagttcccgggagacccgttcactcaaggcatcttggtaccagtgttggcaaagttaggcatctaatctattaacacgaaggtcgccggacggagtgcagttttgctttgtttaaatattgacgtgcgttaagataccacgaaatggatactctgacaacaagactcatggcccgcagcggtctcagcaacgccactcgtcctcccgcgcgcagcacacccatggtcaaggccggtatcgggctcaatccgtccaacccactgcttcctcccgtgcacaacttgcgcatgatttatctgaaggaaccttttggggatgctgaaaaggatttgcacgcggcgcgtgtagcacttaaagcattggaaacgactaacgacgacaccaccaggaaagcgctgtacaaagcaatggcgaaactacagggaaaagaatcacattactttgcgaccagatacatcggcagagacaagccgcttgtcctaagtggctggaagtcacacttcttttcgcacaaagcccacgacttgtttaaaaaatcaagtattcgtttttatttccccccttccggtatgcatcaagacgccatcgatgccgcagaaataagcttttatgctgcggaagacctttgggaaatggaccaagaattcctagagcctaatccggagccgaaagcgtggttcgatttgaggaaaggcgatattaaaatggatattgccagtattgaacaagttattcaaaatacaaacaccacatccaatgatgacattacatctatgaatgaatctcttgccaacgcgaaaatcatacaaaggcttgctctcctagtggataacgtacgagaagttccgcacgatttgctgtagttgtgaacatcggacgaaacgtagttttgtattttttaaatgttgacgtgtgttaagataccacgaaatggatactctgacagcaagactcatggcccgcagcggtctcagcaacgccgctcgtcctcccgcgcgcagcacacccatggtcaaggccggtatcgggctcaatccgtccaacccactacttcctcccgtgcacaacgtgcgcatgatttatctgaaggaaccttttggggatgccgaaatacatttgcacgaggcgcgcgttgcgctggaaagtgtccaagctggtggtccatcggcacccttgtacgcagcaatggctaagctggaggtggccgaacgagactacttcgccagacggtacttcggtggagaaaaagctatactgaaaggatggaattgttctaaattcaaacaaaaaattaaagaactaatcagtaccgcctcagcaagatccagtttcttaaatactaacagtacacggtacgacacccgagcaacaacagctgcaggacaagcttcagcagcgtctctccagcttaaattgatgaacaataaatggtataccaccgccggcaaccgacaacaaacaaaaccaacaacatttggcaacaattttaccgcaattgaactcgcgattgggcgcattaacaagtatctgggcgaagtgttggccttaccggactctgacacaaaaaagcaaccttccgttacatccatcaaagattcccttaaacacgcaaaaatatgtcagcgcctcgctcgactggtcgaggccaaccagtgtgatcttccggatgacgtgtaaacatcggacgaagtgtagttttgcttctttaaaatattgacgtgggttaagataccacgaaatggatactctgacagcaagactcatggcccgcagcggtctcagcaacaccgctcgtcctcccgcgcacagcacacccgtggtcaaggccggtatcgggctcaatccatccaacccactgcttcctcccgtgcacaacttgcgcatgatttatctgaaggaaccactcacagatgctgaaaaggatttgcacgcggcgcgtgtagcacttaaaacgttggaaacgacggacaacccagcaaacagggaagcgctgtacaaagcaatggcgaaactacaaggaaaagaatcacattactttgcgaccagatacatcggcagagacaagccacttgtcctacgtggctggatttcgcacaactttacggacaaggtccgcgagttggtgcggtcggctgcagtacgtcagatagctaaccgaggtgacccgaaagtgacaccttccacacgtcaaggtgtcgctattacggcactactttccgggatgaacgacgatcgcctcgacccaacgaaaacgaacctcccgcgtgcacgatacgagaccggtcttgctgtgatcaagctaagagtggctactattgacgctgaccgtcaatccatgacagtcggttctcatagtacagctcaagcttatgtcataaagaagtcattagccgaatctcagcagtgcatgaggcttgcggaattgctagtggacaacaaacgcgaagttccgtacgacatgctgtagttttcagtggaactggttggtgccggggagcaagtagttacacaagagagactggtaatttttccaccaagacgttaccgaggtgctgcgcttgagtcacacaaatcccacaatattctgaaacaccccgaattccaccagaaaggcaacttccaacaccaggcgatcaccgtcatcaccgtcgtcggcatcaacaccgcgcttgcgcaacaaaatgaagccccggcgcttggcccagttctcttcgcaaacacgcgctgcgatcaatccgcggaacggctgcctctgaccccaaaaagtaccagacacccgtctaccaccgttgtcgaacgggagacacgacgcccccctctccaccaaccagtcgaaacgtagccgaaggtagtctacgctctcagtcctctcgctcaggagagtcatcatgggagtgaagccgaattcgtcctgcacactccattcctctggcgacagattttgagccaaggcctgaaatacgatggaagagtgagtctccgccactcgatggagtgcggtgttccgcaaccctctctcccaatcccaaacaaacctggtcctatccgcaccaagactgatcaaagcagataccacgaaagggttgcgatgcacgcagttcgccagagtgccacatcggttcacgctcgccccgtacacatctaccagtatccgtatgcccgacatgtcctgttcatgcccgtcgttcgacagccgcagagctgccgcgttgagactcctgtctacaaactcttgatccggagcatcccgcgcgacaatcgcccgcatcgtaccacggaagccccttgcagcagcgattgataatcccctcttccacacgcccttgtgggaataatacgcggaagcacccgcccaaaccaacgccatcccgagattatcactcgcattccgcatcaacaaagaattcccatcgcgatccttgtgatccaggtcgccaccgatagcttcatacagttgcaacaccgtcaaaaagtcacccgcacaggcgtcgaaggactccaggttgaagagaacggttcgctggtgcacatcctgcgaatgcacatttagcatgccgtgggaaagaaggtaccagaagtgctccatgtctgagagggagggattgaccgggggcggcgagggaaagggaaagggggcaaacaatgtttaccaataactttgtaggcgtggtgctcaccatttttgcgacactgttaatagcatcatcatcaccatgccatctaccaccagcacactctacaacgccgcgtggactgggtcggtcgaacgcacgcttgatctgttgtcggatggattcaccgaaatcgaccggcggtgcgaagaaaatggggtgacggctctcatgtgtgccgccaacaaggggtatctgcgtattgtcagggtgctcctccgattcggggccgacgtgtcggtcagtactgacgatggacacaccgctctgtacttcgccatcggtggtcgaaacctcgccgtcaccaaagcactcatcggggccggtgccgacgtcgaagcaaaggcagacttcctccacccggaccaagaggtagttcaaggtcagacacccttgcacttggccacgggagaagggttctgtgacgggatggtggcactgatcgacgccggtgcgaatgtcgacagtcgcatgagcaacggatcgacggcaatgtacatcgccgcatgcaccgggaacttggacgcggtcaagattctcctacaggaaagggcaaaccccatgctatgcgtcggtccaacacatcctctcgacatcgccacacacgggggacacctgggggttgtacaggagcttgtgcagagattcggagtggatggctgttccgacgaaggagccataggcgccctggagacagccgcatacgaaaatcaccaaactattctgacgttcctactcgacgccggtgtcaaagacacggacggcacggccctgtgtgatgccatcgagggtcgcagcgaggcgtgtttgaagctgttggtgggccgacgaggggggaatgctcacatggcggagagccattacacgaacacggacagcgcctgtgacaatgccctcgtctgtgcattcggtgcgggacgcgggtatgctccgaggatgactcggttcttgcttgaccacggggccgataccaagaagaaagtgcgtttcgaaataaaagggttgggtgagatagcaggcggacccctggtcgccgccaagatcattctacggcacgagcagacccacttcgaggacgcagatgaggagggggtggacgggctaaaggaagtcgttcgtctccttcggcaggaggatgcagttcacgccaactcctgggcgtggccgatcgacaccgaccgcgccacgaaaatcgtacgcaagacgccggccttcaaaatacaccccggtccgaggccatgtgtgctgttggcggcgatgggaaggtgcgtggagtggtgtcgatatccttaggtagtaacatcaatagggaaagtgtgaatagaagacgacctgaccccgatgatcctcgtgtatcgccggcaggtacatcaacaaacaggacggcgcgttcgaagggtaacgcttcctcggatgctcatctctaacgattggtacatcacggaaaataaaatattgcctttgaattataaatacaatttgcagccatgtctgtcacatggaccaagagcgccgacaacaagtttgaggtggcgacaaaggagcacttgctacagatcatgaaccaaggcgccttgtacacagacagtggtgtaatacccaccaactactgggggtctgactatgtgcagacgagcgacatcgacttggtggacgatcacgcgagcatccttccgatcggggactctacgaccgcttttacaggggagtacgacggaggtcttttcgaaatcaagaactggtcgtattccagcagcaccgagttgtaccagggcttgttcgggagagcgagttctgctaccctgcaacgcatccgcctgtcgggtgtctggacactgagtggttcaccgagtggttccgcgtcaggaaccgctttcatgtgcgggaacgtcactaatggaagcgttgatgatgtagagggagactttgccgaagggtcggtcatgacttcaaccgcagataatcgcggcgctttgttcggctcgatcaccaattgttctctcgaccgtgtgacgttgcgtgggtctgtgaactttgattccagttccaccggagactgtgggggtatgatggggatgatctcctacaacgccacggccactaattggcgcaatcttgcaacattttccaacggcctcagtggcgaaaatgttggtggaatctgcggaaattttgacggttatggggtgacggcatcaaactg

SEQ ID NO: 275 - DNA, 21125 bp, unidentified
  variation 6269..7613: note = n is any nucleotide
  variation 20887: note = n is any nucleotide
  variation 6255: note = n is any nucleotide
  variation 3589: note = n is any nucleotide
  variation 16715..18672: note = n is any nucleotide
  variation 1..1866: note = n is any nucleotide
  source 1..21125: mol_type = other DNA
  misc_feature 1..21125: note = Fanzor polypeptide
nnnnnnnnnnnnnnnnnnnnnnnnnnnnnnnnnnnnnnnnnnnnnnnnnnnnnnnnnnnnnnnnnnnnnnnnnnnnnnnnnnnnnnnnnnnnnnnnnnnnnnnnnnnnnnnnnnnnnnnnnnnnnnnnnnnnnnnnnnnnnnnnnnnnnnnnnnnnnnnnnnnnnnnnnnnnnnnnnnnnnnnnnnnnnnnnnnnnnnnnnnnnnnnnnnnnnnnnnnnnnnnnnnnnnnnnnnnnnnnnnnnnnnnnnnnnnnnnnnnnnnnnnnnnnnnnnnnnnnnnnnnnnnnnnnnnnnnnnnnnnnnnnnnnnnnnnnnnnnnnnnnnnnnnnnnnnnnnnnnnnnnnnnnnnnnnnnnnnnnnnnnnnnnnnnnnnnnnnnnnnnnnnnnnnnnnnnnnnnnnnnnnnnnnnnnnnnnnnnnnnnnnnnnnnnnnnnnnnnnnnnnnnnnnnnnnnnnnnnnnnnnnnnnnnnnnnnnnnnnnnnnnnnnnnnnnnnnnnnnnnnnnnnnnnnnnnnnnnnnnnnnnnnnnnnnnnnnnnnnnnnnnnnnnnnnnnnnnnnnnnnnnnnnnnnnnnnnnnnnnnnnnnnnnnnnnnnnnnnnnnnnnnnnnnnnnnnnnnnnnnnnnnnnnnnnnnnnnnnnnnnnnnnnnnnnnnnnnnnnnnnnnnnnnnnnnnnnnnnnnnnnnnnnnnnnnnnnnnnnnnnnnnnnnnnnnnnnnnnnnnnnnnnnnnnnnnnnnnnnnnnnnnnnnnnnnnnnnnnnnnnnnnnnnnnnnnnnnnnnnnnnnnnnnnnnnnnnnnnnnnnnnnnnnnnnnnnnnnnnnnnnnnnnnnnnnnnnnnnnnnnnnnnnnnnnnnnnnnnnnnnnnnnnnnnnnnnnnnnnnnnnnnnnnnnnnnnnnnnnnnnnnnnnnnnnnnnnnnnnnnnnnnnnnnnnnnnnnnnnnnnnnnnnnnnnnnnnnnnnnnnnnnnnnnnnnnnnnnnnnnnnnnnnnnnnnnnnnnnnnnnnnnnnnnnnnnnnnnnnnnnnnnnnnnnnnnnnnnnnnnnnnnnnnnnnnnnnnnnnnnnnnnnnnnnnnnnnnnnnnnnnnnnnnnnnnnnnnnnnnnnnnnnnnnnnnnnnnnnnnnnnnnnnnnnnnnnnnnnnnnnnnnnnnnnnnnnnnnnnnnnnnnnnnnnnnnnnnnnnnnnnnnnnnnnnnnnnnnnnnnnnnnnnnnnnnnnnnnnnnnnnnnnnnnnnnnnnnnnnnnnnnnnnnnnnnnnnnnnnnnnnnnnnnnnnnnnnnnnnnnnnnnnnnnnnnnnnnnnnnnnnnnnnnnnnnnnnnnnnnnnnnnnnnnnnnnnnnnnnnnnnnnnnnnnnnnnnnnnnnnnnnnnnnnnnnnnnnnnnnnnnnnnnnnnnnnnnnnnnnnnnnnnnnnnnnnnnnnnnnnnnnnnnnnnnnnnnnnnnnnnnnnnnnnnnnnnnnnnnnnnnnnnnnnnnnnnnnnnnnnnnnnnnnnnnnnnnnnnnnnnnnnnnnnnnnnnnnnnnnnnnnnnnnnnnnnnnnnnnnnnnnnnnnnnnnnnnnnnnnnnnnnnnnnnnnnnnnnnnnnnnnnnnnnnnnnnnnnnnnnnnnnnnnnnnnnnnnnnnnnnnnnnnnnnnnnnnnnnnnnnnnnnnnnnnnnnnnnnnnnnnnnnnnnnnnnnnnnnnnnnnnnnnnnnnnnnnnnnnnnnnnnnnnnnnnnnnnnnnnnnnnnnnnnnnnnnnnnnnnnnnnnnnnnnnnnnnnnnnnnnnnnnnnnnnnnnnnnnnnnnnnnnnnnnnnnnnnnnnnnnnnnnnnnnnnnnnnnnnnnnnnnnnnnnnnnnnnnnnnnnnnnnnnnnnnnnnnnnnnnnnnnncgatgcagactactaccgcctcctgggggtgctcgtcgactgcgaccagacggagatcaagagggcctgccgacgttttgatgttggtgcatcagacgacgataggccctcttgatctccgtctggtcgcagtcgacgagcacccccaggaggcggtagtagtctgcatcgagggtgagggtacgttcgataatttgcataagtaaaaacaagaattgcaaaactgttgggtagactgaaaagatgaacaaacatgaacaaacacatttgcttgcgctcgcgttcttaccataacgcgtccgcttggcctcgtccatggtcatctctcgaaggggttttgcatcaagcacaggagcagcagaagcagctttgatggaggcagaagcggaaagatcacgagctgtgcgagctaatctaccggcacaaacggcgcgccgttttttcagatgggcatatctggctcttgcggcgcggcgatcggaagtagcgacacgaacagcatgatcggcacgatgttcggcacgagcagcacgagaggacccattgtatccaacgaagccagcatctactgcttctgcagctcgttgagctttttctgcagagatttttgcctccgcgatggcatcagcagcccgttgttcagctctatcggcagcagcagcatcacggtcagctacccgagcagcagcgccagcggtagcacgggcgatggaaacagcaacacgccgggcttgttcgacagcagcagcacgctcagcttcctttgcaacacgcgaggcttgttcgatagcagcagcacgctcagcttccttcgcaacacaccgggctctcctcatagccgcaacaccgcttgcctccttggcgacagaaatacgacgagcttcgtcttcggcttctttggctgcagcacgcaaagcggcttcttcggcctcctcgatagcagcaacgcgtctagcctcgttggcagcggccacacgctgagcttcctctgcgtcagcacgcaaagcttttcccgcttgttcggtagtggcagcctccgcgatagcgtctgtcgatgaaggatgtgcacgccgaaggtcagggatcgaaaaactatgttgcacttctggctaattcgcctaccagagccttatttttaaccttgaaaaacgatgatggtgtcgcacttctggctaattcgcctaccagagcagagcttatttttaaggacgcgttgagggggaaatggcttatgagtctcaatgatggggggaggcagtgcacgcctcaagaaaaatccgtacatgtcacttagaaacagaaagagtgcacaagaaaatcgcgggtcaactctgataggattaagacgccaaatcatgaacaataacatctgctgctcacttcggcgggttgtccctccagcagcagcggtgggggaacggtttgcggcggaccccactgcagaactttcagcagctgccgcggcagcaccaggagcggcagcaccaggagcagagatgagttgaaaaacgggattgggcggccatgtgtgtgttatgagggtggttgttgtaatagcacaagatgtcggcagaacgaacagcagaacacagagagaaagaaagagggaaagagagagaagagagagacagagagacagagagacagagagacagacagggataacaagagagggaaaaagccacaagagggcaggagggagaagttgtctaattttattgtnaaaaggactcttctcaacctgataccccgaaatacaggaacaataacgcctctggcaaattcgaccgtttcaataaacagtagtctacatcggctatatctgcctcaccaaacttgctatttattgtgggaggggggggaggtcaaatctgcgcggtcaaatactcgaacgaaccgtgtttctttcacgacacaaccagatctcaaagcgcacccaaaacagagagggtgcacgtggtaatctccgacgagtaatcccagcgatgctaggtgtcctgctttttccagctcgacctattgaaagcagattttcgtgtgttgtgtcttctttttctagcccgcgtgggcggacgacttcctaatcaacaacagagtacttctgtgctgatgtcagccgaaccttacgctgccgcaaaatctagggaacaaggattttacgtcccctgactggccacggcgaaacacgtcggcgctcttgctttattgtgacaaaagtaaacttcttgacgatcaactggaccactgttcgggcatgttcacacaaatgccgaggtggatacatgcactgtgccagggattccctaattccccttaacaagtaccgaatccggcgctgcaggggcaaaagttttctggctaccggagtcacgaaggggctagcgacactatgcacatgtcgcgggtgcaaaaaagcgtggtaaagcactggggctgtaccagctgatttttgtctcacgtagccatattatcggatttgaccgaacagtcgttgacttgatcaagtagctaagatgtcacgaattacaaagacacatgaggagttcgcaatggtcaccaatctgattttaaagaacacatacaaaaattcttttttcggggatgctggcttacacgcagctagagacctgcttgctttcccgcccctgtcgaaaagtttgcgcaagtgtcggtagtgaggcatgacaattaccaatccttacgtgtagcctgcgcgattgtcggttacaaggctctgggcgtgtgaaatgctacggtcttcgtagctccgaagtaatcccagaggtgctaggtgtcctgctctccccagctcgacctattgaaagcagattttcgtgagttgtgtcttctctttctagcccgcgtgggcggacgacttcctaatcaacaacagagtacttgtgtgctaacgtcagccgaaccttacgctgccgcattaaatatttacaagtcttgcttcattaaatatttacaagtcttgcttcattgtgacaaaagtaaacttcttgacgatcaactggaccactgttcgggcatgttcacacaaatgccgaggtggatacatgcactgtgccagggattccctaattccccttaacaagtaccgaatccggcgctgcaggggcaaaagttttctggctaccggagtcacgagggggctcgcgacactatgcacatgtgcacgggtgccaaacagcgtggtgaagcactggggctgtaccagctgatttttgtcttacatagccatattatcggatttgaccgaacagtcgttgatttgatcaagtagctaagatgtcacgaattacaaagacacatgaggagttcgcaatggtcaccaatctgattttaaagaacacatacaaaaattcttttttcggagatgctggcttgcacgcaacgaatgtcggtagcatcgatacaagagcctagaaacgacaccggcagccacaaggcgctgttattgggtcttttgaatgcaaataataggttcggggagaacacacgaaaaaacaaactcatcaagaaggaacgaaaacaagtgatcattctgctaatacattttatggttactttccaacacaaacagatttcaaaaagtaccttggttgaaggttcctctagcagaggaagcggtggtggttgctggggcggtggcggcaggagacgcaaaggcgggcgttgcctcagaagtcttgcgtttctttttagtcgtcaacaaaggtgtttcagactcgcgctttgtaggaacaggcgcagttttgcattcgtcaccgtgtggaggggcacctccgggttcgggctgagactctgccgtttgggtgaaggtggccgccttgttgacattggttccctgggcaaggtcggtgtgatgcaacaacattgtcaatggataacacgtggtcacggaaataggtgtatcgttgagacagggcctaaccagatatgaacgatgttgttttgaagatttatgtttacggcgtaccgaatagaactcacaacactcacgttctttacccatgtgcagtactcgagaaacttcggggcatcctctttcaagacattttcgaaatcaggatgttttccgttgtttcgtaggaactcctcaacagtccttgtcacgagctgcttcccatccaatccggggcggtcttgaatgtagcagcagagggtcgagagcgtcggcacaccaccgtagtcgaatgaagccatcctgattttctctttttcgtcaaaaccgtccgccatccggtatgggttaatgcgaagggtgtgtgcaacgatctctgttgcgtccatcgcacgctgctgaccgaacaagaaaaagtcttctttcacctgttacgtgacagaagtaattggcatttcggaacgttttcggatgttccngaatgtagcagcagagggtcgagagcgtcggcacaccaccgtagtcgaatgaagccatcctgattttctctttttcgtcaaaaccgtccgccatccggtatgggttaatgcgaagggtgtgtgcaacgatctctgttgcgtccatcgcacgctgctgaccgaacaagaaaaagccttctttcacctgttgttacgtgacagaagtaattggcatttcggaacgttttcggatgttcccaagtgttcgtacgtaaacaactaaccacatgcagacgactcgccaaaacattcaacaaacaaaatcaaattgactgcacctcaccatttggtcgtcacatccgcgctccttccatatcttctttcgttgtagaagtccattccttcttcgctgtcgagctctcctgttgtctgaaattggttttggttggcacatgcatgccaccttttgcgccaaaaataaaaagaggtgtgtcatgccttttgtccaagagcaagaggggttgtctcctgctttctgcccaagggcaaaacggtgtgtgtctcttgctctttgctcaggagcaaaacggtgtgtgtcttcctgtctgagcaagacgggttgtgtctcgctttttgccttagagcaaacggtgtgtgtctagctgtctgtctacgagcaagacgggttgtgtcttgctctctgtctatgagcaatacggcttgtgtcttgctctnnnnnnnnnnnnnnnnnnnnnnnnnnnnnnnnnnnnnnnnnnnnnnnnnnnnnnnnnnnnnnnnnnnnnnnnnnnnnnnnnnnnnnnnnnnnnnnnnnnnnnnnnnnnnnnnnnnnnnnnnnnnnnnnnnnnnnnnnnnnnnnnnnnnnnnnnnnnnnnnnnnnnnnnnnnnnnnnnnnnnnnnnnnnnnnnnnnnnnnnnnnnnnnnnnnnnnnnnnnnnnnnnnnnnnnnnnnnnnnnnnnnnnnnnnnnnnnnnnnnnnnnnnnnnnnnnnnnnnnnnnnnnnnnnnnnnnnnnnnnnnnnnnnnnnnnnnnnnnnnnnnnnnnnnnnnnnnnnnnnnnnnnnnnnnnnnnnnnnnnnnnnnnnnnnnnnnnnnnnnnnnnnnnnnnnnnnnnnnnnnnnnnnnnnnnnnnnnnnnnnnnnnnnnnnnnnnnnnnnnnnnnnnnnnnnnnnnnnnnnnnnnnnnnnnnnnnnnnnnnnnnnnnnnnnnnnnnnnnnnnnnnnnnnnnnnnnnnnnnnnnnnnnnnnnnnnnnnnnnnnnnnnnnnnnnnnnnnnnnnnnnnnnnnnnnnnnnnnnnnnnnnnnnnnnnnnnnnnnnnnnnnnnnnnnnnnnnnnnnnnnnnnnnnnnnnnnnnnnnnnnnnncgggttgtgtcttgctctctgccttcgagcaagacgagtcgtgtcttgctctctgtctacgaaagacggtgtgtgtcttcctgtatgcctaagagcaaggcggtgtgtgccttgctctctgtctacgagcaagccggtgtgtgtcttgctctctgtctacgagcaagacgggttgtgtcttgctctctgccttcaagcaaaacgggttgtgtcttgctttctgtctacgaacgagacggtgtgtgtctttccctacgagcaaggcgctgtgtttctgcttcctgccttgaagcaaaacgggttgtgtctcgctttctgcctaagggcaaaaaggtgtgtgtcttgcgctacgagcgaggcgctgtgttcctgcttcctgcctttgagcaagacgggttgtgtcttgctttctgcctacgagcacatccaggcggtcatagcttcatgctcgtgtgtgtgtgtgtgacacaacctcgcgggaccacagagagagaggtattcccacggataacatacgcgtgaggccatgttgcatcgtctatgccaagtctgtgtgtgtcaccgcacgttgcatggtccgtgaccgcatcctctcaagaaccagaggtactcccgtggacaggcgtacatgcgaggcgggattcaagaacacgaaacatgtggcagcacatccaggcggtcatagcttcatgctcgtgtgtgtgtgtgtgtacgagcaagatggtgtttgccttgctctctgccagagcaagacgggttgtctcttgctctctgcccacgagcaagacggtgtgtgtcttcccctacaagcaaggcgctgtgttcctgctttccgcctttgagcaagacgggttgtgccttgctctctgcctacgcgcaagacggattgtgtctcgctttctgcttaagagcaagacggtgtgtgtcttgctccaattatgaacctcttaccggtgttgcccatttggctgaatcggctgttcgatgcttcatcacgacgtgaagtagcttttccccgggcttgatttccatttttggtgttcctagcgattacgaagcgcgttattttagcaaatttcgtttcagatacgaaaatggagtgatgagtcgggaaaacgatgacacgatgaacattgctattttttcggagagagcgactggctcaaaaacatagctcccccagcagcgcaacccgccacgagagagtacgtagagtgagacgggctacaagcgagcatggctacctctcgagtctgctaggaagtggtccggacaagtgcccctggatgattggcttgtgtcttgctctctgtctacgaaagacggtgtgtgtcttcctgtatgcctaagagcaaggcggtgtgtgccttgctctctgtctacgagcaagccggtgtgtgtcttgctctctgtctacgagcaagacgggttgtgtcttgctctctgccttcaagcaaaacgggttgtgtcttgctttctgtctacgaacgagacggtgtgtgtctttccctacgagcaaggcgctgtgtttctgcttcctgccttgaagcaaaacgggttgtgtctcgctttctgcctaagggcaaaaaggtgtgtgtcttgcgctacgagcgaggcgctgtgttcctgcttcctgcctttgagcaagacgggttgtgtcttgctttctgcctacgagcacatccaggcggtcatagcttcatgctcgtgtgtgtgtgtgtgacacaacctcgcgggaccacagagagagaggtattcccacggataacatacgcgtgaggccatgttgcatcgtctatgccaagtctgtgtgtgtcaccgcacgttgcatggtccgtgaccgcatcctctcaagaaccagaggtactcccgtggacaggcgtacatgcgaggcgggattcaagaacacgaaacatgtggcagcacatccaggcggtcatagcttcatgctcgtgtgtgtgtgtgtgtacgagcaagatggtgtttgccttgctctctgccagagcaagacgggttgtctcttgctctctgcccacgagcaagacggtgtgtgtcttcccctacaagcaaggcgctgtgttcctgctttccgcctttgagcaagacgggttgtgccttgctctctgcctacgcgcaagacggattgtgtctcgctttctgcttaagagcaagacggtgtgtgtcttgctccaattatgaacctcttaccggtgttgcccatttggctgaatcggctgttcgatgcttcatcacgacgtgaagtagcttttccccgggcttgatttccatttttggtgttcctagcgattacgaagcgcgttattttagcaaatttcgtttcagatacgaaaatggagtgatgagtcgggaaaacgatgacacgatgaacattgctattttttcggagagagcgactggctcaaaaacatagctcccccagcagcgcaacccgccacgagagagtacgtagagtgagacgggctacaagcgagcatggctacctctcgagtctgctaggaagtggtccggacaagtgcccctggatgattggccagagtttcttgacggacggtgtacagatcaagcttctgcttgtgacactagaacacggaaggaaagctttttccgggtccagcgagctgaacgaggaggggtacaacaaactgccccgggctaacgctcagctagaaagcctcttgaaagagggaagaggggtgtacaacatatccagccttttggagtcgacaagcatcagggaagacgtcgtcgtgatgtccgcggacccgggccaggccaaggtgataaacgtttcttcggctacggctagcacttgggcgaagcaagaccctgacgtcatcctcaaaacttccacgtgtgtgttcggggacaattatcgtcgtgatactcttgcatcacgttcagacaagtacgagactttcaggcgcaaggaccagccgtacggagtagccatcgatcgtcttagcaacgagaagaaaagaacttcctgcctcgcaacgttcatccagtactgcaaaagttggtgtgcaaatggtccggcgttattcctagagactttgcagacaggaaggaagttcatgaggtttgatcgtttcagagctacgcagaagacactcgccaagatagcggacaggtacatgggacacgtagaagacacttgcaggatcatgttgttcggtaaagcgtcttttcgtgcgcagaaaggaagggcatctgccccaaggaaagctttgattagagagatggccagcagaggcgtggtgttgatggtgaacgagtacaatacttccaaaaagtgcccggggtgtggagaggacacagtcgaggacaaagaacggagaatccggagttgcaaaaactttaagatcggatcaccggaagagtcctgtagacttcaccgcctgacaccagagtttgaaatggatcgcgacaacgtagggtcgactaacatcggtatgcgtggtttcggccaattgctcggtcaggtgtggttttaaggatttttccggattttcacttgcggatgatactttatagtcgatttttctaaagttgccaatagtgactgctgcaccatccttgccgccgtgatttatgggtgtacacgcatgcttggaagatctttgaccgcagagagccagttgagggggaaaaaacaaaaaaagtcaaattaacccagtcacgtaagggttaagtacaaagcagctgcctcgctccgaaacagagagaatgtggggaaggcaacccgaggcccacccgagacaccctacaagacaattacacagcaggctcctggtgtcaacgcgtgtgcgtgagtccgggtgcccttggccgccaggcatcgcgtgaggtggacaccacacgctcatttggagagagctgtgtgccactcaaatgcaaaatctctaaaaacaacacacactcacacgtccgccgcttaccttgcgcggtgcccggcggccgtggggccgtcgtagctgctgctgctgctgctgctgctgttgctgctgctgcggtcgctgcttgcctctggcgctcttctctctctctctctctctatctctcctccctcgcgaacacgagcgggacagaagagattgcgcagagtgtgggcggcgcgtgccagcttcactctcgactatttccgacgcgagctcaagaaaccagacattggactagggtccacggtttttccagaacccaacgaaagcgataaggatgtattcaatgcgcagattttgtttaataaattggctgtcaaagtttttctttcccataattggaagtcgtttgcaacaatttctccggatataataccacccgattttattgaaggcttacccacaagatatcactgttatcaagttaagagtttctagaacaatttgacgaatcttaccaactcgaaacgttctcgaagaaagaccacatgcttcaattttatatgtaaacattggagtgtattgatcgcccacgctgctcacaattcaccttcaccatggcaaccaccattacaaaatcgaagacgacgaagaaaaagaagaggaagaagaaggccgacatcacaaccctgctacatgaggtctacaaagtcgacacgctacgaagaatcgacgacaagctttcgcaactgaagtttcaacaaacaacttgcctggaaacagtgggatattccgaggtttaaaaaaccctaaaagctggacccttgaggagacaacttagttgtttctatctgtttttgttcactacaacttaatagttccggttttcttaagttgatattagtgacaagatatagcgcccggaaggagtagaaggcctttggggcctacccctggatgtccatatttagaaggatccagcaacggaatcatagatgatgtaggacaggacgatggcggtcggatctttggattctgtaatgtagagaaccatcagttgtattggaattggtataatagttttttgtaaggcgtggccctctcgcccggtacgttaagaaattagcgtcgtcggaactgaattatttcgttggttcgttcccggcagtggctgaaaaattcagcactcacatgcgaacttacttgaacaggtatatcaagtgacgttgaatgatgtggcgcttgtaacacgttgtcagatttgcaaaaaagcgtttttattatatttagatgttgtaaagaacgctatggatgaattgaatgagagtctggggcgaaacgcgaaggagcgtatgaccgacgtcactctcgactatttccgacgcgagctcaagaaaccagacattggactagggtccacggtttttccagaacccaacgaaagcgataaggatgtattcaatgcgcagattttgtttaataaattggctgtcaaagtttttctttcccataattggaagtcgtttgcaacaatttctccggatataataccacccgattttattgaagtcatcgccgacgcccatgtcatgcacacaatcaagtacccgatatacaaagatcaatcggaaagggttcaccttgtcgaaacgacacaggaatttatcgatctcacatggcaactcattgtgaaagtgtgtttgcctcggtttgaaactagtgtacatgtgtctcccgatgatctctcctctgccagcgtaagaaaatggctttcatcggcaccctttctgcaacaattggctgcaccaggaaccaacgatattgagtatttcttggatccgggcagtcgcacaaatcaagagttgttcgaggtagggaaaaatctagaggctcggtacccacgcatgtcgatcaaaatgcacactggtaagccagaggtaagagagtttgacgacggtagacgtgatttagctatgctcgccacacttggcaaggatgtttcgtgggcgacgacatgggatatagtatccagcatactgaaggctaacggtattttcatatacgcggagatataccatgattcgtccaccccgtttcggtttcagtacgcattgaaggacggcgtggaattggaatataccccggaagacattgagaagataaatgaatttatgagtgtggttcttgaagacgtgagatcaaacaaaaacctggactcattggttgggctagtgcgttcgtatattctttagcgttttcccatggacattgtctagagggttctgtcaaaggtgatgctacctttagcactaccgcagtgatttacactgtaaaagactacacctcaagagtagaaatcgacaacatagaatttattcttgggcgggagtcgggaaataaagttgccatggtactcagcccggatttgctcattgaaaaagccagtagaggacacctccattttgtcggtgatgactcgattgatgtctcgtacctgggtgatgcaccggcctctgttgtggagacgcatgaaaacgtgcagcgggaaacggaagaccttgcgaacctcggcaaagttgtcgatttcaaggaatcacccgaatcggttattcagaagaatggcgtcgatttgtgtcacgttgtattcgggaactctgataatttattccaccgtaaaaatgtcacaatagcggtttttgaatccctagccacgacgaagggtagtggtttgttcggtcgaataagcgatctgttcgccgacctgatcaatcacagggaacgcctcgccagcgagaagggtcagagcgcgctggacactttgttgaaacaattggatacactccatggcatacgacgggaatacactgtatgttccagtgaagaaggcacttgtctggcaacagacaccatccataccactactctactcgcaaacacagctctcgcacatctacacgatctggcgacacccaaactagcatcttcaatcgatgaagttgcaggggacaacgtagatgggtggaaagcgttcgaacaggctcgagattcgaacgatagaaatcggaataaaatggcgagggctgctgtcacgtgtgctgcattgatagtggagaacggaacctatcctgacatttttcatgcttatcatgcgagaaaggcgcagcatggtagctccgatcggtttcctcttgggattgggagctttatttggaagttctttatggatgttggtgactcgattaaaagcttcgcggatcggaaaagttactttgagaacttttcaagggtaattttaaaggatcacgttgaagacgtgcatggtatgcgagtcgcagacaccataaggttcgcccacgatgtctcgctttgtatggaagttcaaggtgggagaagcatcatgggcgctgtacggggagagcgtttcttttacagacacgagcatgttgttagttggcacctcctcatgtacgctgtgatctgtctgatctgtagaattatattcaacttcataccaggacattacaacggtacacagaaaaaatccgtggcgaacatgttacatctccttgtgggtatttcgggactcactatggttctgccgttggaagccgtccacttggtcgtatgggttggtgtcacatatgctacagaatccttttatggggctcttttagcaagttctgaatttcccaaaaaggtcgcgagttggatcatgcgcccatttagtggaaaagagagcaatgaatatgtgccattgccggatgacatacgatccgcgagaaatgctgcacgtaccacggggcaccctgtcgaaaataattggaaaagtcgacctgcgagaagaagaaatcctatttctagattgggttcaacttagtccacaaattaatcatgctatgaaagtatcggaggatatctatgggtagcagttcggtaggaactcggtcagtcacctgctgtatcttgctttccatctctttggtaagagcttctcctctttctttcgccactgtctgcggtggtgtttttttacttctctaaatgagaccaatgccagtgatttgttcctcttgtgatcgtttagcctctggctgcttctcccacctttccaccagcaaatctactcgtttaagcaccagttctcggatagttttgatctctatgacttcgttgtcgagacgagtggcacgtcttctatactcagagaacgatttaacagttcggtatacagtcaaatcatttagagtctcgatatccaactgcgaatcctctgtttcaaacagtcctttgacattctcaatccccaatgagtataacgacggatcataccctttcggtgctggttccggtactggttccggtactgaaatcatctctagtccatgagtgtcactgggggtgagcagttgccgcaactcatgaaatccattcgatgttgtttgcgacaaggtagctagttccagtttgacatcattgatagcagtatcgtttccagaagcgggtcgcacaccttctatctcttttctcaccacgtcgcgtagcacttgcttggcagcttcgtcaaactcaattgtttgagaagtgcagacgacaggacccgactcacatcctctatttgaagcaacctcaccgagcttcagaacgattctgcttttgagatcctccatgtcatccttggatagcttcaagtctctattttgtatcaaagagtcgatgttgttgttgatattctctattacacgttcgtgcttaccgtcgagtttccgtagctgttcgccgagttcacattgttcatcatgagaagtattctttttcccgatattagaatacaacataagcatcggtaaccattctagaccaagtgggtagctatggttgtgcatgggcacagtgttgtttaccaataatacattcattatatatccagaaaacaacgaatcatgcgcgtggtggtgtagttgggtcggcactgatggggtcaggcgaaaaaatgtagatgcgcgggcctctggccgtcggcgtaggcagcgatgcccatctcattttttgtgcgcggaggcagacaccgtcagaaggtggacgggaactatgtacacggccctaggttggctagagggcgctgcattgcctcagtaacctggcttcgccatcaaaggaggagggagcaggtggcgacgagctgaactgggctggttgacccctnnnnnnnnnnnnnnnnnnnnnnnnnnnnnnnnnnnnnnnnnnnnnnnnnnnnnnnnnnnnnnnnnnnnnnnnnnnnnnnnnnnnnnnnnnnnnnnnnnnnnnnnnnnnnnnnnnnnnnnnnnnnnnnnnnnnnnnnnnnnnnnnnnnnnnnnnnnnnnnnnnnnnnnnnnnnnnnnnnnnnnnnnnnnnnnnnnnnnnnnnnnnnnnnnnnnnnnnnnnnnnnnnnnnnnnnnnnnnnnnnnnnnnnnnnnnnnnnnnnnnnnnnnnnnnnnnnnnnnnnnnnnnnnnnnnnnnnnnnnnnnnnnnnnnnnnnnnnnnnnnnnnnnnnnnnnnnnnnnnnnnnnnnnnnnnnnnnnnnnnnnnnnnnnnnnnnnnnnnnnnnnnnnnnnnnnnnnnnnnnnnnnnnnnnnnnnnnnnnnnnnnnnnnnnnnnnnnnnnnnnnnnnnnnnnnnnnnnnnnnnnnnnnnnnnnnnnnnnnnnnnnnnnnnnnnnnnnnnnnnnnnnnnnnnnnnnnnnnnnnnnnnnnnnnnnnnnnnnnnnnnnnnnnnnnnnnnnnnnnnnnnnnnnnnnnnnnnnnnnnnnnnnnnnnnnnnnnnnnnnnnnnnnnnnnnnnnnnnnnnnnnnnnnnnnnnnnnnnnnnnnnnnnnnnnnnnnnnnnnnnnnnnnnnnnnnnnnnnnnnnnnnnnnnnnnnnnnnnnnnnnnnnnnnnnnnnnnnnnnnnnnnnnnnnnnnnnnnnnnnnnnnnnnnnnnnnnnnnnnnnnnnnnnnnnnnnnnnnnnnnnnnnnnnnnnnnnnnnnnnnnnnnnnnnnnnnnnnnnnnnnnnnnnnnnnnnnnnnnnnnnnnnnnnnnnnnnnnnnnnnnnnnnnnnnnnnnnnnnnnnnnnnnnnnnnnnnnnnnnnnnnnnnnnnnnnnnnnnnnnnnnnnnnnnnnnnnnnnnnnnnnnnnnnnnnnnnnnnnnnnnnnnnnnnnnnnnnnnnnnnnnnnnnnnnnnnnnnnnnnnnnnnnnnnnnnnnnnnnnnnnnnnnnnnnnnnnnnnnnnnnnnnnnnnnnnnnnnnnnnnnnnnnnnnnnnnnnnnnnnnnnnnnnnnnnnnnnnnnnnnnnnnnnnnnnnnnnnnnnnnnnnnnnnnnnnnnnnnnnnnnnnnnnnnnnnnnnnnnnnnnnnnnnnnnnnnnnnnnnnnnnnnnnnnnnnnnnnnnnnnnnnnnnnnnnnnnnnnnnnnnnnnnnnnnnnnnnnnnnnnnnnnnnnnnnnnnnnnnnnnnnnnnnnnnnnnnnnnnnnnnnnnnnnnnnnnnnnnnnnnnnnnnnnnnnnnnnnnnnnnnnnnnnnnnnnnnnnnnnnnnnnnnnnnnnnnnnnnnnnnnnnnnnnnnnnnnnnnnnnnnnnnnnnnnnnnnnnnnnnnnnnnnnnnnnnnnnnnnnnnnnnnnnnnnnnnnnnnnnnnnnnnnnnnnnnnnnnnnnnnnnnnnnnnnnnnnnnnnnnnnnnnnnnnnnnnnnnnnnnnnnnnnnnnnnnnnnnnnnnnnnnnnnnnnnnnnnnnnnnnnnnnnnnnnnnnnnnnnnnnnnnnnnnnnnnnnnnnnnnnnnnnnnnnnnnnnnnnnnnnnnnnnnnnnnnnnnnnnnnnnnnnnnnnnnnnnnnnnnnnnnnnnnnnnnnnnnnnnnnnnnnnnnnnnnnnnnnnnnnnnnnnnnnnnnnnnnnnnnnnnnnnnnnnnnnnnnnnnnnnnnnnnnnnnnnnnnnnnnnnnnnnnnnnnnnnnnnnnnnnnnnnnnnnnnnnnnnnnnnnnnnnnnnnnnnnnnnnnnnnnnnnnnnnnnnnnnnnnnnnnnnnnnnnnnnnnnnnnnnnnnnnnnnnnnnnnnnnnnnnnnnnnnnnnnnnnnnnnnnnnnnnnnnnnnnnnnnnnnnnnnnnnnnnnnnnnnnnnnnnnnnnnnnnnnnnnnnnnnnnnnnnnnnnnnnnnnnnngcaaatggcgcgaaaactcggggaatgcgttcaaaaaggcgctgcgcgagcgtgtcgagagggttcggtcctctagccaaacagaacaactccaactccagacaacgccacagccaccgcagcaagtcgggataaagacggccgcccttcagaaggctctccggtccgtcaagatacacggctctgtgcgcatcgacgatggattagggaaagcgtccatcatcgacaccgtacgcctgatatccccaacggcctctcccgaatatgcttcacagatgttcacacgcgtcatacaaaaggatgatcgtgttatatccatcaggtcccgtacaacaagcatcagaatcaatgggcgcgaaaaaaaaacccgtgtactgacgtagctactcttcttgtggaaatcatctggatgctaccagatggcgcctcgagagcgttccgtcgtgactctgctgagacaatctgtcgtattatgggtggagatctcgatctgtgccaccagatagcgcagaataaccggacatgggggtctatagaggggggtgaagtcatccgacaggctttgcttaagccgatcgcgtacaaagaggtagaaaagtcaaccagagtgatggagcgtttggtgagagacgcgattgcttctctggtcggaggagaagccgaggcaaaaacacccgcaggtaacatcgatgtactcagtggtaaggaagtgatcgaggtgaagtactacaagaagtggaagcacgggctcggccaggtccagatataccatcaatttcacccccgtctggccatgcgcctccacctctttgcacatacgggggaagtcggtacggagaagtattttgcaatggcgaagtcgatgtgtgacaagttcggcgtaagggtcacgttcgaaggggcacccgctctggctctggaagacggtccgcgtcgtgtaaaaagggcccgtgaagaaaacttgtcttcccaacaagtgcgcaagcgccttgctgatctgaaagcagaagaagccaggcttaacgcagtgcttgccgatcaagtttagacgaatgccataattaatcatattcaattttgctgaaacagcttcgcagcaccctctttcttgaggaacttgaccattttcgctatcgtttcaatatcagctacgggttcgaccggcccctctccgttgattctcatgtaggagactttgcctttcaaatcttcgcgtagctgcgaagcgatgcacccgttccaaatgtcggcctcgggcgaactccgagcctttctggctatgattctggccctgtgttctgcagagtgttttttcttggcaggcatgatgtcttttgtttgcggggttcctttcgacacaagccttctaatcttacgcataaactttcttttttggtcgttggggttttccggcggaaagcctgcagtgtaccatccgtttttttttaaacacaaagtttactcaaaacttaacacttgaaagcctacaaacatagttccgacgccgagaagcgcgctttgtggaagaaggtagttgtggagctgcagcgcaaactaaagaggggcgaaacggtgtatgtgagcacgcatggaacaggggtgagctggctgcacgtgcggctggcttcaaggccgatgtactacgtcacctcggttgcttaaaaacagagcttgaccttgccggcaacagaacttcccccaccaccgacacaacatgcttcacaaacacgctcccaggttgcttgaatggctctccgttattagcgtaccagtctttcatgacgggccaagtcagttccaccgcctgcgccccgaggcgcaccctcgtagcgccattttaattgactggtccatggtgttgccgttctcgagcaacgcctccctgtacgcggactcgcacgcgtggtgatactcgctccagaaacgcgggccaccggtatcaaacagctcgcgggtgatgtactgtattcccacgagctcctcgaggtcgacgtctatcagaccacagatgtagtcatggcagtacacgctatcgggccgaatgtctagccctctcaaatccatggcgtcctgcagcatacggcgccggtgcgtgcggtcgtctttcgtgcgccaaaactccgccatcttggccgctaccgtctcggggtcgtgggcgtactcgatgcatcgccgcaccctcgttctcatcgcgggatacttcatcattcgctcntcgacaacatgattaccgccgcgcctgctgccgatacttcaacggtttctgtgtgtgtggctatgccggtagacgacaccatcgacccggagacgggtctgctcattgcaaccccgaagtgtagcccgagtgttcggggcccagagacgtcaatttgcgtcgaagctgggaaaatgggcattggtgttggcgaaaaggccggtcaggtcggcaaggttgttaagcggctgtactccga

SEQ ID NO: 276 - DNA, 12806 bp, unidentified
  misc_feature 1..12806: note = Fanzor polypeptide
  source 1..12806: mol_type = other DNA
tttattttaattatgatcttgtattaagacttatatttattaatgtcaactacaatcagttactgttctacaacagttatttctctgtatcttaggtgcatgaaaagaaatggttttagtgtggcccatttgccctagtggtgtacttcaggagcggcaccctggtaacctcactaatgccatccccctcaaagtatttcgtgttaactattacatcaaccaaatatatattcactaattgtatttctctttcctcatcttatttttctcgttttatagccaactactacgttctcgtgttaccaaatattcgtaccactcccacagtcttcctgttcgctcgctatgacagcttgagggctataaataaaactctgttcatttattttttaaatgcctatcaaagcctttgtttgataacagttatagtcaagtaaaatttgagattttcgagagtttataactgctgttaaaaaaaactataagatgtattaatagccagttgaacagtagaatgattatgtctcaaaaaaaccttctcgaaataaaaagtaattttgccataggaaaacctaatgttgctataatcctgtatgtatatcagaaacgatattttcacatcctgtggagacactattgatgaatgtccttaaacaaatacaccagaatgcgttttttgatgaaaggatgggttctccacatacttgtacatattataaaaaaccttccttggatccctgtttgattcacacttcattaaaaaaaagctatctttttatgagttagctttattggtcaattgtcaaatatatgttatgggagtattacaataaaaataatagtacctactatgtatacaatttcctactaagcttaacagtcacctacttaaaaccataaaatctattattttaacaacaattttgtaatatcttcatttctttccatataatatgtcccttacgcgtatcccaatttacccaaatgctgaagccttcataaagctaaaaaagcaatatatatacgaaaagcaacaacagcaagaagaagaagaagcggcagcagcacgcagtaattttagaggtcaagttaaagaaaaaaaggtaatgtgaactatgtgccaataatgaaacagaagaactcaagttttagaaggcgtaaaatggaaggatacagcggaagaaaagattaacaaaagatcagccaaactggcgcgtaattcccgtgttgtaacaacagacgtattgtgtaaatcttgtggtgaaagcgggcattcatctgcgagaagcaagcaatgcaaaaaccataattacacaatacaagaagtaattgaaaaaaagatcggcctcaattatcaaagatacactatatccgtaccacttcgatcttttctccctataccagatgatgcgtttaataataccctgaaaaaaatcaagagtttgtcgatgttccttagaaatgtgatgtatagggcacagctctttatcaaccactatatccttaaatacccagatggcttgccgaatgaattttttcaacaaaacttttggtattctttatgtcgattaataaatgaaaatatttcaattgatgtcttcaagcaaaagtattcttcccatattccttatcttgaagaagtatggaatgaactcagcggccttgaaggtgtcagtatggtagtaaataaagaaggtcttaccaactatggccaagatttatcgaccgcatgcgaaagtgttgcaacatgttacaacaatttttacatagaaaactttggaaatgttgttaatagctactgcatatacatgattcgtaaagaatttccggtaaatgaaaatttgaaatagacctttttttttctacaacgattgatactatcaattcataggacttgaagatgcctttgatcaaatacattgtatacaatcatgtattagagatcttgtttagcaccccatcatcaactttacctgaaaacattggaagttctgtagataaacagacccaagacaaaattcgaaactttctaaacccgttgattttagaaatcaaagaccgcttaccaccagctcctatcacaaaagagacattaaataacgcccctttcaacataatgcctgtttttagacatatattatcaaaatacgaatcaataattgacgcgaaccaacaaataacacccgtagttcaactaacagtggcttcacaacaacagcctaacttattacagcaagcagagggttcaaaccagccacgacagaggcccaaaaaaaagaaaaaagtattaaaaaatgaaaacccaagggagcgtaataataaagatagacagttccaaccaccgagactgttcagtttatttccgaatccaagcttaaaatggcggttcatcaaaattgatagtcaaaacctacaaggtatttttggaagaagaacccatcaacaacaggaagagactccttttgatttaacccaaaggtctttctttgaatgttttgacttcaaaaagttgaaaattaaaaggtaagctatgtaaaacgttctatgaatagtatgcatacttattttcaacatgaatagtctggtagaactacaatcaatgcatgaaaaaggcaggatgttcttaaacagcttctataccgatggttatacctgtagagtctccttttgtagaaaaagatatatcaactcacatttggataaagtcacactcacgctaaatgacttcaatagcgagagggttgagcagctatttcgaacttgcacagtagatcctaaccggaaggacgttttcacatcttaccatggagcaaatgatataaggcgtctctctagctctgaataccataatatgaacggagttgtcaatcgtcaaaaactagagcaagaacgaaagaagagagacaatattgaacatattgaaacaagaatcccttcacccaaaacaactaatgctgaaaactataaaaaacacataatgtatatgctccagcactttggaactttagtaaacttttacgattttcaaactgctagaatacggtggtcaaactatatagggaatcgaaaagctacagatcatgccatcaatattctgctaaacggttctacaaaatacaacaaaagcaggagaaaaaaaaccagacgaaacaaacgtaaaagaagaaaaacgaatagcaaatacgaacgagacctatcaaatactaagcactcaaaaaaaagggaaacaagtgatgaggtacaacttacatttttatttttattttttatctagaagcattgatctttttattttttatagggctcacaaagaaaggtttgaagaaggagacagaaaaaagatgccaatgattgtatttggaaatggattgcaaaacaaatctcatgtcaaatacaaaggattgaggcgcggggtgactgataagttgtacaaacagctgaaattgcgtgaaaaatcgggtgaattgctactgcttgacatcgacgagtttaatacgtcaaaggtgaaataaatatatgctcattttgcacaagtattaataacgcatcacttcttttgtagatatgcaatgaatgtttcacgaaaaacttggagaatttgaagtgtgatggtcgtaaaatccatcaggtattcaactgcaaaaattgcaatatcttttggaaccgagacgtcctggcatcaaaaaatatgttcaccattgctacctctatttggagcggcaatggatgtcccaatgtctttcaaagacaaagcgccacctccaatgtggttgcctcgactcactccggtgagtcgacggcttaaagatgactgcaggtaagaagtcttcataaagaaaaaaaaaaaagacaattctgatttccatataaaataggtaaacaaacttttaagctacagttgtgattcgtccaaaaaaaaactaacattttctaaacccataatattttttgtctcaactctatttttatttcatccaaaaagggtaagcaaagcgtctaacttaagtttttgatccgtctgaaaaaaaactgacatcatctgattttagactaaaatcctgtatgcatagatgtgatttatcataagacaatgaaggccatccaattgaatcaagtatcaattttgacccattcattcagcaactgagctatgaagacatccctatcactgcaatgaagaatcgacaattaaagatcatgttcagctttagcacaaattcacaaatcacaaatataaacaatagcaactggaaagcttttattaggagtcccatgcatcatatttccagaaatgtatggtacagacttcttcatagcaaattatccacccgatccaacttgcatagtcttatcccaacacttgtagaagatgaatcttgtcaactgtgtaaacttccagaaacagaacagcatatgctctttacttgcatacagaaacaagacatatggcaagcagttttcaagaaatacttatctaaccctaaagatcctcactgcagctcaatattccaggatttatctacacttaggctttccaagtattacatcctgcactaccatgacaagtttacaatatatgatttttttgccacagttattcgattcatttggaaagctcactggcaacaattctttgaacagacgcctattttggaagagattgtcatcaatcaaacccaaaaagaactattgaaactatctgcttacaattccttatgctaatatcttctgtattttcgtgacaagtcactgttttatacacttgcttcacatttaatcatctactctgatgagttttaataaacattaaaattttcatccataaaaaaaaaaaaatgtgatttatcataaaaaaagaaaaaaaagaaaatacatgtgatttattactatcttttgtattttcgcgacaagtcactgtttaatacacttgtatcgctcttaatctttatcttctgatgagttttaataaatattgaaattctcatccataaaaaaaaaaatacatgattttattggactatgtacagaataaggtatttaatgcggataataactggaaggtggatgggaaaatctcttgttgacttcatcttcagtaagttttcttgttacaaatgaaatgtcactcattgttctctgagagtattgatttggatattgtcttcccattgttttaaatttgcgaacatgaatacacattacgagtaataagatcagtggcaaatagacgaataaactttcaagtagaatccatatagatatatgataatcatctcctgctccatagcgtatccagcccaataaacacatacccatcattgacattgagaacagtaaaggcacaatacgtaaaaagaatagatcatccctattttgacgaacgttaccaaaccttgagctcttccatattacaaagcaattaataatcgtaagaatccataaaattgtaatacagataggcattgccacgctttgtacggttgaagtagatatttgaataacaatacagcatacaataattatagcatagaccaacaaaacgattacgcttgtccaatagttccagggacgaagggaatgcctttcttgtgctcttgggaatccctccgacttttcagaatctcttaaatagatactacgccaacgttctcggttataaagcgcagcagctacgtgtcgaatgaataatatctgagcttccataattccaaggagcaccaagatggatatcacaggtaatacattcaacacaagacttttactggaccaatctgatgttaatgtgaatccataatgtgcgctaagcataacgattaatgctatacttgtcaagaggccaaaaaggacaaaaggaagtaataaaagattatgacaacagcgtgctgccaatatgatagaaagtacagcaaaaaatacagtataaattatccaagctacttcttgtgctgacaacatggataagaacagaaagaaaagaagaaactaaggaaaggatcatttgtttatgtaaaaaaaaaaaaaaagcaatgctaaaaaacagctttctaaaaacaatagttttggccaagcctatcttttttccttttctagtaaagttttttgctcttccgtttctaataataagctataactctatttttatttttgacatctgatttttaattggttaaaataaaaataattaaaattcgggccaagactaagaaaagttgatgtcatgtccatttaacgaactctggtttatactctaattcatcaacaaattaaatttgaccatcttaaatctttaagcagagaggaagaagtcgatgattttaaaagctttatacaccattttcagaaagtaaattcgcatttttacaaactttataatgcaatatatacaaaaagcgttaagtaaacgcaatatttattcctgaaaatagtgtatgttttaagaaaaataaatagatgaaatggctatttcggacagtgattgattgagattattttctgtggttttatttattataatgcacacatcaaagagtagaaatcttctaccaaacttattgtcaccttctacaatgagttacacggaaacaaatagaaaaataaaaggtataatttacttatgttgtaggtgaatatagttagatttcaggtcgattatactaaacctgctaaagttttttatttttaaaaaaaaaattaaggtaaatcaatttgaaatgccccaggagaatattatctagtaaaaaaaaataatgtctaaaatggacatattctagttactcgcgttttgtttttgcagtacatttagataaacttgtacaagttaagcagctgtaattctataaaagaagcatgtacactatttattgagataaaaaataaatgcgctaaggcaattttttttctttaaatttttcttatgaaataaacaggctttaacattgggaaatcaaagaatttgaaggttttggagcaatattcttttaatttcaagtctagaaagaactattctatagaccataatcaataacaataacaaaagcaatggtttgtgctacttttcacaaaggctttgaattgtttcagccacactgaatttgcatgactacagtatgctgaaagtgaaatcagcaacatgttcaactcttgatatcaaattattctaattatttgaacataatgtttagtaaataagcaacaaggtattataggtatagccgcttctaatttgtttgtagtattaaactcgaataaaattcacaaactataaaaaaaaatgactgcattattgtaaataaagctgttaatgttaatccattgacaatggagagaaaggcatatatagcaaatataaatgcttatttctagtgacatcagctttcttttggcagctaaatgtttttaataatagtaattgaaaagtgtataaaatacaaataaaaaaagctgtaacttgttagctataaagttttaataataatttactaatgcaaggatgataatttactgaagggaaagtcaaagcttcatacaatatatagatttgtacaaattggccataaattaatgcagggttttgaattatacaaaatgctctaagcgtcagggcatgcaacacaatcacaatcgtcttcttctaccatttgattttttaattctctttccataatttctacataatcgccaactttgccttgatatggttgtaatctaagttcgtcatgaacaatggccaagcatgtagacaaatatttgtgaatacggggaatatattctgtgatctctggtggcatcattatttgcactttagaaatattcaataacaactgccaagcgttaatcaaaactcgcatgtcaaaataacagtcagtcgaccttgaccgaagatatttaattaagcgaacagtattgaaggcggcatgaactcctgttataacaatatgcttctgaatgtgggattcatgtggtcctagaaatgattctaccattgcaaagtattcttcatcagtaccttcaaaatcaatcttagcacgaagttctaatatcttttgtattcttctcctccattttctgctgatatttgcattttttggaatatttccgccattccaatgcatttttaataatttccattcattttcaggttgcggaattgctttagggaggtaagactgtgccatgataagccattcttcataaataactagtgtagtcaaaacaggtataacgctgtgggagcattctctttctaatgtactataaaattcttgacagctaatcgttgaatcaaacaaaggaagggacagtctaaactcaagtggtaaaactttagtgtaccaatgtctcattgccatctccacctgatgtccaattagacccacaaggtgatacaaatcacttgaataagcacacttgctagctttatgttcagttctttgtagaagtaatatgtacgaatgcatttgggcaaaccacttttcctgaattgagtcatcttcagcaatttcccattttccttcttcagagtgagttagtgtacagtaaggtagatttgtttcatcttttttcatatctggaagttgggcccttgtaatttcttcaaatgtctgtacacgacgcaaatgattcaacaagcgactaaaatgaacagcttctcctttctcttgtaaaaaagttgcgccttttcttttcatcttgaatatagccacatatttcggctgtaagaccactgaaattcgttcggccatatcagtatacagtttgcccttttcaaactcagaaatagtgagtgtgtagactgccatgaaaacgtaagcagtaaagctttccaagttgaattgatcaaatgaggcttctaaagcatcacgagcccttttaaagtaaaattttccatattcaaccaaagaagcagaaggtagacatcctgcaatatgtttacatcgcagtgtacagatagtagcacaaagagccattgcagcagcggattctcttgtgtcgagaaagcatctaataaacgtggggacatggatagctaactgttgaaaatgttgacaacgcaaataagcttgtatcaacttattggtcgtaacttgtatattttcaggtgaacatgcagtgactattgtatttacacttgacattctcggtgcagtaaaaatacgtattgattttgcgacgtttttacattgagttttaccatactttttgcgaatcaacataacaagttggtcgactatattatcctgtttaatgcaattttttattactggaggaatgcttgatccgtactccacagactgcagcacacaataaagattattaaacagatccgaataattgttgatatgcgtatcaatgcaaaagtctccttttttcacattaagcacccacggttgtgtttctctctctcctttttttaaaattgcctgtgtgccattatctaaaacagcaatcagctttgaatgctgggcaggttggcttgaaaagctgagagcggttgaaggtgatgaagggaactcatcagtcatacttccatcactgtcattagttaaagaaggtgtactacttccttgattcttcatgcgtttcattgttttttccatgtttgctatttcaatttctaacgactccgcttgctttaagagttctgtttgtattgcaatctgaatgaactcttcatcaacaggagaatgcgagcttgagtatacacaatcgatatcaaacttgtagcatctggatcgtatacctttgataagtaaagattatttgaatgcctaaattttaactaacctttcacagggttttaaaccattgcatttccgtttctgatttcgacactctaaattatattttaagcattttaattttttgattaatgtcctaaggcttatctaccttcgcatggaactttcttcattgtcatgcttaaagaaaaaaattcccaaaaagtaaaataattaatccgttactgcgtgtttataaactgtttagcctttaagccaatttctcttacagaatatgggaaaactattttgccgggcttattttaagtagaatgaactgtgattttttatattttattcgttgttgttgttatgctcctaccttgatagttataaagagacttatcattcaatggaataacaaatttcgtcttgtgatgaaaggattatctgcttatggaaacccatcgtgtattcaatttgttacagtgcaaacatgttctataccaaaagttaaaaacactaattgaaaataatcaacaatattgactatatatagcttcaaaatatatctaccggtttttatcgtctatttgcaaggagaattgatgctttaaaatatcgaaaaataaagctggaaactcatacctttaagaatttaacaacttatattccaagataaaaatatgcatgaagtatgtttttttctttacttactagcaattaactccaaagctgaaatttgcttaatcttaatagcattctttattgatgacataaataatgttcaggttggtgatagaagagcaggagttatggtagtaactcttcaatttgcgcttttatttattcaaaattacagaaaaataataaatgcacaaacatgcataccttatccttttcaaaccaagaaacgaaactttttttcatcacttttttaatttataataataaaaaaaattattcataaaatgaaaaagagtaataaagatacggtaggaccaaatatacattatcattttttttagttataaatatccagagttcatgtacttttcactatgtagatattattgtatacatttcgaagctgactatgtactatatatattatgcagtaagctgtatattaagtattatgaagacctattcataatttaatacaagaacgtgctcctgtatcgactgtttgctataacgttaaataagtccaaatttgtacacagttatacagttcaataaaaaaaataattatttgttattctgcaatgagctgctttatcaagtcagagaggatagagaaagaagagaaccggacagaaactaagaagcttgaatagtcaactaaaagaggacagtagagggtggcgttaaggatttgaagttatgaactgcaaataggacttaaaatagctgataagcaagaacgaaacaaagataagtaaagataggaatagacgtacagtctaatagagagaatgatacttgataattgactgatactttattaataactacaggtgtgtatttatacaaaagtcagaaacgcaatttgacaaaagaatgaactcagattattgagttttcagttaaaggatgttaagagactttaatgttattttcgagtttatatttaattctgatcaatgagtgatcttgccaaagtagtgaaaaccaaacaagtcagaagttatagaactttttagatagaagaaagaaagatgtcctttattaagtgtgttttttgtgtctatttatacactacctcaaaaaattgatcattttgaaccgccttttgctcattttgtaaattaactgcttcatattatttaggctagggggttttaggtaaaaggtagtataacaacaaagataaagaaatactgtgagggtatttctgggaagtcacagtctgactcagtctccagatttatcgtttttgggcgggattgagaatagtaaggaatttttttttttttttatggatgaacattttaatgtttattaaaactcatcaaagagtataaggattaagagcgatacaagtgtattaaacagtgacttgtcgcgaaaatactgtggtatttacacatgtaataaagtaataatgtaagttactacgaacaatggtcctccaaattaggaatatcggacattgtattacgccacttccaataaaatcccgatccactccagaatattctaataagttcctgatcaggattaataattacttcttgataagaagatgttaaactatgccaatcacataaataactcatcgtctaatatcgattaataatcaatacgcatacactgtaagtattattatttagccgtgattagaaaagtataaatacactcatatttttaacttgaataaaggacaatctactttgagtctcacttatttttatatttgttgattgacttagtactttttatattataaaacctcaaatatcacaaatacaaaagaaattagcatagagaagtgtgagcagatagtttcaatagctccttctggatttgattgatgacaatctcatccacgacaggagtctgttcaaataattgttgccagtgggctttccaaatgaagcgaatgactgtagcaaaaaaatcatagattgtaaacttgtcatgatagtgtaagatgtaatacttggataatctaagtgtggataaatcctcgaatattgagctacagttgggatctttaggatttgacaagtatttcttgaaggctgcgttccacaagtcttgtttttgaatacaagtcaagagcatatgctgctctgtttctggtagcttgcacaattggcagtagtcgtcatctacctttgctgggatgattctatgtaaattggcgcgagtggataatttcttatgaagaagtctgtaccatagattcctaggaatatggtgcatagggctactgataaaagctttccaattgttatgacttatatttgtgatttgtgagtttgagttgaagctaaacattgtctttagttgacgattcttcaatgctgttatattgatatcttcatagctcatctgttgaatgaatgggtcaaagttgatatt

SEQ ID NO: 277 - DNA, 6741 bp, unidentified
  misc_feature 1..6741: note = Fanzor polypeptide
  source 1..6741: mol_type = other DNA
attttattttaattatgatcttgtattaagacttatatttattaatgtcaactacaatcagttactgttctacaacagttatttctctgtatcttaggtgcatgaaaagaaatggttttagtgtggcccatttgccctagtggtgtacttcaggagcggcaccctggtaacctcactaatgccatccccctcaaagtatttcgtgttaactattacatcaaccaaatatatattcactaattgtatttctctttcctcatcttatttttctcgttttatagccaactactacgttctcgtgttaccaaatattcgtaccactcccacagtcttcctgttcgctcgctatgacagcttgagggctataaataaaactctgttcatttattttttaaatgcctatcaaagcctttgtttgataacagttatagtcaagtaaaatttgagattttcgagagtttataactgctgttaaaaaaaactataagatgtattaatagccagttgaacagtagaatgattatgtctcaaaaaaaccttctcgaaataaaaagtaattttgccataggaaaacctaatgttgctataatcctgtatgtatatcagaaacgatattttcacatcctgtggagacactattgatgaatgtccttaaacaaatacaccagaatgcgttttttgatgaaaggatgggttctccacatacttgtacatattataaaaaaccttccttggatccctgtttgattcacacttcattaaaaaaaagctatctttttatgagttagctttattggtcaattgtcaaatatatgttatgggagtattacaataaaaataatagtacctactatgtatacaatttcctactaagcttaacagtcacctacttaaaaccataaaatctattattttaacaacaattttgtaatatcttcatttctttccatataatatgtcccttacgcgtatcccaatttacccaaatgctgaagccttcataaagctaaaaaagcaatatatatacgaaaagcaacaacagcaagaagaagaagaagcggcagcagcacgcagtaattttagaggtcaagttaaagaaaaaaaggtaatgtgaactatgtgccaataatgaaacagaagaactcaagttttagaaggcgtaaaatggaaggatacagcggaagaaaagattaacaaaagatcagccaaactggcgcgtaattcccgtgttgtaacaacagacgtattgtgtaaatcttgtggtgaaagcgggcattcatctgcgagaagcaagcaatgcaaaaaccataattacacaatacaagaagtaattgaaaaaaagatcggcctcaattatcaaagatacactatatccgtaccacttcgatcttttctccctataccagatgatgcgtttaataataccctgaaaaaaatcaagagtttgtcgatgttccttagaaatgtgatgtatagggcacagctctttatcaaccactatatccttaaatacccagatggcttgccgaatgaattttttcaacaaaacttttggtattctttatgtcgattaataaatgaaaatatttcaattgatgtcttcaagcaaaagtattcttcccatattccttatcttgaagaagtatggaatgaactcagcggccttgaaggtgtcagtatggtagtaaataaagaaggtcttaccaactatggccaagatttatcgaccgcatgcgaaagtgttgcaacatgttacaacaatttttacatagaaaactttggaaatgttgttaatagctactgcatatacatgattcgtaaagaatttccggtaaatgaaaatttgaaatagacctttttttttctacaacgattgatactatcaattcataggacttgaagatgcctttgatcaaatacattgtatacaatcatgtattagagatcttgtttagcaccccatcatcaactttacctgaaaacattggaagttctgtagataaacagacccaagacaaaattcgaaactttctaaacccgttgattttagaaatcaaagaccgcttaccaccagctcctatcacaaaagagacattaaataacgcccctttcaacataatgcctgtttttagacatatattatcaaaatacgaatcaataattgacgcgaaccaacaaataacacccgtagttcaactaacagtggcttcacaacaacagcctaacttattacagcaagcagagggttcaaaccagccacgacagaggcccaaaaaaaagaaaaaagtattaaaaaatgaaaacccaagggagcgtaataataaagatagacagttccaaccaccgagactgttcagtttatttccgaatccaagcttaaaatggcggttcatcaaaattgatagtcaaaacctacaaggtatttttggaagaagaacccatcaacaacaggaagagactccttttgatttaacccaaaggtctttctttgaatgttttgacttcaaaaagttgaaaattaaaaggtaagctatgtaaaacgttctatgaatagtatgcatacttattttcaacatgaatagtctggtagaactacaatcaatgcatgaaaaaggcaggatgttcttaaacagcttctataccgatggttatacctgtagagtctccttttgtagaaaaagatatatcaactcacatttggataaagtcacactcacgctaaatgacttcaatagcgagagggttgagcagctatttcgaacttgcacagtagatcctaaccggaaggacgttttcacatcttaccatggagcaaatgatataaggcgtctctctagctctgaataccataatatgaacggagttgtcaatcgtcaaaaactagagcaagaacgaaagaagagagacaatattgaacatattgaaacaagaatcccttcacccaaaacaactaatgctgaaaactataaaaaacacataatgtatatgctccagcactttggaactttagtaaacttttacgattttcaaactgctagaatacggtggtcaaactatatagggaatcgaaaagctacagatcatgccatcaatattctgctaaacggttctacaaaatacaacaaaagcaggagaaaaaaaaccagacgaaacaaacgtaaaagaagaaaaacgaatagcaaatacgaacgagacctatcaaatactaagcactcaaaaaaagggaaacaagtgatgaggtacaacttacatttttatttttattttttatctagaagcattgatctttttattttttataggactcacaaagaaaggtttgaagaaggagacagaaaaaagatgccaatgattgtatttggaaatggattgcaaaacaaatctcatgtcaaatacaaaggattgaggcgcgggatgactgataagttgtacaaacagctgaaattgcgtgaaaaatcgggtgaattgctactgcttgacatcgacgagtttaatacgtcaaaggtgaaataaatatatgctcattttgcacaagtattaataacgcatcacttcttttgtagatatgcaatgaatgtttcacgaaaaacttggagaatttgaagtgtgatggtcgtaaaatccatcaggtattcaactgcaaaaattgcaatatcttttggaaccgagacgtcctggcatcaaaaaatatgttcaccattgctacctctatttggagcggcaatggatgtcccaatgtctttcaaagacaaagcgccacctccaatgtggttgcctcgactcactccggtgagtcgacggcttaaagatgactgcaggtaagaagtcttcataaataaaaaaaaaaaagacaattctgatttccatataaaataggtaaacaaacttttaagctacagttgtgattcgtccaaaaaaaaactaacattttctaaacccataatattttttgtctcaactctatttttatttcatccaaaaagggtaagcaaagcgtctaacttaagtttttgatccgtctgaaaaaaaactgacatcatctgattttagactaaaatcctgtatgcatagatgtgatttatcataagacaatgaaggccatccaattgaatcaagtatcaattttgacccattcattcagcaactgagctatgaagacatccctatcactgcaatgaagaatcgacaattaaagatcatgttcagctttagcacaaattcacaaatcacaaatataaacaatagcaactggaaagcttttattaggagtcccatgcatcatatttccagaaatgtatggtacagacttcttcatagcaaattatccacccgatccaacttgcatagtcttatcccaacacttgtagaagatgaatcttgtcaactgtgtaaacttccagaaacagaacagcatatgctctttacttgcatacagaaacaagacatatggcaagcagttttcaagaaatacttatctaaccctaaagatcctcactgcagctcaatattccaggatttatctacacttaggctttccaagtattacatcctgcactaccatgacaagtttacaatatatgatttttttgccacagttattcgattcatttggaaagctcactggcaacaattctttgaacagacgcctattttggaagagattgtcatcaatcaaacccaaaaagaactattgaaactatctgcttacaattccttatgctaatatcttctgtattttcgtgacaagtcactgttttatacacttgcttcacatttaatcatctactctgatgagttttaataaacattaaaattttcatccataaaaaaaaaaaattttttttcaaccggtcaagtttgttttcattttgttaggtcatcttcaaccatccttggttgctaaacccatggtcaaaaatataacaagagagcaggcaatatgcatcttcttctgccaagattatactgaatttaatgtagaaaaacttttgaagaaactggaaaattttgaagatgtcgacatttgttacgacgaagatccatttaaacccatattactttgtaacaaaagaatagattccaaccctcagaaatataagaaatacaatagcagctcactttcggcgaaaactatttagattaataaacataggctttagcaatatataaactttattgacattgacaaaagaaataaaactttcagttcaagatgtagtaatgctggcaagatcttttatttgcttttttgtctgtaagcaggtcgacaatcaaattgtttcagatcttccacacaattcagcagttggtttctatcaaagaccttgatatgatttttgtaaaaaaacaagtcaatcataattttttgtatgttgctatgttccctataaaattattgtctatttacatcttagaacacatattgtcactacttacttgagtaggttctttagatcactcatgttggtagtgaaaccggcgtaatcaattgctactacacatatcttcgtcttcttctccttaacataagtcaaaaaatctataaaaaacgtgttaatttttcaagatttgactagaagttatattattgtttcattcttttttttttcaccttgtgtatttccgtggatttgatctaggctggatagaatatcttgatcagataaatcacgtttgctcaaagcttgcttagcgctgctacagggagagacgaagactttttgaactagcgatctttcatacagtatatttatcattctttgtagtagtaaagcccgattgtcactttcttttttcgacttcctgcaatacccaatgacttcgtaaccatcatctttgagttgtttaatgtatgcatggtgtctggggattgtactgacaatattatctgcaacctcatctataaaactggagttagcacgttatcttgtcctataataccgttttcaagcttaccatgaaattgactgtctaacacgctcaaaatcctgattcttaatttttttgtttcagatccttgaatctttaatacttttcgctcaggctcctgtattaagaagtcgatgttttgtttcttcaaccattggttgaaccccaaagccgtagtcttgttaaaacgctctgtgtatttccaaagtacgcccaaaacagttttatcagaaacatttgttagcttgaaaggagagtctgtaacgtgttccgactttggacgatagacatagtttataaactccacaatttgtgcttcgttttctattttattgttaataagaatttcggctaccaagttactctctgactcaccaaagctgatgttcttatccatatcgtcttcttcacatttttcttctaaatcttctcttgacttgtaattcttatataaatttggagctccaaacacacgagcgttacaaacaaggattggctcatttggactttcaagataacaaatctgaatgtcctccatgttctttactctatcagtatacatcttagcattcagatcattatactctgcgcaatagaaaatacaacaagcttgttcgaagcaggtggggttcatttagtcaataaaaagaaaaaaccaagcgtgggtttggaccggttcaaaaaaatgagaaaaataagcgtgggtttggaccggttcaaaaaaaaaaaaaaaaaaaaagaaaaaaaaaaatatgtaaaaaaaaaaaaaaacaaaataaaaaaaaaaaaaaagaggaaaagtgtggatcatgg

SEQ ID NO: 278 - DNA, 12624 bp, unidentified
  misc_feature 1..12624: note = Fanzor polypeptide
  source 1..12624: mol_type = other DNA
ttattttaattatgatcttgtattaagacttatatttattaatgtcaactacaatcagttactgttctacaacagttatttctctgtatcttaggtgcatgaaaagaaatggttttagtgtggcccatttgccctagtggtgtacttcaggagcggcaccctggtaacctcactaatgccatccccctcaaagtatttcgtgttaactattacatcaaccaaatatatattcactaattgtatttctctttcctcatcttatttttctcgttttatagccaactactacgttctcgtgttaccaaatattcgtaccactcccacagtcttcctgttcgctcgctatgacagcttgagggctataaataaaactctgttcatttattttttaaatgcctatcaaagcctttgtttgataacagttatagtcaagtaaaatttgagattttcgagagtttataactgctgttaaaaaaaactataagatgtattaatagccagttgaacagtagaatgattatgtctcaaaaaaaccttctcgaaataaaaagtaattttgccataggaaaacctaatgttgctataatcctgtatgtatatcagaaacgatattttcacatcctgtggagacactattgatgaatgtccttaaacaaatacaccagaatgcgttttttgatgaaaggatgggttctccacatacttgtacatattataaaaaaccttccttggatccctgtttgattcacacttcattaaaaaaaagctatctttttatgagttagctttattggtcaattgtcaaatatatgttatgggagtattacaataaaaataatagtacctactatgtatacaatttcctactaagcttaacagtcacctacttaaaaccataaaatctattattttaacaacaattttgtaatatcttcatttctttccatataatatgtcccttacgcgtatcccaatttacccaaatgctgaagccttcataaagctaaaaaagcaatatatatacgaaaagcaacaacagcaagaagaagaagaagcggcagcagcacgcagtaattttagaggtcaagttaaagaaaaaaaggtaatgtgaactatgtgccaataatgaaacagaagaactcaagttttagaaggcgtaaaatggaaggatacagcggaagaaaagattaacaaaagatcagccaaactggcgcgtaattcccgtgttgtaacaacagacgtattgtgtaaatcttgtggtgaaagcgggcattcatctgcgagaagcaagcaatgcaaaaaccataattacacaatacaagaagtaattgaaaaaaagatcggcctcaattatcaaagatacactatatccgtaccacttcgatcttttctccctataccagatgatgcgtttaataataccctgagaaaaatcaagagtttgtcgatgttccttagaaatgtgatgtatagggcacagctctttatcaaccactatatccttaaatacccagatggcttgccgaatgaattttttcaacaaaacttttggtattctttatgtcgattaataaatgaaaatatttcaattgatgtcttcaagcaaaagtattcttcccatattccttatcttgaagaagtatggaatgaactcagcggccttgaaggtgtcagtatggtagtaaataaagaaggtcttaccaactatggccaagatttatcgaccgcatgcgaaagtgttgcaacatgttacaacaatttttacatagaaaactttggaaatgttgttaatagctactgcatatacatgattcgtaaagaatttccggtaaatgaaaatttgaaatagacctttttttttctacaacgattgatactatcaattcataggacttgaagatgcctttgatcaaatacattgtatacaatcatgtattagagatcttgtttagcaccccatcatcaactttacctgaaaacattggaagttctgtagataaacagacccaagacaaaattcgaaactttctaaacccgttgattttagaaatcaaagaccgcttaccaccagctcctatcacaaaagagacattaaataacgcccctttcaacataatgcctgtttttagacatatattatcaaaatacgaatcaataattgacgcgaaccaacaaataacacccgtagttcaactaacagtggcttcacaacaacagcctaacttattacagcaagcagagggttcaaaccagccacgacagaggcccaaaaaaaagaaaaaagtattaaaaaatgaaaacccaagggagcgtaataataaagatagacagttccaaccaccgagactgttcagtttatttccgaatccaagcttaaaatggcggttcatcaaaattgatagtcaaaacctacaaggtatttttggaagaagaacccatcaacaacaggaagagactccttttgatttaacccaaaggtctttctttgaatgttttgacttcaaaaagttgaaaattaaaaggtaagctatgtaaaacgttctatgaatagtatgcatacttattttcaacatgaatagtctggtagaactacaatcaatgcatgaaaaaggcaggatgttcttaaacagcttctataccgatggttatacctgtagagtctccttttgtagaaaaagatatatcaactcacatttggataaagtcacactcacgctaaatgacttcaatagcgagagggttgagcagctatttcgaacttgcacagtagatcctaaccggaaggacgttttcacatcttaccatggagcaaatgatataaggcgtctctctagctctgaataccataatatgaacggagttgtcaatcgtcaaaaactagagcaagaacgaaagaagagagacaatattgaacatattgaaacaagaatcccttcacccaaaacaactaatgctgaaaactataaaaaacacataatgtatatgctccagcactttggaactttagtaaacttttacgattttcaaactgctagaatacggtggtcaaactatatagggaatcgaaaagctacagatcatgccatcaatattctgctaaacggttctacaaaatacaacaaaagcaggagaaaaaaaaccagacgaaacaaacgtaaaagaagaaaaacgaatagcaaatacgaacgagacctatcaaatactaagcactcaaaaaaagggaaacaagtgatgaggtacaacttacatttttatttttattttttatctagaagcattgatctttttattttttatagggctcacaaagaaaggtttgaagaaggagacagaaaaaagatgccaatgattgtatttggaaatggattgcaaaacaaatctcatgtcaaatacaaaggattgaggcgcggggtgactgataagttgtacaaacagctgaaattgcgtgaaaaatcgggtgaattgctactgcttgacatcgacgagtttaatacgtcaaaggtgaaataaatatatgctcattttgcacaagtattaataacgcatcacttcttttgtagatatgcaatgaatgtttcacgaaaaacttggagaatttgaagtgtgatggtcgtaaaatccatcaggtattcaactgcaaaaattgcaatatcttttggaaccgagacgtcctggcatcaaaaaatatgttcaccattgctacctctatttggagcggcaatggatgtcccaatgtctttcaaagacaaagcgccacctccaatgtggttgcctcgactcactccggtgagtcgacggcttaaagatgactgcaggtaagaagtcttcataaataaaaaaaaaaaagacaattctgatttccatataaaataggtaaacaaacttttaagctacagttgtgattcgtccaaaaaaaaactaacattttctaaacccataatattttttgtctcaactctatttttatttcatccaaaaagggtaagcaaagcgtctaacttaagtttttgatccgtctgaaaaaaaactgacatcatctgattttagactaaaatcctgtatgcatagatgtgatttatcataagacaatgaaggccatccaattgaatcaagtatcaattttgacccattcattcagcaactgagctatgaagacatccctatcactgcaatgaagaatcgacaattaaagatcatgttcagctttagcacaaattcacaaatcacaaatataaacaatagcaactggaaagcttttattaggagtcccatgcatcatatttccagaaatgtatggtacagacttcttcatagcaaattatccacccgatccaacttgcatagtcttatcccaacacttgtagaagatgaatcttgtcaactgtgtaaacttccagaaacagaacagcatatgctctttacttgcatacagaaacaagacatatggcaagcagttttcaagaaatacttatctaaccctaaagatcctcactgcagctcaatattccaggatttatctacacttaggctttccaagtattacatcctgcactaccatgacaagtttacaatatatgatttttttgccacagttattcgattcatttggaaagctcactggcaacaattctttgaacagacgcctattttggaagagattgtcatcaatcaaacccaaaaagaactattgaaactatctgcttacaattccttatgctaatatcttctgtattttcgtgacaagtcactgttttatacacttgcttcacatttaatcatctactctgatgagttttaataaacattaaaattttcatccataaaaaaaaaaaaatgtgatttataataaaaaaagaaaaaaaagaaaatacatgtgatttattactatcttttgtattttcgcgacaagtcactgtttaatacacttgtatcgctcttaatctttatcttctgatgagttttaataaatattgaaattctcatccataaaaaaaaaaatacatgattttattggactatgtacagaataaggtatttaatgcggataataactggaaggtggatgggaaaatctcttgttgacttcatcttcagtaagttttcttgttacaaatgaaatgtcactcattgttctctgagagtattgatttggatattgtcttcccattgttttaaatttgcgaacatgaatacacattacgagtaataagatcagtggcaaatagacgaataaactttcaagtagaatccatatagatatatgataatcatctcctgctccatagcgtatccagcccaataaacacatacccatcattgacattgagaacagtaaaggcacaatacgtaaaaagaatagatcatccctattttgacgaacgttaccaaaccttgagctcttccatattacaaagcaattaataatcgtaagaatccataaaattgtaatacagataggcattgccacgctttgtacggttgaagtagatatttgaataacaatacagcatacaataattatagcatagaccaacaaaacgattacgcttgtccaatagttccagggacgaagggaatgcctttcttgtgctcttgggaatccctccgacttttcagaatctcttaaatagatactacgccaacgttctcggttataaagcgcagcagctacgtgtcgaatgaataatatctgagcttccataattccaaggagcaccaagatggatatcacaggtaatacattcaacacaagacttttactggaccaatctgatgttaatgtgaatccataatgtgcgctaagcataacgattaatgctatacttgtcaagaggccaaaaaggacaaaaggaagtaataaaagattatgacaacagcgtgctgccaatatgatagaaagtacagcaaaaaatacagtataaattatccaagctacttcttgtgctgacaacatggataagaacagaaagaaaagaagaaactaaggaaaggatcatttgtttatgtaaaaaaaaaaaaaagcaatgctaaaaaacagctttctaaaaacaatagttttggccaagcctatcttttttccttttctagtaaagttttttgctcttccgtttctaataataagctataactctatttttatttttgacatctgatttttaattggttaaaataaaaataattaaaattcgggccaagactaagaaaagttgatgtcatgtccatttaacgaactctggtttatactctaattcatcaacaaattaaatttgaccatcttaaatctttaagcagagaggaagaagtcgatgattttaaaagctttatacaccattttcagaaagtaaattcgcatttttacaaactttataatgcaatatatacaaaaagcgttaagtaaacgcaatatttattcctgaaaatagtgtatgttttaagaaaaataaatagatgaaatggctatttcggacagtgattgattgagattattttctgtggttttatttattataatgcacacatcaaagagtagaaatcttctaccaaacttattgtcaccttctacaatgagttacacggaaacaaatagaaaaataaaaggtataatttacttatgttgtaggtgaatatagttagatttcaggtcgattatactaaacctgctaaagttttttatttttaaaaaaaaaattaaggtaaatcaatttgaaatgccccaggagaatattatctagtaaaaaaaaataatgtctaaaatggacatattctagttactcgcgttttgtttttgcagtacatttagataaacttgtacaagttaagcagctgtaattctataaaagaagcatgtacactatttattgagataaaaaataaatgcgctaaggcaattttttttctttaaatttttcttatgaaataaacaggctttaacattgggaaatcaaagaatttgaaggttttggagcaatattcttttaatttcaagtctagaaagaactattctatagaccataatcaataacaataacaaaagcaatggtttgtgctacttttcacaaaggctttgaattgtttcagccacactgaatttgcatgactacagtatgctgaaagtgaaatcagcaacatgttcaactcttgatatcaaattattctaattatttgaacataatgtttagtaaataagcaacaaggtattataggtatagccgcttctaatttgtttgtagtattaaactcgaataaaattcacaaactataaaaaaaaatgactgcattattgtaaataaagctgttaatgttaatccattgacaatggagagaaaggcatatatagcaaatataaatgcttatttctagtgacatcagctttcttttggcagctaaatgtttttaataatagtaattgaaaagtgtataaaatacaaataaaaaaagctgtaacttgttagctataaagttttaataataatttactaatgcaaggatgataatttactgaagggaaagtcaaagcttcatacaatatatagatttgtacaaattggccataaattaatgcagggttttgaattatacaaaatgctctaagcgtcagggcatgcaacacaatcacaatcgtcttcttctaccatttgattttttaattctctttccataatttctacataatcgccaactttgccttgatatggttgtaatctaagttcgtcatgaacaatggccaagcatgtagacaaatatttgtgaatacggggaatatattctgtgatctctggtggcatcattatttgcactttagaaatattcaataacaactgccaagcgttaatcaaaactcgcatgtcaaaataacagtcagtcgaccttgaccgaagatatttaattaagcgaacagtattgaaggcggcatgaactcctgttataacaatatgcttctgaatgtgggattcatgtggtcctagaaatgattctaccattgcaaagtattcttcatcagtaccttcaaaatcaatcttagcacgaagttctaatatcttttgtattcttctcctccattttctgctgatatttgcattttttggaatatttccgccattccaatgcatttttaataatttccattcattttcaggttgcggaattgctttagggaggtaagactgtgccatgataagccattcttcataaataactagtgtagtcaaaacaggtataacgctgtgggagcattctctttctaatgtactataaaattcttgacagctaatcgttgaatcaaacaaaggaagggacagtctaaactcaagtggtaaaactttagtgtaccaatgtctcattgccatctccacctgatgtccaattagacccacaaggtgatacaaatcacttgaataagcacacttgctagctttatgttcagttctttgtagaagtaatatgtacgaatgcatttgggcaaaccacttttcctgaattgagtcatcttcagcaatttcccattttccttcttcagagtgagttagtgtacagtaaggtagatttgtttcatcttttttcatatctggaagttgggcccttgtaatttcttcaaatgtctgtacacgacgcaaatgattcaacaagcgactaaaatgaacagcttctcctttctcttgtaaaaaagttgcgccttttcttttcatcttgaatatagccacatatttcggctgtaagaccactgaaattcgttcggccatatcagtatacagtttgcccttttcaaactcagaaatagtgagtgtgtagactgccatgaaaacgtaagcagtaaagctttccaagttgaattgatcaaatgaggcttctaaagcatcacgagcccttttaaagtaaaattttccatattcaaccaaagaagcagaaggtagacatcctgcaatatgtttacatcgcagtgtacagatagtagcacaaagagccattgcagcagcggattctcttgtgtcgagaaagcatctaataaacgtggggacatggatagctaactgttgaaaatgttgacaacgcaaataagcttgtatcaacttattggtcgtaacttgtatattttcaggtgaacatgcagtgactattgtatttacacttgacattctcggtgcagtaaaaatacgtattgattttgcgacgtttttacattgagttttaccatactttttgcgaatcaacataacaagttggtcgactatattatcctgtttaatgcaattttttattactggaggaatgcttgatccgtactccacagactgcagcacacaataaagattattaaacagatccgaataattgttgatatgcgtatcaatgcaaaagtctccttttttcacattaagcacccacggttgtgtttctctctctcctttttttaaaattgcctgtgtgccattatctaaaacagcaatcagctttgaatgctgggcaggttggcttgaaaagctgagagcggttgaaggtgatgaagggaactcatcagtcatacttccatcactgtcattagttaaagaaggtgtactacttccttgattcttcatgcgtttcattgttttttccatgtttgctatttcaatttctaacgactccgcttgctttaagagttctgtttgtattgcaatctgaatgaactcttcatcaacaggagaatgcgagcttgagtatacacaatcgatatcaaacttgtagcatctggatcgtatacctttgataagtaaagattatttgaatgcctaaattttaactaacctttcacagggttttaaaccattgcatttccgtttctgatttcgacactctaaattatattttaagcattttaattttttgattaatgtcctaaggcttatctaccttcgcatggaactttcttcattgtcatgcttaaagaaaaaaattcccaaaaagtaaaataattaatccgttactgcgtgtttataaactgtttagcctttaagccaatttctcttacagaatatgggaaaactattttgccgggcttattttaagtagaatgaactgtgattttttatattttattcgttgttgttgttatgctcctaccttgatagttataaagagacttatcattcaatggaataacaaatttcgtcttgtgatgaaaggattatctgcttatggaaacccatcgtgtattcaatttgttacagtgcaaacatgttctataccaaaagttaaaaacactaattgaaaataatcaacaatattgactatatatagcttcaaaatatatctaccggtttttatcgtctatttgcaaggagaattgatgctttaaaatatcgaaaaataaagctggaaactcatacctttaagaatttaacaacttatattccaagataaaaatatgcatgaagtatgtttttttctttacttactagcaattaactccaaagctgaaatttgcttaatcttaatagcattctttattgatgacataaataatgttcaggttggtgatagaagagcaggagttatggtagtaactcttcaatttgcgcttttatttattcaaaattacagaaaaataataaatgcacaaacatgcataccttatccttttcaaaccaagaaacgaaactttttttcatcacttttttaatttataataataaaaaaaattattcataaaatgaaaaagagtaataaagatacggtaggaccaaatatacattatcattttttttagttataaatatccagagttcatgtacttttcactatgtagatattattgtatacatttcgaagctgactatgtactatatatattatgcagtaagctgtatattaagtattatgaagacctattcataatttaatacaagaacgtgctcctgtatcgactgtttgctataacgttaaataagtccaaatttgtacacagttatacagttcaataaaaaaaataattatttgttattctgcaatgagctgctttatcaagtcagagaggatagagaaagaagagaaccggacagaaactaagaagcttgaatagtcaactaaaagaggacagtagagggtggcgttaaggatttgaagttatgaactgcaaataggacttaaaatagctgataagcaagaacgaaacaaagataagtaaagataggaatagacgtacagtctaatagagagaatgatacttgataattgactgatactttattaataactacaggtgtgtatttatacaaaagtcagaaacgcaatttgacaaaagaatgaactcagattattgagttttcagttaaaggatgttaagagactttaatgttattttcgagtttatatttaattctgatcaatgagtgatcttgccaaagtagtgaaaaccaaacaagtcagaagttatagaactttttagatagaagaaagaaagatgtcctttattaagtgtgttttttgtgtctatttatacactacctcaaaaaattgatcattttgaaccgccttttgctcattttgtaaattaactgcttcatattatttaggctagggggttttaggtaaaaggtagtataacaacaaagataaagaaatactgtgagggtatttctgggaagtcacagtctgactcagtctccagatttatcgtttttgggcgggattgagaatagtaaggaatttttttttttttttatggatgaacattttaatgtttattaaaactcatcaaagagtataaggattaagagcgatacaagtgtattaaacagtgacttgtcgcgaaaatactgtggtatttacacatgtaataaagtaataatgtaagttactacgaacaatggtcctccaaattaggaatatcggacattgtattacgccacttccaataaaatcccgatccactccagaatattctaataagttcctgatcaggattaataattacttcttgataagaagatgttaaactatgccaatcacataaataactcatcgtctaatatcgattaataatcaatacgcatacactgtaagtattattatttagccgtgattagaaaagtataaatacactcatatttttaacttgaataaaggacaatctactttgagtctcacttatttttatatttgttgattgacttagtactttttatattataaaacctcaaatatcacaaatacaaaagaaattagcatagagaagtgtgagcagatagtttcaatagctccttctggatttgattgatgacaatctcatccacgacaggagtctgttcaaataattgttgccagtgggctttccaaatgaagcgaatgactgtagcaaaaaaatcatagattgtaaacttgtcatgatagtgtaagatgtaatacttggataatctaagtgtggataaatcctcgaatattgagctacagttgggatctttaggatttgacaagtatttcttgaaggctgcgttccacaagtcttgtttttgaatacaagtcaagagcatatgctgctctgtttctggtagcttgcacaattggcagtagtcgtcatctacctttgctgggatgattctatgcaaattggcgcgagtggataatttcttatgaagaagtctgtaccataca

SEQ ID NO: 279 - DNA, 12680 bp, unidentified
  misc_feature 1..12680: note = Fanzor polypeptide
  source 1..12680: mol_type = other DNA
tatcttttattctgggaattcctcactgatttgaataacgttattttacgcgttatttcaattatgtgaaagattagaaatattcctgacattggattggatttggttattttagttgatacttcttcttatcaaagaactctcatgaatacgatacatattctaaaagaacatgtttaattggaattgattgtatgatcttatttaaataaacttatattttattttattttaattatgatcttgtattaagacttatatttattaatgtcaactacaatcagttactgttctacaacagttatttctctgtatcttaggtgcatgaaaagaaatggttttagtgtggcccatttgccctagtggtgtacttcaggagcggcaccctggtaacctcactaatgccatccccctcaaagtatttcgtgttaactattacatcaaccaaatatatattcactaattgtatttctctttcctcatcttatttttctcgttttatagccaactactacgttctcgtgttaccaaatattcgtaccactcccacagtcttcctgttcgctcgctatgacagcttgagggctataaataaaactctgttcatttattttttaaatgcctatcaaagcctttgtttgataacagttatagtcaagtaaaatttgagattttcgagagtttataactgctgttaaaaaaaactataagatgtattaatagccagttgaacagtagaatgattatgtctcaaaaaaaccttctcgaaataaaaagtaattttgccataggaaaacctaatgttgctataatcctgtatgtatatcagaaacgatattttcacatcctgtggagacactattgatgaatgtccttaaacaaatacaccagaatgcgttttttgatgaaaggatgggttctccacatacttgtacatattataaaaaaccttccttggatccctgtttgattcacacttcattaaaaaaaagctatctttttatgagttagctttattggtcaattgtcaaatatatgttatgggagtattacaataaaaataatagtacctactatgtatacaatttcctactaagcttaacagtcacctacttaaaaccataaaatctattattttaacaacaattttgtaatatcttcatttctttccatataatatgtcccttacgcgtatcccaatttacccaaatgctgaagccttcataaagctaaaaaagcaatatatatacgaaaagcaacaacagcaagaagaagaagaagcggcagcagcacgcagtaattttagaggtcaagttaaagaaaaaaaggtaatgtgaactatgtgccaataatgaaacagaagaactcaagttttagaaggcgtaaaatggaaggatacagcggaagaaaagattaacaaaagatcagccaaactggcgcgtaattcccgtgttgtaacaacagacgtattgtgtaaatcttgtggtgaaagcgggcattcatctgcgagaagcaagcaatgcaaaaaccataattacacaatacaagaagtaattgaaaaaaagatcggcctcaattatcaaagatacactatatccgtaccacttcgatcttttctccctataccagatgatgcgtttaataataccctgaaaaaaatcaagagtttgtcgatgttccttagaaatgtgatgtatagggcacagctctttatcaaccactatatccttaaatacccagatggcttgccgaatgaattttttcaacaaaacttttggtattctttatgtcgattaataaatgaaaatatttcaattgatgtcttcaagcaaaagtattcttcccatattccttatcttgaagaagtatggaatgaactcagcggccttgaaggtgtcagtatggtagtaaataaagaaggtcttaccaactatggccaagatttatcgaccgcatgcgaaagtgttgcaacatgttacaacaatttttacatagaaaactttggaaatgttgttaatagctactgcatatacatgattcgtaaagaatttccggtaaatgaaaatttgaaatagacctttttttttctacaacgattgatactatcaattcataggacttgaagatgcctttgatcaaatacattgtatacaatcatgtattagagatcttgtttagcaccccatcatcaactttacctgaaaacattggaagttctgtagataaacagacccaagacaaaattcgaaactttctaaacccgttgattttagaaatcaaagaccgcttaccaccagctcctatcacaaaagagacattaaataacgcccctttcaacataatgcctgtttttagacatatattatcaaaatacgaatcaataattgacgcgaaccaacaaataacacccgtagttcaactaacagtggcttcacaacaacagcctaacttattacagcaagcagagggttcaaaccagccacgacagaggcccaaaaaaaagaaaaaagtattaaaaaatgaaaacccaagggagcgtaataataaagatagacagttccaaccaccgagactgttcagtttatttccgaatccaagcttaaaatggcggttcatcaaaattgatagtcaaaacctacaaggtatttttggaagaagaacccatcaacaacaggaagagactccttttgatttaacccaaaggtctttctttgaatgttttgacttcaaaaagttgaaaattaaaaggtaagctatgtaaaacgttctatgaatagtatgcatacttattttcaacatgaatagtctggtagaactacaatcaatgcatgaaaaaggcaggatgttcttaaacagcttctataccgatggttatacctgtagagtctccttttgtagaaaaagatatatcaactcacatttggataaagtcacactcacgctaaatgacttcaatagcgagagggttgagcagctatttcgaacttgcacagtagatcctaaccggaaggacgttttcacatcttaccatggagcaaatgatataaggcgtctctctagctctgaataccataatatgaacggagttgtcaatcgtcaaaaactagagcaagaacgaaagaagagagacaatattgaacatattgaaacaagaatcccttcacccaaaacaactaatgctgaaaactataaaaaacacataatgtatatgctccagcactttggaactttagtaaacttttacgattttcaaactgctagaatacggtggtcaaactatatagggaatcgaaaagctacagatcatgccatcaatattctgctaaacggttctacaaaatacaacaaaagcaggagaaaaaaaaccagacgaaacaaacgtaaaagaagaaaaacgaatagcaaatacgaacgagacctatcaaatactaagcactcaaaaaaagggaaacaagtgatgaggtacaacttacatttttatttttattttttatctagaagcattgatctttttattttttatagggctcacaaagaaaggtttgaagaaggagacagaaaaaagatgccaatgattgtatttggaaatggattgcaaaacaaatctcatgtcaaatacaaaggattgaggcgcggggtgactgataagttgtacaaacagctgaaattgcgtgaaaaatcgggtgaattgctactgcttgacatcgacgagtttaatacgtcaaaggtgaaataaatatatgctcattttgcacaagtattaataacgcatcacttcttttgtagatatgcaatgaatgtttcacgaaaaacttggagaatttgaagtgtgatggtcgtaaaatccatcaggtattcaactgcaaaaattgcaatatcttttggaaccgagacgtcctggcatcaaaaaatatgttcaccattgctacctctatttggagcggcaatggatgtcccaatgtctttcaaagacaaagcgccacctccaatgtggttgcctcgactcactccggtgagtcgacggcttaaagatgactgcaggtaagaagtcttcataaagaaaaaaaaaaaagacaattctgatttccatataaaataggtaaacaaacttttaagctacagttgtgattcgtccaaaaaaaaactaacattttctaaacccataatattttttgtctcaactctatttttatttcatccaaaaagggtaagcaaagcgtctaacttaagtttttgatccgtctgaaaaaaaactgacatcatctgattttagactaaaatcctgtatgcatagatgtgatttatcataagacaatgaaggccatccaattgaatcaagtatcaattttgacccattcattcagcaactgagctatgaagacatccctatcactgcaatgaagaatcgacaattaaagatcatgttcagctttagcacaaattcacaaatcacaaatataaacaatagcaactggaaagcttttattaggagtcccatgcatcatatttccagaaatgtatggtacagacttcttcatagcaaattatccacccgatccaacttgcatagtcttatcccaacacttgtagaagatgaatcttgtcaactgtgtaaacttccagaaacagaacagcatatgctctttacttgcatacagaaacaagacatatggcaagcagttttcaagaaatacttatctaaccctaaagatcctcactgcagctcaatattccaggatttatctacacttaggctttccaagtattacatcctgcactaccatgacaagtttacaatatatgatttttttgccacagttattcgattcatttggaaagctcactggcaacaattctttgaacagacgcctattttggaagagattgtcatcaatcaaacccaaaaagaactattgaaactatctgcttacaattccttatgctaatatcttctgtattttcgtgacaagtcactgttttatacacttgcttcacatttaatcatctactctgatgagttttaataaacattaaaattttcatccataaaaaaaaaaaatgtgatttatcataaaaaaagaaaaaaaagaaaatacatgtgatttattactatcttttgtattttcgcgacaagtcactgtttaatacacttgtatcgctcttaatctttatcttctgatgagttttaataaatattgaaattctcatccataaaaaaaaaaatacatgattttattggactatgtacagaataaggtatttaatgcggataataactggaaggtggatgggaaaatctcttgttgacttcatcttcagtaagttttcttgttacaaatgaaatgtcactcattgttctctgagagtattgatttggatattgtcttcccattgttttaaatttgcgaacatgaatacacattacgagtaataagatcagtggcaaatagacgaataaactttcaagtagaatccatatagatatatgataatcatctcctgctccatagcgtatccagcccaataaacacatacccatcattgacattgagaacagtaaaggcacaatacgtaaaaagaatagatcatccctattttgacgaacgttaccaaaccttgagctcttccatattacaaagcaattaataatcgtaagaatccataaaattgtaatacagataggcattgccacgctttgtacggttgaagtagatatttgaataacaatacagcatacaataattatagcatagaccaacaaaacgattacgcttgtccaatagttccagggacgaagggaatgcctttcttgtgctcttgggaatccctccgacttttcagaatctcttaaatagatactacgccaacgttctcggttataaagcgcagcagctacgtgtcgaatgaataatatctgagcttccataattccaaggagcaccaagatggatatcacaggtaatacattcaacacaagacttttactggaccaatctgatgttaatgtgaatccataatgtgcgctaagcataacgattaatgctatacttgtcaagaggccaaaaaggacaaaaggaagtaataaaagattatgacaacagcgtgctgccaatatgatagaaagtacagcaaaaaatacagtataaattatccaagctacttcttgtgctgacaacatggataagaacagaaagaaaagaagaaactaaggaaaggatcatttgtttatgtaaaaaaaaaaaaaagcaatgctaaaaaacagctttctaaaaacaatagttttggccaagcctatcttttttccttttctagtaaagttttttgctcttccgtttctaataataagctataactctatttttatttttgacatctgatttttaattggttaaaataaaaataattaaaattcgggccaagactaagaaaagttgatgtcatgtccatttaacgaactctggtttatactctaattcatcaacaaattaaatttgaccatcttaaatctttaagcagagaggaagaagtcgatgattttaaaagctttatacaccattttcagaaagtaaattcgcatttttacaaactttataatgcaatatatacaaaaagcgttaagtaaacgcaatatttattcctgaaaatagtgtatgttttaagaaaaataaatagatgaaatggctatttcggacagtgattgattgagattattttctgtggttttatttattataatgcacacatcaaagagtagaaatcttctaccaaacttattgtcaccttctacaatgagttacacggaaacaaatagaaaaataaaaggtataatttacttatgttgtaggtgaatatagttagatttcaggtcgattatactaaacctgctaaagttttttatttttaaaaaaaaaattaaggtaaatcaatttgaaatgccccaggagaatattatctagtaaaaaaaaataatgtctaaaatggacatattctagttactcgcgttttgtttttgcagtacatttagataaacttgtacaagttaagcagctgtaattctataaaagaagcatgtacactatttattgagataaaaaataaatgcgctaaggcaattttttttctttaaatttttcttatgaaataaacaggctttaacattgggaaatcaaagaatttgaaggttttggagcaatattcttttaatttcaagtctagaaagaactattctatagaccataatcaataacaataacaaaagcaatggtttgtgctacttttcacaaaggctttgaattgtttcagccacactgaatttgcatgactacagtatgctgaaagtgaaatcagcaacatgttcaactcttgatatcaaattattctaattatttgaacataatgtttagtaaataagcaacaaggtattataggtatagccgcttctaatttgtttgtagtattaaactcgaataaaattcacaaactataaaaaaaaatgactgcattattgtaaataaagctgttaatgttaatccattgacaatggagagaaaggcatatatagcaaatataaatgcttatttctagtgacatcagctttcttttggcagctaaatgtttttaataatagtaattgaaaagtgtataaaatacaaataaaaaaagctgtaacttgttagctataaagttttaataataatttactaatgcaaggatgataatttactgaagggaaagtcaaagcttcatacaatatatagatttgtacaaattggccataaattaatgcagggttttgaattatacaaaatgctctaagcgtcagggcatgcaacacaatcacaatcgtcttcttctaccatttgattttttaattctctttccataatttctacataatcgccaactttgccttgatatggttgtaatctaagttcgtcatgaacaatggccaagcatgtagacaaatatttgtgaatacggggaatatattctgtgatctctggtggcatcattatttgcactttagaaatattcaataacaactgccaagcgttaatcaaaactcgcatgtcaaaataacagtcagtcgaccttgaccgaagatatttaattaagcgaacagtattgaaggcggcatgaactcctgttataacaatatgcttctgaatgtgggattcatgtggtcctagaaatgattctaccattgcaaagtattcttcatcagtaccttcaaaatcaatcttagcacgaagttctaatatcttttgtattcttctcctccattttctgctgatatttgcattttttggaatatttccgccattccaatgcatttttaataatttccattcattttcaggttgcggaattgctttagggaggtaagactgtgccatgataagccattcttcataaataactagtgtagtcaaaacaggtataacgctgtgggagcattctctttctaatgtactataaaattcttgacagctaatcgttgaatcaaacaaaggaagggacagtctaaactcaagtggtaaaactttagtgtaccaatgtctcattgccatctccacctgatgtccaattagacccacaaggtgatacaaatcacttgaataagcacacttgctagctttatgttcagttctttgtagaagtaatatgtacgaatgcatttgggcaaaccacttttcctgaattgagtcatcttcagcaatttcccattttccttcttcagagtgagttagtgtacagtaaggtagatttgtttcatcttttttcatatctggaagttgggcccttgtaatttcttcaaatgtctgtacacgacgcaaatgattcaacaagcgactaaaatgaacagcttctcctttctcttgtaaaaaagttgcgccttttcttttcatcttgaatatagccacatatttcggctgtaagaccactgaaattcgttcggccatatcagtatacagtttgcccttttcaaactcagaaatagtgagtgtgtagactgccatgaaaacgtaagcagtaaagctttccaagttgaattgatcaaatgaggcttctaaagcatcacgagcccttttaaagtaaaattttccatattcaaccaaagaagcagaaggtagacatcctgcaatatgtttacatcgcagtgtacagatagtagcacaaagagccattgcagcagcggattctcttgtgtcgagaaagcatctaataaacgtggggacatggatagctaactgttgaaaatgttgacaacgcaaataagcttgtatcaacttattggtcgtaacttgtatattttcaggtgaacatgcagtgactattgtatttacacttgacattctcggtgcagtaaaaatacgtattgattttgcgacgtttttacattgagttttaccatactttttgcgaatcaacataacaagttggtcgactatattatcctgtttaatgcaattttttattactggaggaatgcttgatccgtactccacagactgcagcacacaataaagattattaaacagatccgaataattgttgatatgcgtatcaatgcaaaagtctccttttttcacattaagcacccacggttgtgtttctctctctcctttttttaaaattgcctgtgtgccattatctaaaacagcaatcagctttgaatgctgggcaggttggcttgaaaagctgagagcggttgaaggtgatgaagggaactcatcagtcatacttccatcactgtcattagttaaagaaggtgtactacttccttgattcttcatgcgtttcattgttttttccatgtttgctatttcaatttctaacgactccgcttgctttaagagttctgtttgtattgcaatctgaatgaactcttcatcaacaggagaatgcgagcttgagtatacacaatcgatatcaaacttgtagcatctggatcgtatacctttgataagtaaagattatttgaatgcctaaattttaactaacctttcacagggttttaaaccattgcatttccgtttctgatttcgacactctaaattatattttaagcattttaattttttgattaatgtcctaaggcttatctaccttcgcatggaactttcttcattgtcatgcttaaagaaaaaaattcccaaaaagtaaaataattaatccgttactgcgtgtttataaactgtttagcctttaagccaatttctcttacagaatatgggaaaactattttgccgggcttattttaagtagaatgaactgtgattttttatattttattcgttgttgttgttatgctcctaccttgatagttataaagagacttatcattcaatggaataacaaatttcgtcttgtgatgaaaggattatctgcttatggaaacccatcgtgtattcaatttgttacagtgcaaacatgttctataccaaaagttaaaaacactaattgaaaataatcaacaatattgactatatatagcttcaaaatatatctaccggtttttatcgtctatttgcaaggagaattgatgctttaaaatatcgaaaaataaagctggaaactcatacctttaagaatttaacaacttatattccaagataaaaatatgcatgaagtatgtttttttctttacttactagcaattaactccaaagctgaaatttgcttaatcttaatagcattctttattgatgacataaataatgttcaggttggtgatagaagagcaggagttatggtagtaactcttcaatttgcgcttttatttattcaaaattacagaaaaataataaatgcacaaacatgcataccttatccttttcaaaccaagaaacgaaactttttttcatcacttttttaatttataataataaaaaaaattattcataaaatgaaaaagagtaataaagatacggtaggaccaaatatacattatcattttttttagttataaatatccagagttcatgtacttttcactatgtagatattattgtatacatttcgaagctgactatgtactatatatattatgcagtaagctgtatattaagtattatgaagacctattcataatttaatacaagaacgtgctcctgtatcgactgtttgctataacgttaaataagtccaaatttgtacacagttatacagttcaataaaaaaaataattatttgttattctgcaatgagctgctttatcaagtcagagaggatagagaaagaagagaaccggacagaaactaagaagcttgaatagtcaactaaaagaggacagtagagggtggcgttaaggatttgaagttatgaactgcaaataggacttaaaatagctgataagcaagaacgaaacaaagataagtaaagataggaatagacgtacagtctaatagagagaatgatacttgataattgactgatactttattaataactacaggtgtgtatttatacaaaagtcagaaacgcaatttgacaaaagaatgaactcagattattgagttttcagttaaaggatgttaagagactttaatgttattttcgagtttatatttaattctgatcaatgagtgatcttgccaaagtagtgaaaaccaaacaagtcagaagttatagaactttttagatagaagaaagaaagatgtcctttattaagtgtgttttttgtgtctatttatacactacctcaaaaaattgatcattttgaaccgccttttgctcattttgtaaattaactgcttcatattatttaggctagggggttttaggtaaaaggtagtataacaacaaagataaagaaatactgtgagggtatttctgggaagtcacagtctgactcagtctccagatttatcgtttttgggcgggattgagaatagtaaggaatttttttttttttttatggatgaacattttaatgtttattaaaactcatcaaagagtataaggattaagagcgatacaagtgtattaaacagtgacttgtcgcgaaaatactgtggtatttacacatgtaataaagtaataatgtaagttactacgaacaatggtcctccaaattaggaatatcggacattgtattacgccacttccaataaaatcccgatccactccagaatattctaataagttcctgatcaggattaataattacttcttgataagaagatgttaaactatgccaatcacataaataactcatcgtctaatatcgattaataatcaatactcatacactgtgaatattattatttagccgtgattagaaaagtataaatacactcatatttttaacttgaataaaggacaatctactttgagtctcacttatttttatatttgttgattgacttagtactttttatattataaaacctcaaatatcacaaatacaaaagaaattagcatagagaagtgtgagcagatagtttcaatagctccttctggatttgattgatgacaatctcatccacgacaggagtctgttcaaataattgttgccagtgggctttccaaatgaagcgaatgactgtagcaaaaaaatcatagattgtaaacttgtcatgatagtgtaagatgtaatacttggataatctaagtgtggataaatcctcgaatattgagctacagttgggatctttaggatttgacaagtatttctt

SEQ ID NO: 280 - DNA, 20819 bp, unidentified
  misc_feature 1..20819: note = Fanzor polypeptide
  source 1..20819: mol_type = other DNA
agccgtaacatagaagtctggtccaccaacaacgacttcgatgttcattggcacttggcgctccttggtccattcgtccatgacgccgcatcccaaatccttcccgtccgattggagtttaacttccactgtactgtcattgtagaccctgcggaagacaaataggttgataaagcaaatgattgagattcagattcagattcaaaatcagattcagatatagagaaaaaccaaactcagaatacccatagtcctcccgatcataatcgggagcagtgtcaaacccaacgagcaaatgattgagaaaaccaaattcggaatacacacagtcctcccgatcataatcgggagcattgacaaacccaacgagcgaatgattgataaaacaaaactcagaatacacacagtcctcccgatcataatcgggagcactgacaaacccatcgagcgaatgattcagaaaacatgtgctcggcatacccatagtcctcccgatcataatcgggagcattgtcaaacccaacgagcgaatgattgagaaaacctaattcggaatacacacagtcctcccgatcataatcgggagcactaacaaacccgacgagcgaatgattcagaaaacatgtactcggcattttttttttttttttttttttgtactcggcataccaatagtcctcccgatcataatcgggagcattgtcaaacccaacgaacgaatgatagagaaaaaccaaactcagaatacccatagtcctcccgatcataatcgggagcagtgtcaaacacaacgagcaaatgattgagaaaaccaaattcggaatacacagagtcctcccgatcataatcgggagcattgtcacacccaacgagcgaatgattgagaaaaccaaatttggaatacacacagtcctcccgatcataatcgggagcactgacaaacccaacgagcgaatgattcagaaaacatgtactcggcattttttttttttttttttttactcggcatacccatagtcctcccgatcataatcgggagcattgtcagacccaacgcacgaatgattgagaatacccaaactcagaatacccacagtcctcccgatcataatcgggagcattgtcaaacccaacgagcgaatgattgagaaaaaacaaactcagaatacccacagtcctcccgatcataatcgggagcattgtcaaacccaacgcgcgaatgattgagaaaaccaaactcggaatacacacagtcctcccgatcatagaaaaatcaatcctaaaacctgtcaaagaaaacttgatccaccgaatgcctagacggaacaggcaaaagggctaaattcttctgggctgtgacatttcatcagtcatgctatgcaagtcaagcaggcctcaactacacatctttgctttacctattgcagtactgggccactaaaacaaacctagtaaataggtaggtggccgaggtgggcaagaacacagtaaaatagaagaactgcaggtgtacatgatccatatgtcagtgtcatgttaagtaccaatcacaacataaacacccaaccacactcccggcaaagattaaccaataaacaaggcaacctgttggcaagcagtaacttggtcaacacaggcacaaggcagctaagtctgggctacaattgcagtctaccactacaatgcaattcataaccaaaccagacgctatggaaatcttggaacggtagctaaggatgcatgccatatgggtatgcagtactgtccgccattactctgacgcaggtgcaagcgggtaaccatcatgcaggtaggcaggcctcaggaaggtgcaggcgggtgcagagctgttcgccagtactccggcgcaggtgctggcccggcgcgtgtcctggtctggtctggcaggtgcaggcgggtaaccgccatgcaggtaggcagacctatccagtgctccgagcgccagtgctcctggctatctgcccagcatccaccagagaaggtgctaatcaggacagtgacagtgaaatgcattgcgcaaagggtgcgagagttagaagcaactcgggggttattcacaaccacccggtgctaatgcagatgcgcagcaaggcgatgcagaaagcgaaaggcaaagcagcagatcatgagaacagagctgaagtgaattcccatagcagtgaaatgcattgcgcaaaaggtgcgagaattaggtgcaactcgggaccatgcagggccatccggtgctaatgcggatgcgcagcaaagcaatgcaggatgcgaaaggcaatttgcgcaaggcatgaaaggaggtgaaagcgcaaggcattaaaagaggtgaaagcgcaaggcatgaagcaaagccttaccgacttatcaaaacagtctttcatgcatgcgcagcaagggggggcccggcaaggggggtcaatcaatgcacatcaaggggtcatgcaaaggggtcaagctgccagagaaggtgctgggcatggcaatcaatgcacagcaaggagtcatgcaaaggggtcaagctgccaatccattgagaaggacaccaaggcagaggctgtgcaatcggatggagactttgtgtattgtgagataaataattatgagcaatgcgttcaagactttgtaaacagctttcaccttcctcttgactgtcctctacaattgattttgtattggaatacttcgaaggaactttttctctctccaaccgagcaaatcaatgttacaattgaaattgaagggaatagtctctttctccggaatgcaacaaaacaatcttacataataaattgtaagatattttcgtaaaatacaccaaaaaagcaaaatcaatcaatttgcgaaaacgatcttacaaaataaattgtaagatattttcgtaaaatacaccaaaaaagcaaaaccaattaatttgcgaaaacgatcttacaatatttatcgtaagatttcagtaaaataaaaaatccgttcggaagcaggaacgcccattaagttgcacgctggccagaagttaagggctagcgtggacgcttctgggggggtgcttgtgcttgccaacgacggtgattcgcgtttcccactgacagtcagtggagatgcaccgtcggacctcgtgcaggcggcgtttggatcctcgatatcgaggccgcctgtagctccgttgccaagttacacgggaatgcgtttggagagcgggggtggggacttggtgattctaggtggcgaggggggtggcgtgatgcaggtgtccgacgttggcgtcgccttggatctgaaccctgcaggcgggcttgtgcgtgtgaacggtgtgccgattcagtcgacgtcggacgggcgccagaagacgaatcgctcggatcttttgggtacatcgtctgcggacattttgcggaggctgcgtccgtgcacgtacacccaccgtggcgtggtggaggcggggttcatagcacaggaggtgttctgcgaggtcccggagatgcgtcacctcatctcactccctagagactttgagatcgatgacgacaacacgcttggcaatgcaccggtcgggtcagtgggtttgaactatgtgggcattatcgcgtacctagtgagcgcgatgcaggagcaagcaaataagatagaggacctccaggcgagaatagccaagtagttcaaggcatgtagagacacatattacgagtattgggactcgtcacggcaggacttgtatcgcagtcaaggttggatactgagaaaaccttacgatcaaaagagaggatgaagataaagatgcagatgattcgcattcggaagagaattttttacctcaagaaagaatttagggaccagacaacaaatttcttggccgctcgctacgatgtgttgttggtacctcaattggatacggcgaagatgacaatcagtgctgaacgggagctgacaaccaaggtttcccgtcagatgctgactttgagccactctgtgctgttcaatcggctgaaggagaagtgtgaagagtacgggattgtgttcttgcatgtgcttcattacacaagtcagacatgccctatgtgggtcatatgtgggattaaaaaaaaaaaactggaaacttggaacaatccagagtacatgacagtcttgtgaacaggccatccgtcaatgaaatcttcaagatcggaatcgtctacgacttttaaagatcatcttggaacaatccagagtaatccaggacagtcttgtgaacaggccatccgtccatgaaatcttcaagatcggaatcgtccacgatgcttcgaaacatccaacatactccgtagctgcgtgagaatcctgaatgctgattccaagccttcacacacaggacaggaggagcgttggccatcgcacagagggaatcgatagcttcgaacgcatggtagccttcggcattgcaatcaatgtagacacaatgcgtcacactatcgtaatccatacacaatgatgcggagttacacacgttttcgatgctcttgcacaaaattaggggcgcaagttgtggagtaaatcctatgtcaaccagcgtctccagcatgtgagagtaatattgatccattgtgaatgaatgtatgtcagttagttctgtcatcataatccaatcaattttttgtacaacaaccaccgaatacaatgcagtacaatacagtacaatacagtacagtacagtacagtacagtacaccgtcctccagagtgtgcagtccgaaaaagaagggcgcatggttcgaggcttgctatggtgcagttccaccatggaagttgtggtaggacgcaaaatattaccattttttttcaaaacaacctataaagagagatgatcacgttttcagaagtatctgttcgttcacttgccacttctaatattgtgaacgccccctaccctcctctgtcgggtatcagagcacagtcaggcacttcaggacttccaaccctatctttcgctaactctcctgacaccgggttgttcaatccaagtgtggggacgctaggtgtggttgccgggggagcagagctggtgcgagtgtcaaacaatgtatctgtgttggcggatatagtggtgtcgtcaaacattatccctgtgaagaacgcgacgcagcacatcgggtcatccaacatgcactggattgacacgttgcacatatcctcgaacacgttgtacgtgggcgacacgctcgtcctcggcattgacgcccagaccttggccatgagcgccggccccggccagggcatctctatcacgaccaccggcgctggcgagacctcgctcgcgtccgaggagggtgtcaacgtgacctcggtcggcggcgtcagcatgcatgtcaccggcatcgacaaggttgtagacatccagtcgactggcgcaggcggcattgtgcagctgggcgcgaccaaagaggtggtcttgaccgcgcccacggtctccacggtctctagcaacttgaccgtcaacggaaccaacttcactgcgggaatccgcgcgaattccggttctgccggagcgccttcgctgtctttctcgaatgcgaccgacaccggtttgttcaatccaagtgtggggacgctaggtgtggttgccgggggagcagagctggtgcgagtttccaacaccgtgagtgtgatgggagatctcgtggtgtcctcgaacattattccttccgcaaacgctacgcagtacatagggtcatcgaccatgcacttcaaggaggcgtggatcgacacgctgcacatatcctcgaacacattgtacatcggggacacagccgtgctcggaacggatgaccagacagtgtccatccgcgcggaccctggtcaaggcatctcgattacgaccacaggcgtgggcgagacctctttggtctccgaaagcggcgtcaacgtggtggccggcggaggagtgaacatgcaggtcaccggactcaataaggttgtggacatccagtcgagcggtgccggcggcaccgtgcaactcggcgcgacaaaggagatggtcattaccacgcccatcaccacggtctcaaacaacctgaccgtgagcggaaacctgaccgtcaacgggtccaatttcacgtgaacacccagaccgtaactgtagaggataacatcatcgtgctcaactccggcgagatcggacccggtgtcacaaagggcgaggcaggtatcaccatagacaggggagacgcgctggactaccagatcctctttagggagtccgacgacaagttcgtcatgggccctcaaggttcccttgtcccaatcgccaccgagaccttcgcggcaaacgctggtaatatatctacaggcgttcttggagtgaccatgggcggcaccggcgtctccgcgagcaccggaaccgggagcaacgtgttgagagataatgctacgatgagcaacttgacgaccataggaggaatgatcagcggtaacggtagcggacttaccgccttgaacacaaacaacatatccagtggaacattaccggttgttagaggaggaacgggggtctccgtcagtaccggaagtggtagaaatgtgctcagtgacaactccacgatgagcaacttgacgaccataggaggaatgatcagcgataacggtagcggacttaccgccttgaacacaaacaacatatccagtggaacattaccggttgttagaggaggaacatgggtctccgtcagtaccggaagtggtagaaatgtgctcagtgacgacgccacgatgagcaacctgaacatcgtaggagggatataccagaacggagtaccatttaaggtgggcggtggctttgatgacggaacggttgggtttccgtccattacattcacgtctgattcaaacaccggtttgtttagacttggtgcggataaaattgggttcagcaccgggggggtgtcgcgtgtaactattttggataacggaaacgttggtttttctacaaacgcacccgtatcaagagtgcatgttgtaggcgatggatatttcaatggcaacgtgatcgctaccagcaacatcatcggtttcagcacaatggagtccgattctaacgtcaagcaccacttcgagcccatcacggacgcgctggacaagatcgacgcgatcggcgcgtacaccttcgagtaccgtggcgacgatagccgcaagaggcacgccggagtcatcgcgcagcaggtgcaacgagtccttccggaagtcgtaagcgtgcacccgcttaaggacactctcacggtcgcttacggcaacttgtcatcgttgctgctggcgggtgtccaggaactgcgcgacgaattgaacaacctaaaagaggaactcaaggaaatccgtgaatcgctcgccccgcacacacaatgaaaggattatagcaatatttaattgtatatcgcttgtaaaaagaacccttatggacgtgggacatactctgtcaatttcttataatgcattggaaaccatacagttgttctcaaataattttgggacactcagtataatttgaatgatatcccctgaaaccaggtacaggtccgtggttcactacaaatattttttgaggagtctcaggaaggtttgtaatatatacaacgtttccaagagctcactacatagatgggtcaatgctgatcaggtgggtaaaagtaagcgtttaaaacgaaaaaggaaagaattgtccatgcttttacgttccacgatatccaataatattgcagagaaccccttcataacatgcaaggatttggtcggtataatttgcaagagttgtaatgtgagattatcgatcagtacggcatcgagacacataaaacaatgtggattttctaggaagaaggcgtttcccacagttctctacggacattcaaaagaaaatgtagaaatgttttgtgacaagtacagagaaagctctaacgttgtttgtatcgacgaagcaggattttacgctggcgaacacagcaaatatggatacagcaagatcggttctagattaactacgaagacaatgagtaacctccgtcgtgtgaagttcactttattactcgctatttcatctcaggcaataatagattatcagttattggagcacaattgtaaaaaagaagatttcattaaattctttaaaactttggtcatcccaaagaacaccacgatcgtcatggataatattcggtttcaccattcttcagaaataaaggatatatccgaatgcaaagggtggaagcttttgtacacccctccttattgccccagagctaatgcgattgaacaaatatttggaagcatgaagagagactacagggcatcatgtccattgacgtcaacctgtaatttcgattacttaatgcaaatatgttgtgttctagaaatgtggaggtataaagacttttcaaaatatatgattaatatgagagattgggttaggaatgttcgagagagcctgtctgcagatccagattacatcaaaacgttttcggggtacaatttgtgatggagaatgggatcggcgagtcatcatcgttggtacatgaggctgaccaacatgatgacattgcagaacttgtcgattatgaaggggaggaagacgaggagtgtgcacctgggcgagcgatttgtgtggtcaagatgaaattgagtacctttattccccatgattggcttcgtaaaaagatagacacactggtactggacatgaacaagttgcttggagagggttatattttcgcaaatttccacattgctcgtctttttgagaatggtatcgctgtccctcctgtaaatcgcaacttcttctaccggtgccttattgcagtcagtaccaacaaatgtaaggggtccactcttggcgaagacttcgagagtagtcggcttctgttcgacttgttaagagagccggggcaatccaaagttgacattcgggggaacgtgaagaaccagatcattgcagacctgtctattctcatggccacaatggcctctaaccatctttggaccaaccttgagcgacgcataacgacttacttgaagtggaagtacccacagattgcaaagcgcctgcggtcggacatcgtggctgcagtgatcaagtgccctacaaagaatctcgacgtcatcttcaagatgagccctcatacaaccaagctgccaaccaagctgccaacagctagacttcgatcggcaaaaagtgcagttgctcttgcgaagaagagggtcggtaggaaagaaccagaaggatcccctttgcgtgttaggttgactaaacttcaagagaggcttgaaaagttgagcgaagcttggctctcctcgaagaaccttagggtggacgcagataacgcgaaacgcttctttgcacgcgacgtggcattctgtctcaggggggttctacctttaccatccggaaacacttttgcgtctcgggctcacatgaccctgcctctgtaccacaagatattgttggagaccatcgaagaaaaacgaaaaacgaaaaacgaaaaacatcgcacattctcgttgttgccttacaaatctggattcactctgtcgcacattccgatttcgaaaatggcctttttctatatggtcaacgagtgccacttcgattcatgcaaggcagacgttgcttccaaaaaccatcaaggaatatgggagcgcttcgcaaacctcaagaaagtggagacagtttctcggaagttcggttaccgcattgtgacaaacggctttgcagtcagcatcttgatgaataagcctacgtgtctgacatgttcgatgcctgcagacgcgttctctacgcgggcgcatgagtatgtgacaacagacgagggtggcattgtatccttccttgacaatgtggtcgtggctgcggtagacccgggtgttactgatatcgtgactgtaacaggactcaacggaggtaccagatcgtacagctcggcgcaatattatcgcaagggtctgatcttcaagtctcagcgtcaaactgacgtttgaaacctcgagacggctgatatcgtcggtggtatcattccggatagagactcttcgagttctgaacagattggtgcgtacgccagattctacatgggtgccgccccaatccttcttgcccatcgtgcttccagggggtaccgaaacctccgctttcgcaggtactgcaagaaacagaaactcattgttgagattgctgactttgtagctccgagagagaagagcgctaaggtactcgtcgggtttggtgattggaaaggtctgggggcgacgccaatctctaggcggacttgtggccctctccaagctattcgtttcgagcttcgtagccgagaaaacgacatcatggaggacatcgatgagttcagaacatctcaacgatgcagctgctgtgagaaccacctttgcaacatggtggcactcactcatcgtaagaagcaagacggtacaagttgggaatgtacagaaggacgcaagcggattcataagattctccactgcaaaagcagtcaaagcggagcgccacgccaacagagcggtggtatgcttcactgcgggaagacttgggaccgcgatgtgaacgcttccaggaacatcctgatgcttacacttcaccaagtctttgggagagagcgtcctctcgcgtttcgccgagacgcgccgagaagttcctcgacaaccccacccccaccccctgatactgacatggggacacagacggttgaacggtttaccaaagaggctactcggaatatctttgagaacctcttcaacctgctgcaccccccaacgttgcccaaaagcaacgatctgcagtctggatgattataaggtgtcccactttatttgagaacaactgtaacaaacattggtgtaaataatacaaacacattatttgtatgcgaagtggtcttaccatcaacatatgctgaagattgtgtactcttcgagaacggaggcacgtcctactgagcttacgtcggtgtgcgggacgtggcgtccggaattcccaaacttcgggttagaggtggatttgtaggaggcacagtaccacatgcaaatatcgtgtacgtcgatgtatacccgatccctgcggacgatttgacgcacgagatagcattcgaattcagaacagatcccacggaaggagtacgtgtctggatagacgggactttgtacggcgaagccacagggtcttttcacagtggtatatggtcgggtagtgggcctggttcattcggaatggttaaagatggtggtcccatgggagagtcgtcgaacccttggccagttaccatcacaaagccgctaaggaggtacgataaccagctcggatggctctctgccatggaggccaatctcggaactcccgactacgtatacagcgggccgtcaacgttcgagtcattgactcttgccacggacaccatgttctcgatggatgttgtcattcccacaaactttgctagcagctgcattttgttcgactacggaggatctgaatacggtctctatataggcgtagtccgatctcaggtggatggaagcacagtaatgcgtgtggttgcaagcaacatttctacagtggacatttcggattttccgagggacggtcgttggcacaatatagcatttagttaacagaagaaggataacgatattgacacgtcacgtgtgtggatagatggggtacttaaggttactagtacagtggaacttggggcctttatatcagggtcagatggaggaggattcggtttgtttaacaacaccgtgaagaatatgcaggacacgacaccatggccttctagtttgcgaacaattcgcatttacctaaacgagaccggctgtctacccttgtttggagctctgagttttgcagacatcgctcacgagtacgggctttcgaccacgcaaccagtcgcgctagacagcttctaccaaaatcgacctgcaatcaccactggaatatgggacacacgaagatccgctcttgcacgtagggcgtttgtaggtcgattggggacaccgaacgttccatcggatggttcattgtccctccttgcattcaggggcggaaggagaaagcctcctgcattggcgcgcgagatagtgaccgtgcctccgcagatgaatgggttcgcggaggacgttgcgacagagctttttgctgcatcatttgcgaataccacacaagcgcagatggaatctgacggatggatattcaatactgataatgtgttgacatttgaaagtacgtttgctcggtctaataggtctggaacaatttcctcgcctccagtgatagatacgctatcgggtgttggatcagtatcgttgacattattcggttcgtctttggaaggagacgagagagtaacgtttcgggtacaagatgtgtcaaacggaaatgtcattgaactcgatagaacaacaatcgagacaacgagtacgacttacaaatacgatctgcgagatctagattccagtgtggtcgatatttacaaccccaagggagttaaactcattgctatcttagccatgggtataaccgacggctatcatcttgaaagttttagtgcgtcgaagattgagaactacgtttgtgccgccagcacaaacagagcagggtggttattagcttggaatgtgttcgaccttaacaatggtaatgtttggcaatcacaggatggcgcatacaacatcagtatccaaccccaggacggttctgctcggttgttacgtaacatgaacggattcaatgacgggattctgggcgaattcatctccttgcgcatcccttggcccatctacttaacctcatacgagatgactggcaactgcagggactgggttgtgtacgggagcgtggatggtaagtcgttcgatgtgctcgacacgcagataggtatcgcgtctgtgtctgtaagtacacagcgtctcatcacacccactgtaagtccaagcgaaaatgcttataacatatttgtagtgaagttcacgaggacggcgagaggtggttggaacagaggagaaatgaatgtcatgaatttcagcggcttccgtgcatgaattgtggaaatgaatgatgcatgcgcaaatcgctgacttggtgtctgcactcgaatacatgtaagtccgatatttctgagaaacaacgtttcggagaaaaaaacatttcggagagcatgacaaataatgaatgggacgcttcgctgaaattgtggagtggtggaggcagggtagcacaggaggtgttcagcgaggtcccggagatgcggcacctcatctcactccctagagactttgagatcgatgacgacaacacgcttggcaatgcgccggtcgggtcagtgggtttgaactatgtgggcattatcgcgtacctagtgagcgcgatgcaggaacaagcaaataagatcgaggacctccaggcgaggatctcacacggcgttgttgtccccggacgtgagtctcgcgagattggaaagcgaggggctcaagcagctgaatgtgggatgaatgctcttgggcgttcattcggggcggaaaaaattgtaatgtaccgttgaaaattatttgagaacaactgtatgtttacttattttcggaaagcaaacgagtcaactgttgcttccttttgtgctttgtgaatgtcgcgtggccacaaagtacatccgatcgtcgtcaaattgaaactgtaccgtcccacgatatttgaatcatgtacctcaccctcctcgtattcggatccggggagaatgactctgcacaatttggggaactcgagatccccgttgggacatgatacacgaggtccgaaccgtaattgtgacacaccctctccccatccatcagtcagctgccccttaacgtaattcaacaacttgacatcgtccacatccatcctcgagggcctccattcgtccggcactttgtttttcccaaaagaaaacagacctcctcctcctcctcgttggtgtttcttccgagtcttcgaaaagctcaagacgatctcgacgaacatgaacccgttcgcaacaggttttaaacgggcgtgcttgaaatcgaccggccacatacccatcgagttcagcagagggacctcttcgatcagatgctcgaaaccgaacgatttccatcgtttttttatggacgcgatcgcttctctcgggacgggggtgggtgtggacaatcccaggttgacgtcgggacggtgacattgcacgtcgtccaacacggcggggaaagtcagcgtaatcattggcgcacacgatcagaatctaaaatacgaagatgttaaaaaatcactgacttgttgtcgcgtttctcttctgcacttgaaggttgcaacaaaatgtccggtccgacttttctgagaaaaatcatttcggagaaaaaaacatttcggagagcatgacaaataatgaatgggacgcttcgctgaaattttcgccgtgttcatcatcgtgatcatcattgtagggtacctccgcggattctacagcgaggtcgtgttcgtgagctcggacgtcgacggtcgcgaatacctgatgcgtcggctgcccgaccgccagaacgcggtgaacctcatggcgcgcatcaactcgaatcttaacaagctcgttcagcatctcgtggccaagtacccgaaaaacccggtcgtgcgccagctgtacaataactacaacccagacgctctctcggagggcggggcggaacttgggtacacatcgtactctgtaaacaagggtgagaagatcgtattgtgtctgcgtcagcgtgaccacgagctagtggaggagaacatcctcatgtatgtcgcgatccacaagctgggtcacctcgcgacggacgaggtgggacacacgcccaagttctggtcgaacttcaagtggatcctgggcgaggcgatgtctatcaggctctacaccaaggtcgactttgacaacgagccacaaaagtattgcgggatcaacatcacctcatccatcgtttgatggtttacagcgttcttgtctacaaaaaatatacaccgaaaaataatgagtcatccggggtacgcgcatgcattgtacacggtcctgtgtgtcgccttcctgatcgcgtggatttccacttacatagtgaggtcgaccaccaccagcacagaagagttgaccttggagaacgtagggatcacgtacgccggtttaaggaatgaccttgggttctcgatggtagagcctctcataatgttagctatcggggcgaccgttctggcagtactgcacgcgtttgtcctcccaacgatcgtaggaaacgataacgaggccatgtttttatgcggtctgaatctcatgtacccgcatttaaagttgtgcctctcgcacttcatccgcaagatctatgatgcttttataatcttggggatggggtgcatgcccataataatgtacacagtcccaatggataagtttgtcatctgcatgctctggagcagcctctacatcgtcattgcatctttcgcgagtagctgatggaccggtcgttgaagagccagttcgcaaaggcgccctggtcgttggggtcggcgacagtgtaaaactgacggaagccggaattacgtttgaacacatcgtgtggctcctgccatttatcgccgtggaagagtttgacaactcgctttcggaccgacggacgcgtgatgtcgcaagggggacgcgtccctcccaccagcactgcgcccatgtcaccgattgcaggattcatgaacgggttctctttcgtgggcgcgcgacagagcctcgccgtctcggggtcacgttcgagaccctcgttgcgcatcatctcgatcgtgttcgttcgctggccaacgtcaaaacggtggaccgcggcggtcagcgcacctgtcaaaacaggaattagcagcgccttgggggagacacagaaaatgcacacggcgatgccgtagtatatggagaatctgaacagtgcgttcagctgctctgtgaggagcatccctggaaggggtacgaaactgtagagtgctttcgtcgtgcccatgaaacttcgtaggtcatcgtgccatatggttgtggttgccgccgcattgccgttcatgttgatatagcaactgaactgctttacatgtacttgacaaaattacttggggaccccatacttgacgggacagctcgggaactgcttggcgatggccacggcgacactggctgtgctattgggtgtatggagatcctcgtcaagtacgacatttagtgtatcggtttcggtttggcttacctcgacggtcgagacgccaggaatggcccttaccatgtccatcttctcctccgtcagcacatttgcgtcgcacaatgtaattgagatagtgatagaggtcattttcacactttttttggcacgcgacaaacagatctccatgcgcactttttgacaaaatattgtggtttgaaggaaagaacacatccgcatggaggctgcgcttctccttatcgtcgcaggcgcagggtacatgctttcaaagcgacgcaaaaaacctggaagggtgccgctagctgttttcccgatgacatcatacacgataaagaagagacccggcacattccacaaatcatcatcattatcaatgcctatctcggttgtcgcgtctgacgcggaggcgcgcgaccgaccatccgttcatgacccgtaccactgcacacgcgtgcaagatgtctacgcacacgaaaaggagctcctcatgcagaacacattcaggtcctcaatgactggcgaccgcatgccagcgacgcacggcaacatggtccctttcttcagagggagcgagcctccaggatcggccacaaaccgaggacacgagatggagaacttcgtgggcgagaaaggctcccaagacttcacatcactaagcggtggaaagcgagaaattcagcaactcttcaggcctacagaggcgagagtggacgtcctgcgtccgcctgtaggcgtcgggggatccgagtaccgcgacgtcgtgcaattgccacgcaatcgcgctaacgaactccctttcgaacaggttcgtgttcaaccgatcccggaggaaaagatgtgcaaaatggggggtctgcgcgcgctaacagtggacgacatgcgtcctctcaagcgtcccaaacagagcttgcctggacagattatccccgggtcgtccacatctactgctacggaccgacctaagcaccaacccatcaacactcagacgcgcccccctcctctcatccgcgagcagaagaccaccgacgactttatgcgcaccggtggcgcggccgggtctcagcccgggtacgacaagattcgcattgtcgaccggcacaccgagcgtgaaacgatgcgttccgcctacctgtgcaagggtgcagctgcccctgtgggcgtgcaccggatggaggaccgaggagggtcccaacgggacctcatctttcgaacccccctgggtgagatgtcgcgagggcctgccacgacgacggtcaagagcgtcactgactacggtcgaagcggtatgtcgtcccctggcaacgcgcgaatggagaccgggtctcgcacgcgccctggaactctcactacggccgtcaaggcgttggtcgcgcctttgcaggatgtgctgcgcacgacgcgtaaggaggagtacctcgattcggcgcctgtggtgaaccttgtaggatctcacggcgttcccaagctcacggtgtacgactcgcaggatgtcacgcgaacgacgctcaaggatgttctcctcgattcggcgcctgtggtgaaccttgtaggatctcacggcgttcccaagctcacggtgtacgactcgcaggatgtcgcgcgaacgacgctcaaggatgttctcctcgattcggcgcctgtggtgaaccttgtaggatctcaaggcgttcccaagctcacggtgtacgactcgcaggatgtcgcgcgaacgacgctcaaggatgttctcctcgattcggcgcctgtggtgaaccttgtaggatctcaaggcgttcccaagctcacggtgtacgactcgcaggatgtcgcgcgaatgacgctcaaggatgttctcctcgattcggcgcctgtggtgaaccttgtaggatctcaaggcgttcccaagctcacggtgtacaactcgcaggatgtcacacgaacgacgcgcaaggaggtgggtatccacgacggacatcagactggcaactttgcgggcggctctgtttcacgccgcggtcctgtggtggatcctgattctggagcgcgccaccgcgccaccgcgctgtcaaccctgacggtcaccaacgtaatttgtatgcgaagaacgttggtggcgttgtttactcggctgatgacgcggcgcccgatgcgactcgtaaggacgttgcggtgggtcaggatcgtggtggtggcttgccaatgatgacatctggacgcggagcttacagtgtttcagtgttggaccctcctcgatcgactatgcgtgagacggccgctgattcgggaacacggttcggtgtgtctcggcttgcagagagttctggtgcgtacgttgtggccaagcccgacagtttagaggcgacgatgcgcagcacgacgactgacgggtctgagtactatggtacttctgagtctgctgtgaccggaccggtttcgcgtgccgacgtcggttcggtggagcccgcgctgtctcgtgaggcgcttgtgatgactgggcgcgaatcctggttgacaggagggggtgtgacgctccagctggggcgcgattcggtgccggcgtagctgagatgggtgttgttggagacgaacgtggcggggtccctgctttgcgtgacggtgttggcagagtaggtacttgaattctagtgtcgctgggggaggtgacatgttgttgccttacaacactgtcgagcctgatcctgagccgcggtacacggtggatcgtttgatgggtgacatagagggcagacgtgcacaacaagaccaccaacaatacaaaatatcgaagtttgtattgtgtttgctgttgttgtagcagttaatgggcgttccagcctccccggtcgttttctactggttgcgaaacatggtctagagcggaattgtgattcctcggtgccaatattacgataaacgcaagaaagagccctgaaccctggcgcaataacttgttataaaaaaattgaatgcttgtggcaaactcattaaagtgcacacaacagctctatctctcacaaatggcacgtattaagcaaatcgctcgtaagtccacgtataacaaggctcccagaaagcagctacccataaaggcgtcgaattatgattcaaacgtacctgccacaggtggcgtgaagaaacctaaccggaaccaccccggcaccgtcgccctgcgcgagatccgcaagtaccagaagtctacggactttctgattagaaagttgcctttccagaggcttgtgcgagagatcgcacaggacttcaagaccgaccttaggttccagtcttcggcggtccttgccctccaggaggcctcagaggcctaccttgttggcctcttcgaggactgcaacttggcggctatccacgctaagagagtgacaataatgcccaaagatattaagctagcaagacgaatccgaggagaacgtgcctaggttaattagttgttgtgtacattttttttgacttcgtagctccgatggagaagagggggcgacatcaatctctacagtcggcggaacagtaaaatgaaagatatatcagatggaaataaatgtacgacatcgccgttagaaaattggcgttaagaatgggcgctgacttatttacgaacatcagtcgtgttctactctgtggaggtggaaacgctttggtgtacatcgaaaacgacgtgaatttgtaagcaaactttttaccaaataggcgactcggatttttttcaacctccccccaaacggaacgatctgcagtctggatgattataaggtgtgtcccactttatttgagaacaactgtatgtattaccatggaagagcacagtactgacttgaaaaaagtaggtgagaggatcgaacatataataaacgagatggattctttgcatgaagcgacaggcgtggagtatttccaagccctggcattagcatggtccggatgggtgtggatgctacaagatatcaagcgacgagagtggaagattacattccctggggatgctcagggaatggattgattgataatgcaaacacacgcacgcagagtgataggcgaacggaggatagagagataagatttacatcacaggatcacgcacgcacacatacaggatcgaatgacacatccatcgaccgaatgcatgcatgcatgcaagcaagcaagaaagcacgcacacgcatgacctaacttctttggcggaattcgaaaccttcacgcacacgcatgaccttacttctttggcgggattcgaaaccttcaaccggacacctctgtcatacctatctgcgttgacgcacttggacatttcgggaagcgaagatctcgaagacctgacacctctgtccggcctcactgcgttggctcacctgaacatcaattacaccaacgtgaccgatatatcagctctgtacgacctcactgcgttggctcacctgaacatgacgcacatcgaagtggaagacatagcagatctttactgcctcaaatcgttgcttcacctcgacatttcgaacacacttgtggaagacatatcaccactttccaaactcacttcgttgcttcacatcgacatttcgaacacacgtgtggacgaca

SEQ ID NO: 281 - DNA, 20513 bp, unidentified
  misc_feature 1..20513: note = Fanzor polypeptide
  source 1..20513: mol_type = other DNA
caaacgctaacgaactcgaacgctaagttgcccaccaacatgaggctcgcggcgtcctttgagacatcgcataagcgacggtacttagcatcgctctttgagatatgagacgcgatgatgtagagtgggccttcagggagcagttccatgttttgttaacatggaatcaaaacgtgttctatgtgtataacgtgttcaacgacactttatacaacaaattaagacttggacatgttgtgtgacatttttatcaaaatcatacagttgttctcaaataattttgggacactcagtataatttgaatgatatcccctgaaaccaggtacaggtccgtggttcactacaaatattttttgaggagtctcatgaaggtttgtaatatatacaacgtgtccaagagctcactacatagatgggtcaatgctgatcaggtgggtaaaagtaagcgtttaaaacgaaaaaggaaagaattgtccatgcttttacgttccacgatatccaataatattgcagagaaccccttcataacatgcaaggatttggtcggtataatttgcaagagttgtaatgtgagattatcgatcagtacggcatcgagacacataaaacaatgtggattttctaggaagaaggcgtttcccacagttctctacggacattcaaaagaaaatgtagaaatgttttgtgacaagtacagagaaagctctaccgttgtttgtatcgacgaagcaggattttacgctggcgaacacagcaaatatggatacagcaagatcggttcttgattaactacgaagacaatgagtaacctccgtcgtgtgaagttcactttattactcgctatttcatctcagagaataatagattatcagttattggagcacaattgtaaaaaagaagatttcattaaattctttaaaactttggtcatcccaaagaacaccacgatcgtcatggataatattcggtttcaccattcttcagaaataaaggatatccgaatgcaaagggtggaagcttttgtacacccctccttattgccccagagctaatgcgattgaacaaatatttggaagcatgaagagagactacagggcatcatgtccattgacgtcaacctgtaatttcgattacttaatgcaaatatgttgtgcacctgggcgagcgatttgtgtggtcaagatgaaattgagtacctttattccccatgattggcttcgtaaaaagatagacacactggtactggacatgaacaagttgcttggagagggttatattttcgcaaatttccacattgctcgtctttttgagaatggtatcgttgtccctcctgtaaatcgcaacttcttctaccggtgccttattgcagtcagtaccaacaaatgtaagggttcgactcttggcgaagacttcgagagtagtcggcttctgttcgacttgttaagagagccggggcaatccaaagttgacattcgggggaacgtgaagaaccagatcattgcagacctgtctattctcatggccacaatggcctctaaccatctttggaccaaccttgagcgacgcataacgacttacttgaagtggaagtacccacagattgcaaagcgcctgcggtcggacatcgtggctgcagtgatcaagtgccctacaaagaatctcgacgtcatcttcaagatgagccctcatacaaccaagctaccaaccaagctgccaacagctagacttcgatcggcaaaaagtgcagttgctcttgcgaagaagagggtcggtaggaaggaaccagaaggatcccctttgcgtgttaggttgactgaacttcaagagaggcttgaaaagttgagcgaagcttggctctcctcgaagaaccttagggtggacgcagataacgcgaaacgcttctttgcacgcgacgtggcattctgtctaggggggttctacctttaccatccggaaacacttttgcgtctcgggctcacatgaccctgcctctgtaccacaagatattgtcggagaccatcgaagaaaaacgaaaaactaaaaacgaaaaacatcgcacattctcgttgttgccttacaaatctggattcactctgtcgcacattccgatttcgaaaatggcctttttctatatggtcaacgagtgccacttcgattcatgcaaggcagacgttgcttccaaaaaccatcaaggaatatgggagcgcttcgcaaacctcaagaaagtggagacagtttctcggaagttcggttaccgcattgtgacagacggctttgcagtcagcatcttgatgaataagcctacgtgtctgacatgttcgatgcctgcagacgcgttctctacgcaggcgcatgagtatgtgacaacagacgagggtggcattgtatccttccttgacaatgtggtcgtggctgcggtagacccgggtgttactgatatcgtgactgtaacaggactcaacggaggtaccagatcgtacagctcggcgcaatattatcgcaagggtctgatcttcaagtctcagcgtcaaactgacgtttggaacctcgagacggctgatatcgtcggtggtatcattccggatagagactcttcgagttctgaacagattggtgcgtacgccagattctacatgggtgccgccccaatccttcttgcccatcgtgcttccagggggtaccgaaacctccgctttcgcaggtactgcaagaaacagaaactcattgttgagattgctgacttcgtagctccgagagagaagagcgctaaggtactcgtcgggtttggtgattggaaaggtctgggggcgacgccaatctctaggcggacttgtggccctctccaagctattcgtttcgagcttcgtagccgagaaaacgtcatcatggaggacatcgatgagttcagaaaacgtcatcgtcggtatttagtacttctttgagggtcgtttgaaacaaagaaaatcctgtttgaattgttcgtttgattcattcttagattcaatcggagataaccttgattcaatcgatctttgtttcctgtttgaatcagtcggccatcaaacctaccgattgagatccgtttgaaacaaggttggttgtttcaaacatgactcaaaccatgttcaaatagatcttaatcaagccgtcatcaacgtgccccttgaaaaaggtttgaaacaaggttggttgtttcaaacatgactcaaaccatgttcaaatagatctgtttttttgtaaagcaatgcaagcactgaagactgagggcgcatatttggacagcaggactcttcgatctttgttacagaaattgaaagcaccataatgaatgaatccttagatagttaaacatgatagtaattagtaattgaagagctagatatatatgctactaaggaagtgcagttggccacgaagtagttcctcaggtacgaattgacgaaactccagcatgctgtgcttcttgttcatcaacgacatcgtcttcagcctcaaggtcataagcatccaggcgttctgacgcgagaccagtcgcaagagtgagacctgcagacaaatgttcgttggtgagcgttagttgagatacattggcagcaatgcgcattcttccgactttcaaatagcagccatggttcaaaccaaattcgctatctgaatgcgcacctgttttgcacctcgagcattggaactcttgcggctccatgatgagctggacgataggtcgacttgctgcagctgccttaatgcctgcggaacaactcgaaaaagcgagtcagtcaaagttgagacaaattctggtcaagtaaggcaccacttgacgagacgcaaaacgcagtaccttaaccgcacgcgcgggggcggagaagcaggtcgctacagtcttgggttgaagcacaacaattcccaaagcaaagtaccgctgaagcaaagtgctcgcgcgtgtaggtattgacggatctcagaagtaattcgggaatggctgaagctatgaaagcaagctcagtccaagttaattcaaggaaagcaggcagcatgtcgctatctgactgcgcacctgtttcacacctcgagcattggaactcttgcggctccatgataggtcattttgctgcagctgccttaatgcctgcgacacaactctggtcaagtaaggcaccacttgacgaaacgaaaaatgcagtaccttaaccgcacgcgccggcgtgggcggagaagaaggtcgctacattcttgagttgaagcacaaccattcccaaagcaaagtgccgcggaagcaaagtgctcgcgcgtgtaggtattgacggatctaggaagcaattcgggaatggctgaagctatgaatagatcagtccaagttaattcaaggaaagcaggcagcatggtgcgctattctgcaggaatatcgctgagtcgagaaccaattgacgcgcagtgaacagtgaaagcttgcacagctgctaagttgaagcgctaacccattgcgctgaccagtttgaactgtacagcatgcagtaacgccgtaaccgcacgcgcatgggcggagaagcaggtcgccatatttgaatcggattctcggggcctgcgcctgcggtgcatgcgggatctgcgtcgcaggacctagacaaccctgatgggggtcatgctaatcaaacctgatgaacaatgggggataatgatcccgaaacttctcatgtacccaaatatgattattccgattctggaaaacaaaatatcataaccagattcaaagggacgaggaagttctgagcttagagaactggttacacatccgcgcctttcgaacagcgaccagttgggaccctgcacaccagtaggctatcctccactatgataatggtttctaaacttctcatgtacctatatatgattaattagattcaggaaaacaaaagatcataaccagattcgaagggacgaggaagttctgagcttagagaactggttacagatccgtgcctttcgaacggcgaccaggtgggaccctgcacgccagtaggctatcctacacctagataatggtttctaaacttcttaggtacctatatatgattatatcgattcaggaaaacaaaatatcataaccagaatcgaagggacggggaagttctgagcttagagaactagttacagatccgcgcctttcgaacagctaccagttgggaccctgcacgccagtaggctatcctacactacgataatggtttctaaacttcttaggtacctatatctgataaattagattcaggtaaacaaaatgtcataaccagattcgaagggacggggaagttctgagcttagagaactggttacagatccgcgcctttcgaacagcgcagatcggtaactactgatttaaactcagaagttcctcgttccttcgaatctgcttctgatctttggttttcctgaatcggactgatcacatataggcacctgacaagttcagggaccattttccaactgtaggatagtttatggggttcaggatctcaactggttacggtttaaagagcgcagatcggtaactactgatgtaaactcagaacttcctcgttccttcgaatctgcttctgatctttggttttcctgaatcggactgatcacatataggtacctgacaagttcagggaccattttcctactgtaggatagtttatggggttcaggatctcaactggttacggtttaaacagcgcagatcggtaactactgatttaaactcagaacttcctcgttccttcgaatctgcttctgatctttggttttcctgaatcggactgatcacatgtaggcacctgacaagttcagggaccattttcctactgtaggatagtttatggggttcaggatctcaactggttacggtttaaagagcgcagatcggtaactactgatgtaaactcagaacttcctcgttccttcgaatctgcttctgatctttggttttcctgaatcggactgatcacatataggtacctgacaagttcagggaccattttcctactgtaggatattctatgggggtcaggatctcaactggttacggtttaaacagcgcagatcggtaactactgatttgaactcagaacttcctcgttccttcgaatctgcttctgatctttggttttcctgaatcggactgatcacatataggtacctgacaagttcagggaccattttcctactgtaggatagtctatggggttcaggatctcaactggttacggtttaaacagcgcagatcggtaactactgatttgaactcagaacttcctcgttccttcgaatctgcttctgatctttggttttcctgaatcggactgatcccatatgggtacctgacaagttcagggaccattttcctactgtaggatagtctttgggggtatgttataaacatgttttattacattgatgacctctttgacatatattccaaagcatcccttattcatatctaagtctatgtaacttaaaggaagtacggtatgcaaagatttgaatagttattcattaaataatgcagttgtattcactgctgaaattgggccgaaatacctacggttaataagcaatatagacccttgtgctaaccgtatattccctttcctacccttgctggcccttcaccgttggttcctctcttccctgttccaataaatccgggacgcgaactgttgtagtgctagctggactgttgttccaagcaaccgtgtaccatactcctgtccggctctcagctgtccccgcgcccagtagaagatccctggcaacggagcccacgcacgccaaacccctgaacccacaaactgaaccggccaagtgcaattcgagccaccagattgtaaactcgcattctgaacgctacgctacgatcctcctcttcctctttttttcttcacttcgactggagacaactactaacgaggcaacgatcacaaggcatacatgcatcggtgcgcagccctggtcgccaactgcatcttggccttgtgatcgttgcctcgttagtgcaagctgctcctcgtagttacacgaggctagttcgacaaattgtacaagatttcggaaattacagaatccaagcaggggcaaatttggcccttcaggaagcgacagaggcctacttggtgggcctcttcgagaacactaatctggcggctatacatgccaagcgggtaaccattatgcccaaggatatgcaggtgcgctatctacaggggttgggggtggggtggggggtgggtgggcggggtgtggggtaagagttggatccacacaaaatatgctgcagcttctgggcagatccctaggtgggcagttggcctttggtaaaaatatgctgcagctgctgggacccgtacacgacaaaacacaacagtacactacactacactacacaacagtacacaacactatacaacactacacaacactacacaacactacacaacactatagaacaagggggttgggagggggatgggggggggggggggggggggggggggggactgagctacttgaaacactcactcattcactaactttgatgtctgtttccacttgcagctcgctcggaggattcgaggggagcgaaactaggacttggcaagaagttgtggtgagttatgctttcatgcctgaaccaccctcatgtaacaacttaatgaatgcatgttacttatcaataatatcataatatggcttagctgaacctacccatacagtagcccgataagcgcccttgaggctgcttgctacagaatgggcgggagatacgatttgccttgtatggtatgcctgaaccaccctcatgtaacaacttaattaatgcatgttacttatcaataatatcagaatatggcttagctgaacctacccatactgtagcccgataagcgcccttgaggctgcttgctacagaatgggcgggagatgcgatttgccttgtatggtatgcctgaaccaccctcatgtaacaactcgattaatgcatgttacttatcaataatatcagaatatggcttagctgaacctacccatactgtagcccgataagcgcccttgaggctgcttgctacagaatgggcgggagatgcgatttgctttgtatggtatgcctgaaccaccctcatgtaacaactcgattaatgcatgttacttatcaataatatcagaatatggcttagctgcacctgcccattatgtagccgcataagcgcccttgaggctgcttgctacagaatgggcgggagatgcgatttgccttgtatggtatgcctgaaccaccctcatgtaacaacttaattaatgcatgtcagtaataaaaaaatatggcttagctgcacctgcccattatgtagccgcataagcgcccttgaggctgcttgctacaaaatgggtggtcaatgcgtttagccatgtatgcatccaccaccctctgcacacacttaagtcaccaacatgataagtgcagcacattctaagcagcattatcttactcattctaatgtttttcccttgcaggtcattcatgaatgctggctgttgggagcaagtaaaggacgaatatgcagtagtggagctgcctggaagctgccatcatgtggtgccaagcttagccaatgggatattaaggcatgttagtgccctgaatatatagtagcatggagcagtaatcatagggtgactttagtttgggttttgtttatgagggtttaaaggtactgcctgtccttgttgaccaggacaggcagtacctttaaaccctcatacaaaaaacccaaaaatttaatttgaaatttcaagcacagcagtagataggccaattatcccttccaccaccttggacaatagccgggcctggtagttgacaatatacagccttcttgtgcgatacccacgagagcactgtattgtattcatcaattgtgcgatacccacaacgatgaatactttccctacaactgaattagacctaacttccagccagctccattaggttgtacagcttccagctagctccttaggttgtagaacttccagccagcttcaatagactttcactttgtgtgacaggttgtacagcttctagccagatccattaggttgtacagcttccagccagctgcattaggttgtacagcttctagccagctccattaggttgtagagcttccagccagctccattagactttcacttgtgtggcaggttgtaaagcttccagccagctccataagactttcactttgtgtgccaggttgtatagcttccagccagctccattaggctgtctctctgtatattaggttgttgtgtagcttcgagccagctaagccgtcctcagcaggaaaattaaatatatgacaccaatttgttttctggcattatatttgtttcctttcttgtaaaagtttctttcctaccattgtccaaagtgcgagtacttaaacacgcacacacaccctacttgggctgtttccaaactcctacattcaacttcaacttggttacatagccagacttcaacttggttacatagccagacttcaacttggttacgtagccagacttcaacttggtttacatagccagacttcaacttggttacatagccagttgtgacacttgagattacagccatcatcttgctagcacctacaccccaccctagatttttgtctagccaatgaaagcacaaactaatgtactacaaggtacggatttgtgccggttatcgctaggcgctcgcccgcctcggattcaaagcttcctacctctcggcagcctacatatgggagcttagctacatttcgaagtgcaatatcttcgaccaccttgaattccgtttgatattgtcttgattgacttccgtctgattcaatgaataagctgcttgaattgaatcactgattcaaactgttttcaaggtaccctgattcaaggggaaaaccgcttgataggggttcattgattcaaaccagttgattcaaacgatttcaaaggtctgcctaaataccggcgatcatggaggacatctcaacgatgcagctgctgtgagaaccacctttgcaacatggtggcactcactcatcgtaagaagcaagacggtacaggttgggaatgtacagaaggacgcaagcggattcataagattctccactgcaaaagcagtcaaagcggagcgccacgccaacagagcggtggtatgcttcactgcgggaagacttgggaccgcgatgtgaacgcttccgggaacatcctgatgcttacacttcaccaagtctttgggagagagcgtcctctcgcgtttagccgagacgcgccgagaagttcctcgacaaccccacccccaccccctgatactgatatggggacacagacggttgaacggtttaccaaagaggctactcggaatatcttcgagaacctcttcaacctgctgcaccccccaacgttgcacaaaagcaacgatctgcagtctggatgattataaggtgtcccactttatttgagaacaactgtagactgtataccacaaaataccattcacgttcacagcgacgtttcccttggtcgtcaaagacgagttcaagaaggttgaaacagttgcctcgtttgcgcgtttcagacaccggtctctgcggagctcaaggcccacctggccgagatgatcacatcgaactacttgggtacctgttcatcaacgggctcccgacaaggtcttacttttaagaaacggcaagccccgtcaatgacacgtggccctcgaggggtcaatgtgtaataaaggcaagcaatgcttgaaaatcataatttgtcaaaattatttgaaaacacttgtgtatgagtgcacgatgagcgaagcgcagaggaatgttttcattaaggtttacttcgacctccagaagttcattttcagcaacaagatcatcgtcgctgccgccggattctctatcgccgtggctaccaacgacgcagtaaagaaactgctcaactccattatcctcccattgttcgatttcataaacaatatctccttcgtgagaaaagccctcggtgtgaagatcatctcgatcatattcggtatcatggggacgttgatcatgtggatgctcactatactgctttgctttgtcctgcttgaatactttttgaacaagtctatattcggtatggttacgacgatatccgaagaccacaagacagaattcgtcaaagccaaggaggaggccaagagaaacgataccatttcaaagaaagtagaaaacatcaaaaatgaggaaaatatggttgacgaaatccttaaaatgtcaaagaaagatgacaaaccggtcaaagatattatacgacaagaaatgcacgatgacctcagcaagaagacacaacaaaaacaaaaacaaaaacatgaagaacaacgtaaacagtctcaatattgggatgatgggtcgtacatgcttgtgtaaaaccatctatataatgggcgttcctgcctaccggcagatttttttaaatttctaatcaggatttagagcctccgggacgaatcactagcttgagacatcagcaccaaggaatcacaaatccgctccagaccatgtttcgcaaccagtcaaaatccgccggtaggcagaaacgcccattctgtcttggcaacgatacagcactccgccttcatacaaaagacagttgaacgcaagactcgtacatgtaaaactggttcatgtggtttgttcaacgacatcgcatgtaaatatcgatactaaattcaaaaattcaaaaaatcattgcaaaagatagagtgtaaagccatattttgcaatctggattgtatcgttttgttcattctccctgtgttgtatcgtcgttacattacattacattacatgttaaagtctacttgacaccgcgagggtgtatgagactctgtgctttaaacaaaaagaaaaagcacccacaaagcaaaaaaccccattacatcaggggtgtgtcgaggacaaacaaaccaaactcccaaccaccgttttggtggcgtaggtattaaaccccttagagcaggacccagatctcaaccacttacagtggcggaggtaagaagctaacaaatgagaagtctcaagaagaaaaaaaagggataataaattacggtgccactaagcagtccagggcttcctgtcttgctcttctacaagtagaaagatagtcggctaggttgctccaaaaagacttagtgccatttccattcataaaggtcgtgtgttgtcgtcgtgtgttgtttctttttttgtttgtatcttagatgatttttttttttagcacgcttattagtcgtcttattcactccgctcactcgattgcatcgactgtcatcatcggtatggtcatgtactttgcgcaccgcttgttacagcttcagtactacccggtactgtcggagcgacttgatcggatcatttttcttcaatcaatcgcctattgcatgcacgtgacgagcatcctctcgatcgtggagacggctggcaaccatgtcgtgaagcatgtcatggacagcgttctccattgcgggtttgcccctatccactggtgataacgctggggcaacctcttcattcttgggcgcgcaacaacattcgtacggttgttccacaaacagaacacgccgctgagcattggaatgcgtacaatagcagacattgtgtggaaggcgttattcccatctcgatatggtcacgtcgaccaggtgacttcttaatcagaacaatgtgggcgatgcgcgtatgtcgtgacatgatgcgagtcgcgggtgctgggagaatccgtccctctctagatgatcgccccatggtgcgcacaagtttaaacacgttgttgtacagcgttggatcctttttcaacgcttgtagcaagtatgtcgtcatagctcctgagtactccttgctcgtgctacatatatccatggggtcctgcaagagggcatctgcggatgtctggtcgtctcgacatccgcttatggcgaggatcctttgccctcttccatgttcattcttgttctccacaagcggcgcactcctctcgttgatcaagtctgtccacgtgaacgggaggtcggagatggttcctgagtgacagcagtcggccacgaaaacgattactcgttcgtggattgaagtagataggacttttgcgatgtagtcgtctggaatcaggcggaaatcgcttgggacgagacactcgtcgaatccgtcgagctcgtgtctgaggaacccggcgagttttgtgccatgaccggagagtaatcggatccagccggtgtcaagagcctcgtcgtaggagtctattcgcaaggtcgactaaagcgcggccagtatggaagatgcggtcagtcgcggctgcaccgatccggactccagcgtgctcaattgaacttggttgacgatgggaactcagcatggctggcgcatcgttagacatcctgcagggatgcggtcgttacttagtagttcaatccaaacaggaaagctcttcgattattgtgtgtgttgtgttccgtgttcgtacattaacatgagaacaaaatgaaatatacatgtgttcttcactaatctctgttgttgacaacactacagtcggcggaacagttgctacaccattagggtacacgctaaggtgtgccgtccgagcggtttcattttagtattttgttgactgtaacacatgtgtatgttggtgagaaacgtgtaaacacacatgtgtatgttgttgagaatacattgtaaagagaacgaggaaaaaccattggttcgcaaatttgtctaacaatctggaaagataatgaagaagccggaacaaccgtgatcttcgtcggagatcgagactatcgtgagcatgcacgttcctcctggtgttgtgcgcaagaacgtacaagatatgtctgtggttcgttgccgcattcaccacccgctgggtgaaccgccacacttgctatgagcgtctagagtttctcggagattcggtgcttagtgcagttatcacgtcttacttgtacattcgctaccctcggaggacgaggggttcctgcgcgagcgccgcgccccagttggttagcgcgcgatgctttcgcgatcgcgcgaatcacactccattcgtggtgaattcgttcgtgtaggacgtggccaggttcaaaccgctctgaacacattgctgacaaagagacgactactgacaagaaggtcctggaggacgtgttcgaggcatttctggcggatgtttttggagatggggttgacgtcgtgagtgggtggctcgtaggcttcattgagaagtaggggatttgcagaggttatcatcaacaaacgcagcgcgaagcacgaccttaacaccttttaccgacagaagtatggttacattccgtattccagccgtttctgcgaaagcaacgcaacaacgcgcgtcactactagaccatcaggacatctacggtgtcatcctcggtacggggtctggtagcaacaacaaagtggaagcagaggcagacgcttctgcagctgtgctctcagcgtcgtgccaaggggggtcagaccggtcaataatgttacagtttgttctcaatataatttgggacactctatctgtataatttgaatgatccctgaaaccaaataccgtggttcactacaaatatttttgaggagaagtctgaggaacgcccattgttttgtaatacagttgttctcaataattttgggacacctccccgaaaacgtcgggacactgtcgaagactacgtctgactccaaggccccccaaatacagaacgaatgcgagaacatatcattcgtgacacacacgcctcctctgcgaaaacgcgggacactggcgaatactacgtctcactccaaggcccccaaaatgagaacgaacgcgagaagcatcatcgtgacacaagcctctcacagacatctctgagaccacaaacgtagttaagagttttagttggacaccagagtggtaccgccagcaatacacaggcttggtagggggggcttaggccacgactttacactcgtttttcgagggaacggagaggacttctcgcatgagtgaacccacaacctttgccgcacctgccgtcatcatcccacggcaggtgcggcggcgcatttagaatgcatgttttcatacactcgaattgcagttggtgtgtaaaaactggactcgcctgtcgacaagtgcacggagttcgttattgacttcattgaattgtcgtggcaagttattcattccttaatctcaaaacgtccgttttgaaaattcaatgcgcagctgagatagcgcattcaattgcgcttcggtcacaacaccggacattctgcaattggtgtagtaaaccacaaaatgaatatctttaaacccaacgttgcccaaaggaacgatctgcagtctggatgagtataaggtgttgtcccatttattgagaacacctatttctatggttcatacgatggaacactcattcaacgatctcggagaaggtgtgtgggccgtgcaagacaccgagccctattatacgccactgttcgcggaatgcgcatgaagcgcatcctggaaatcagtggtttatcaggttactcgcaacaaatttcatcaaggcgttcgcaaaaccggaagcgagcgtgactgtacacagtggacattcaacccgttcataaaatcgcgccaaaccacgtcgttctgcgcaaagatgctcgtcacattgagtcgtatgacgtgggaaactcaccactcgacctcgtgttcttcgattgccatgattatgacgtccagatggcagtgtacgataggcttgtggctaaaggtttgatcacggatgctacagtcctggctttgcacgacaccaacacacaccctgccaaattcttttcctttgggtacgctttgaacggcaatcccggcgaatgggtgcaccaggacgtcaacaaatttgtcgaatcgaacgggtaccacgctttctcactgcacacaccactgtcatcccatgatgcagagatgccttatcgacatggccttactttgttgcaaaaattcaagcgcctcgagacataatttcacattcgctcgtgaaacagagtcactttcacgcatcgtggcgtcggaaaaatggatacattttggggctgtacagtagttctcaaaagacacccctcgcgtttcgccgagacgcggcgagaagccgctcatcgacctcaagcaccacccgatactgatttgggggcacagacagttgattaccgagcggtctgtgcgtgaaactcacaagtcgagtgtgtgtgtgcggcgttgttcacactcgtttttagagacacgcagcatcatggtaaacgtgatggacagaagcacattccacgtttgtatgcatcccgcattcttcacatttatgccacccaacttttccgtcctttagcaggcggagatgaattttcatgtcgacgtctgaattacatcctttacgctcgaggaatttgtggatggaccacgaggcgttgtattgtaggcatgtacgccggtcttgtgtaatattgtgcgtgacgagggttgagttgcatttgggacatgccatctttacatcttcattcattcattgtgaatttccttatacggcacctcccacaaatgttactacgataccattaattacagccggtagatccatgtaaacatatatcagatggaaataaatgtacgacatcgccgtacacgaggcggtttcattttagtattccgtcgactgtagctatagacatttcaaaaaaatagacatagctatagacatttcaaaaaaatcgccgggaggaaggaacgtccattgaatcacaattccgctccagaatatgttccgcaaccagtcaaaatccgccgggaagcaggaacacacggcaggaacattcaatgccccgccctgaaatgtccccaccacacgatcaaatgaacacatattctcaatgtttttagatcgggactttacgagcacattatcagatctgggcagcacaacacaatcagttcgtgcacatctactgcacacatctcttcatcttcggttgcacacatctcttcatcttcggttgcacacattcccatggggggctcagtgggcgtcagggacctgctagcatgatacgttggcaagggcgggaactcttcgtgcacaggcttctgttgttctacaacaggatacacatagagttgctttgagaatccacgcttgctcatcgtccttagcggcttgatgaagatgaagtccatgatggagacttcggtgacctttggtggcgagtaggcctctatgacattcttggaaacgctgatggggattggctgggcataagggaaagtgggggcatctactttcatcaagcccagtctcacattcatcacgcgcataacacgtgtcggtgtggatggaaaattcatctcccggctcatactttgagaaacggaaaaacgggttaatatgtgttggaaaataaccaccactacgtatgttatttgcaggtccagaaaaggagaatgatgagtattctttctcgtcatgaacccttgcgggaatgactgtgctaattttatcccacactcgtgctgctagttcttcgcttgttaatgtaacacgtttccttttgcctgcaaacatatctcctcctatgtatgggctttggaaccctttttgttctgccagttttatccattcagagcattcgtttggtgttaagacatctctgaccacaaatgcgtcaacatttggaagcgattcgttttctctggatgtaatgcgatcatacatgttgttacgtgttaggaagttttaaatgttttacgaccaaccggactgaggggctaggggtggtagggtgagctagaaggcgccgaaacaagaaaataggattgactcgggcaagttacaagggtggtgcggacaatatcacaccctggagaatatgcgatgatcagggttcgtgatctggactgctgctataaaatgagccttagtcaatgagacagaccaaactaacagctacttatgacaacacaaaaaagttgcaaacaatgtctttacttgttgcgcaagaaatcgaatttttaggaccatccactcatacactttatttggatgtttcatttaattgttcctccgactgtaataatggcattgctaaggcccggatgcaaatgataatcattcgtctcgaacttaccttgtggtatgtcagtcgcccacatccggtgtatgtgcacgagagctcagagacgtaatcgacgtaagggtctatatcgacgttgcagtacacgcaatagtacgtagtggacgtagaggtcattgtttgttattcggtgttctagaaagtggatgtgtacacaagcgagccgatctgcagtgaatgtgtatacaagcgagccgatctatatagacgcaaacgtgtaccgcatgtaccgcatgaaccgcatgtaccgcatgaaccgcatgaaccgcatgaaccgcatgtatcgcatttacagcatgtggtacgggggcttctccacctctcttgtcgatgtcaaccaaccaagcgatctagcgatactcagaggttctacagtcggcggaacatctcaacgatgcagctgctgtgagacccgcctttgcgacatggttgcacaccctcatcgtaagaagcaagactttattactggttgatgagtataaggtgtgtcccactttatttgagaacaactgtaaggtaaatgtctccgctttatttgagaacaactgtaaagtgtttgtgtgacgtcgtggtgtcggaaagagattgtagtaaaataaggtaatctgatttccggcatggcatccgaaatgacccaagatattccttgcatccttgtcgtaacaagggatcgtgttggcatcaacggaatagtcttagaggagctaatcgaaaacgtcttagtcaaaaacgactccaacgtgacaaaccatacaagtctttacaaacgcgaacatcactatgcgattactctcttcacaagctacttcactcattcctcctcacaataccccccaatactcgtgtttgacgcttcagaagatccagggagattaaccaacaacaacaacaaaggaccgctcgtcaagatcttggaacgggagatggtcgatacagcgtctctttttcccaatctcagaaaacaccaaccggatggcgacacgtgcaccaatcaccgtttgcaggttcgaaaacgcgtggtcattcttaatatcgaatgcgcacccatgcacgtccaaaaaagcatccgagttctcgtcgatagatacatggaccgcgtgcaaatcacattcaccacatcctctctatcaggagtggacgccggtctgcagagcagagccatggtacgtcccaagatgaccattgcaggcggcatcaacatttacaaaacccgcaaaccatccccacaacaagatagtcttgctcgcaaactcatcgcttgcagaactccaaaagagagaggaaaggtatggatagaagctgcaatatcaaccataggaaggttgtcatccgacacggaagaatccgatgggagcagcagcacgagtttggaggtcatcgagatggtcgcgtacatagaacacatgtgcgccaccgtccacatacgaaacagaacggacgaatgcaaggtcatcgaagcaggcgcagcgttttttttttttccgtcgaatacacaaatacactcgtgcaatgaaattgagtcgataacaaacaaaaacaactgtacgatgcagatcgttgctttttggcaatggtgcgcatcttggtggatgttcttggaggagttcacatcgcgatcccaagtattcccacagtttttgactgcttttgatacgaacgaaggattcgttgaacgaaaatcattcagagtgtcccaacaatattttagaacaaaatggaattgaatggggccccgccaagtgaagaagtgaacgaggtcacgatggaccaattgagagcgagccaagtgtcgtagcgaccacatcgtcttgcattgcatctcgaattattcgagtcttcttcgcctgacgctcgagaacatgctcatcaactgagtccttcgcgaccaaccgcaacacgcgaacagtacgctcttgtccacgacggagaacccgtcgaattgcctggtattcggtcacagggttccactgcggacgcatcatgatcacgttgttgaaggcatgctgcatgttcaagccacaatttgcgcattctatctgacatactagcatgtgcacgcgggtagtctcacgatccgtcctgcaccggtacaatgtcgaatcccgctcatcaatggagcacgctccgtccaggcggctcacgcaaacctcatcctccctaaatcaagcccctatgaacgcctcaagcaagtccatctccatgatccagttgcaaaaaaccaccaccccgct

SEQ ID NO: 282 - DNA, 21221 bp, unidentified
  misc_feature 1..21221: note = Fanzor polypeptide
  source 1..21221: mol_type = other DNA
caacaacaacgttgcgaagatctataccacagatgagaacggcaacccgctgccgatgcctgtcaacgtctcattgcgcaccggagaggatgtgaacgtcccagtctacaacaatgagttcctcatcgtgtggattgaaagctacgtgctggctgtcggtggcgtcaacatcctgtggctccacaaccagaagcagcaggccttctctgctagcaacggcatcacggctttctcactgtaaatgtaaaagcgtgcatcttgtcttgcccgcatgccagctagtcttgcagttcctcagtacacgtacgtggtgtatccagtgccatgcagccgtaaaataacctcgcatcaggcggcacctgtgtctagtcgactcacatcacagagcgaccgaccactactctcatcacggcggcacctgtgtcagcacaggtgccgctatggccctccccatcaaaaaataacgaaagtaacaaaattcagggaaacctatcattctacatcacggttgttctcatcctcaagcaaccaacctcaaaactgtttgtcaatggatgagaaccaccgtaccacattaaacaagtggcggagcccctttcacctccccacagcggagcaacagggggcgaccggaggggagcccccacaaaggagtccgcgaggaaccgagcgggtgggcgaccggaggggagcccacaggtcacatcaaccagcagacacactactgatttacacacacacacacacacacacacacacacacacgcaacgccgcggatgatagatgcaggcagggagggagcaagttggttggttggttgtctgtgcaagaggggaggagggagcaagacgccgccgtcaggagaacatgagacacgcacccacgcacgcatggaacacacacgcaaacggaggggggaattcacagggggaccatggggtacagtacatacaggcatgaccgtctcgtctctaagaaatgtataaaaaaaaagaggttttagtatctaactaactgactatataactaaagctgctggctgagggacagggagcaaagctcaattgagagctcgatagcagcgagcttcttggctaggaaagactctctctttgagggagtctggttcatgcacgctaggtgcgcgcactttcctgttgtgaatgggggtccgccactggggttgcttaatagcacctgtcttctactgcacgggtttccgtgaatggtaacggcactgcatcccagggtgggggagtaccccacgatggtcaactcaccgtttttggagccaacaggaagctcgttctttagaacggacccgcgaccaacacgaccggaggccaaggaggaggacaggaagcacgtggggaacgagccagcaggagcagcagaagcagcaggagtagcagcagcagcagaagcagcaggagcagcagcaggagcaggagcaggagcagcagcaggagcagcagcaggaacagcatcaggaacagcatcaggaacagcagaagcagagcgtgaagcattggcgcgggggcgcttgttccctccgcttccctcatcagacatgcaaacgtcgtcctcttggagggagacggcggcactggagagggcaagcacggaggaagtcgcagaattatcagcgacggcatccgcagcagcgactgcaacggggagaagcattagctgcaggggctctttctccccgttgggggaatcttcgagaaactttttgtgcgccatcttcattgcgccgacagagtcggcgaggcaatcaggaaagctggtcagggatatgactgcgttgcaaatgcccttcaaattagggacggtggcgctatgggatagcttagttcggtccttcttctggaccacgtcgaagatacgggtagtatcgacgaacgcagttatctgggcagacatagacatagtggtagtagacatgacttgacttgaaagatttcaaaggggagagaggatatattgggatttatcagttgttggtggtggtgttgttggaacgaaaaaatgcgtcaatttttttttagcatgaaatgcaacggtaacaacaatacaggtacagggacatgtatacataagacatagacatgtgtctcagacactctgtacgtgaacagatgggatgccgttggggggatgatgtcacaaacagagtagagtcaacaagcggcggagcccttttcacctcttcccccaccgggggcgaccggaggggagcccccacaaaggagtccgcgaggaaccgagcgggtgggcgaccggaggggagcccacagtgtaacatcaaccagcagacacactactgatttacggaacggaaatcacacacacacacacacacacacgcgacgccgcctccatctcggacatggacagcatcagcaaacttggtctcttcgcctcatcatcatcgtgacacctcttcccctcccccccaaccgtatgcttaagattgccgcgcttttgcaggccgcgtccttaaaggatcgcgtgatggccgagctgtttcactcccccgattttctcgaccgcctgaagtggaagaagtatgtgttttgcgaagtggaagaagtatgtgttttgcgtagaaaatcctcgcggcgttgcatagcgcatattgtccgtgatttaaatgttctgtttggagcaccgtcttggttgtaccagtgtttttcacgtgtgggacacatctgaacattttggggaaaaaataaaactcggaatcggtcgcgatctcaatggtcctcggattgaggcgaagcaagttggactttaacgtggtcatatttggactcattatcatcaacgggtgcgtgatcttgtatatgtcggcgtcgaacgtatgcagcatttgtaagagcatcataaacgttgatccggaagccacaaaatctacaaggacaatgtgcgatgcatctgattcttttaaagccctacgcagtggtttaattatcgtttcgcgtatgttttgaacggtttccttcatttcttgtgctgctgcattgcacatttcggtaacttaccattatcgcagccactgaattcgaagtgttcagccactgttctcgaaaaaagcaccgtgtgcgtatgcaaattcatgtactcgaacgccatggcaagtttgtccgcactggagccaacgcaaacaaaccaacatttgttgcgcggtttgggcaccttggacaatatcgctttcaacacctcttgctgaactcggacgttgtcctcaacagtcttgagagaactactctggcgttgtcctcgacaatcattgtagttgtcgcgagtcgtcgcagcaactacggcattgcttagtagttgcatcttttggtccggcacagagcgggcgagacttacgcatgtctcggtgtccgcaacccgctttatcacctcatcacctaagatttcgccagccgatccgatcaaaacaagatcagaaaagtgataaaagagagttgcttcggttcccaacaggcgctctgatacttcgatgcatttggttagttgcgtgtccatgtcaataataatacgttgtttgttgtatcaaatgtaaatgattacaaaattattattattattattattattattgaatgatccgatcctgtacacatacaaacgattcggggaaatcaagaaagtacagcagcacgcgcgcaggtgcacgaaatattgtgaagacagccaaacactacatcacggtcgacgacaacttaaacttgacacagaagatgatacatacatgatcgatcatgtcggcagtcgtgcggattgcggggatcacgatgacttgcgcatactcattctcacacggaggcttaaagcagactcctgctttaacgacaactctattggtttctgaagggggagcgcgggcaccgcggagcggggcagaggattggattggattggattcatttgatgactcgcgtacaccattcactgtaacgcttgggcttttcactgtaacacttgggcggtgaagcgaagtgaccctcatcgtccccgtagcaagcagactacacttaacttatatcaaacggtggaacgatgtcgatacgcaggacaacaacagagtgacgtacaatatgcccggatgtgtaataagaaattcataggttcgaggatatacgggtagcttaaattcaacggtcaacccttcaggtacaacaacaccatgccacccacgtgtggtgagtcgagtctacatgcatataaaaacccctgcgttcaacgctgcgtgcggcattactgcttgccttgtggagatttatgcagtttctggaaatcatagcgtggctcctatcgacatgtgagtacatggtcaggtggtgtgattttgcctcttttatatctttgtggttgaatgggcgttccttcctccaggccgattttttaaaaaattctactcagaatttagagcctctggaacgactcgctagcttgagatatcagcaccgaggaatcacaaacccgctccagaccatgtttcgcaaccagtcaaaatcggcctggaggaaggaacgcccattcaaccacaaagatataaaagaggcaaaatcacaccacctgaccatgtactcacatgtcgataggagccacgctatgatctccagaaactgcataaatctccacaaggcgagcattaatgccgcacgcagcgttgaacgcatggattaggaggtcgtgcaccacaggaccgctgagtggtttgctattgaggctgtccttggactcaggtatacctgggtcaagtgctgcatggtcactgccgaggacaagctggaagtcgagtagagtgtgtagcctgcctcgcgagaactctgttggtagcggttggtaaggaaagtagtgtttccaaaaatttatgacagtccataagcttgcctgcacactctgctcttcaaagtaaaacgaacgcaatccgttgacccctgcctgtatgttgcgaatcgttgcatcctggaacatggttccctgaaaggacacagatctcgtgggagctgcaggcccccctttgtctctggattgctgcatctctgcgatcacgcagccgtccaaaatgccgcccaggaacatggatgccatagtgagctctcgtgctacggtgtcttgaaaaattgtccaatccatgtcatgatgatcttccagtgcattcttgacatagagtaggctcgggcgaatggacgctaagccactgcacagggctcgcatatgcatgaccttgcccggtaggttgagtgctacctctgaagccccgtcctggaaaggtggagcatacgtgcaccggcagtgactgtaacaaggacatgaggagcagttaccagtaaacatggtggcaagtcgtattgaaggttagatgcctgtttttttatatgcatgtagacgcgactcaccacacgtgggtggcatggtgttgttgtacctgaagggttggcaaagatgagctcgggttcgataaagactgaaagtagtagcagcaggttcgaaaggttgcaacatgcatgcagccaactactcacgtgcgccgtggaaaccaccacccactcgcccagaaagatgctcctcgtgtgattcgaacctgcgcctccaactccagctccccttcgttttttggggcggacctgcggacccggattccctacactcgagatgagacattcgactgacgacgcctcctctaaggacagcagaagccaacatattcctgagaagcttcgagagcagacctacgacttggcttgcgagtttcgcacagttcactcgcgattctgagaccggagatcgcggaaacgctttcaataggtgagtttgcatgggaaacgcttctttgaactttcagttctgacaccaacaaagaaagttatggcctctcaaagttgtgacccccccttgcttcgcagattctcattcacgacgaattcgaggaccaaagcgtctatgataatatactgagtgtcccaaaattatttgagaacaactgtatgtgaagtgtctcgatcccgacacattgttcatgcccgacatgcatgctgatcatgctttgcccgaaagtgatgactgttgttgacatcaagtgttgtgatacggctctcatccaagtgttggcaacatatatcacttgacaagcatgaggttgattgcttgaaatttttcatgtcatagcacgcatggttctttctcatcagcacaccatacatcggaaatcccttgtgaatgtaagcctcgtatactagccccacgatgcttgttgtcttatccaagtcgttgtgcgttgttgggttgtctatggttacaatggaccctacagtgtacgtgggattctggtaaggtaagtaatccatgtctgaagatcgtgttttgaaatgtacaatataaaaccctaaacaattatgagcatggacgcgaaggagtgctccgattcgaaagtagttgccgcttactgattacaactctgaaaaccctatttaaatgttgctggaagcagggactattaaagctcaagatctgtagggccgtgagaccagacgtcgatagtatagtgatagtattaggccacactaggacacgcgtacactagacgtttcatttttactgttccgtcgagtgtaggcattattatgctcgtgtgtgtcagaatttaggaagcagtttggctgggtcattggagtgctggggagcatgggtttgggtaaattcattacagtcaacggaatactaaaatgaaaccgcttcgtgtacggcacaccttacggtgtaaccttatggtgtagaaatccacggggcagtggaacaccaatacgattttgaatcaacaaattgcaggatgttaactagaatatcgtggttcttttttagatcacggctctccatcctgcagactccgtatcgttattttgtcggtactttcgtgagtgtccattgaaggaccagccgcacttaagcgatcgcctcttccccagtaccgtggcccaaaagaacacggggtctttgttgatgtgcaatgcgtcatgtaaggaggtttctttgctggacgggtcattttataggaccatccactcatacaatatatgattgtcaccgccttataccgtttttttgatgtttcattttactgttccgccgactgtagagggacaaaaatcatccagcctgccaacaccaaactgtaggtctatgagtatgtatgttgttacagtccaggggtaggctgaataggctaaagggacatgtccaaccgtgacaggagaggacttgcccagccgtgacagtaggtctatgccttcttatcagcagagcagagcaaaggctcatgccttggcctttcctttacccttcgcaccccccctcccccccacactccctctacccgcacctgcccctctgcccccggagccccgtcccgcactgcccttccccttggctggagccttgtcagactttaagtccatcgtcatgcctctcttgctcagcttggcacttagcagctgggctttggctgccgctaccatctcgtcgccatcatctgcgtcatcgtcttcatctgcaacgcctgcactaggcttctcgaacccggactcgtcctcatcgtcatccgctccgtcgtctgctccggcagcgcccttcttaccctttttgcccttcagaggtgcggcgagcattgcaccgcacttcgcctgcaggccttgctggttgaagctcctggtaaaggcgctcttaatctttgtagggacatccttcatggggtcctctccccaatcggccttggtcttgaacttggtcacgtcaataacgtagtcaaacatttcccgggagacgcagtagtcctgcatcagggtaacactctgctggatgccaccactctctccatcagtcactagtggatgcgtcagtagggtgcgcatggctgataggtactctaaccgcacgggagatctgctagaagccatgtggccgctggaagccatggtggaggtgagttctcccagcaagcgtttttgcttgtttgaggttgagaagttgcccagccatgatgtgaagcgagagtagttgtcgcctggccagaaggcgtccctcccgccgcgcatgtacgcccccggcacaaggcatgcaagcgtgttgaaggcaggcataaggctccagttcatgtagcgccgcacagacgtgttgatcacatctcctgcagatatggcctcagctgacttcgccactgccctcatccgctgctcctcagttcctgcgatgactgggcggtggttaaggtagttctcctggatcaacagggggacgatgtcgtccaccatagctaggttcagccgatcttgaatgctcatgcttgagctggcaggctctagcaactttcttgcacactcgaaaggagacaggtcactgtccttgtcgcatgcctggctgcccttaacgtcatcgtaggacagggtggtgcgactaagacggaccatttgcagctgtcctaggatagagcgtaggtcggcattggctcccttggccagggcctccatggtggcatcattgacagtcagcccctccttgcggcagatctccatcatccttatcttgacttgctgtgggatgggtgacctgaagtcaagctccacacagtagttccgcaagcttttcaacttctggttccacttgtcgttacatatgcagataatgggcacctttgaggacttgatcgtctggatcaggtcttgcacaccaccacggtcaccaccagacatcccatcaacctcatccatgatcagcagctgcttcttcatcttcccatcagctcccaccaacagagatcgattggttgccatctccttgatcatgttggccgacttccctcccatgccagctgagatctttgaatccgacttgttacgggtgtcactggcattcatctccacaatctcaaagttacactccttggccaagatatgggcggcagaggttttgccgattcccggaggaccactgagcagcaccgccttcttggacaggtacttaggattctgccggctgccaggaggggcctgtggttgctggccacgcagatttacaccctcccagttgctgagccacatcctgagggtggcaatcagcgtgttgttgcccaccagctctctagtgtttgttggcttgtacttggtaccacagttacccacagttggtagccggcattacctgaaggagcctggacaccaaatactactttgtcatgatcgttcagggaattccattgctcggcagtcatgcttgacagttcgtacctcagttgcttctcaagtgcttctgcgcgctcagtctcaatcttcagtcgagcagcatatgccttatttcgagcgcgctcagtctcaagctcaatctccagactattcactcgagcagcatttgccttatttagagagtgctcagtctcaagctcaatcttcagtcgagcagcatctgccttatttcgagcgctctcagtctcaagctcaatcttcagtcgagcagcatctgccttctttcgagcgcgctcagtcttcagtcgaactatgtaaataagagcgaatgtagcgatgcagataagtagtagagacttgtcaatcattgttataaattctgatgattgtttcttaagtacagtcaacggaatactaaaatgaaaccgcttcgtgtaaggcacaccttatggtgtaacctaatggtgtagaaatccacggggcagtggaacaccaatacgactttgaatcaacaaattgcaagatgttaacgagaatatcgtggttcttttttagatcacggctctccatcctgcagactccgtatcgttcttttgtcggtactttcgagagtgtccattgaaggaccagccgcacttaagcgatcgcctcttccccggtaccgtggcccaaaagaacacggggtctttgttgatgtgcaatgcgtcatgaaaggaggtttctttgctggacgggccattttgtaggaccatccactcatacactataacgtctgtcgtccagactcatcacgcacagtttctcggaagttcggttaccgcattgtgacagacggctttgctgtcagcatcttgatgaataagcctacgtgttcgatgcctgcagactcgttctctacgcgggcgcatgagtatgtgacaacagacgagggtggcattgtatccttccgtgacaatgtggtagtggctgcggtagacccgggtgttactgatatcgtgactgtaacaggactcggcggaggtaccaggtcgtacagctcggcgcaatattatcgcaagggtctgatcttcaagtctcagcgtcaaactgaagtttggaacctcgagacggctgacatcgtcggtgatatcattccggatagagactcttcgagatctgaacagattggtgcgtatgcctggttctacatgggtgccgccccaattcttcttgcccatcgtgcttcgagggggtaccgaaacctccgctttcgcaggtactgcaaaaaacagaaactcattgttgagattgctgacttcgtagctccgagggagaagagcgcgaaggtactcgtcgggtttggtgattggaaaggtctgggggcgacgccaatctctaggcggacttgtggccctctccaagctattcgtttcgagcttcgtagccgaggaaacgtcatcatggaggacgtcgatgagttcagaacatctcaacgatgcagctgctgtgagaaccgcctttgcaacatggtggcactcactcatcataagaagcaagacggtactggttgggaatgtacagaaggacgcaagcggattcacaagattctccactgcaaaagcagtcaaagcggagcgccacgccaacagagcggtggtaggctccactgcgggaagacttgggaccgcgatgtgaacgcttccaggaacatcctgatgcttacactccaccaagtctttgggagagagcgacctctcgcgtttcgccgagacgcgccgagaagttcctcaaaaaccccaccaccccctgatactgatatggggacacagacggttgaacggtttaccaaagaggctactcggaatatcttcgagaacctcttcaacctgctgcacccccccccccaacgttgcccaaaagcaacgatctgcagtctggatgattataaggtgtgtcccactttatttgagaactactgtatcaagcattaaatggcattggataacttcaatatgtatgcagttgaagaaatggatgcaagccttagtactacgacattcaaaagccgcatcatgggcacttcagtcaacgtcagcttgacaataaggaatacccatgaggccaccatggagttcaccctcttcggtgccgcttacacattcactgttacgaggtggagcagaaagggtttgtcgtcctttctgcttctcttctttgcttacaagtgccgcgaagcagctgacttcggttctctcacggtggatgacaacggtgttcctaccttcaatatgaccactgcccagaaggtcaatgctgtgatccaaggtgccaaggatgtcatggcatgcgtagacgagattggtactaggcaccagcggtcagtgctcgactatgccgtctggtaccgggagaagcacacctgctgggacacctacgagaactacatcaccatgctggcatgcaactgcatcgtccacacagatttcttggctccgggtgtcacatgagagttggtgacatttggcatggcttgaagtgtataaggaatttgcatgtactaaatatcagaatgccatgtatggcaaccaacgcttctgtaaaattcttcaacctgctgcaccccccaacgttgcccaaacgcaacgatctgcagtctggatgattataaggtgtgtcccactttatttgagaacaactgtgagagcgggcgacttctattcatgcaagtgttgggtgagttcaattgaaaactcataaattgtgattcattgagtgtacataaattgtgagcgaattacatggcctgcgttcgacgtaaatacggaatcccttgccaaccatattccaataaatgtcccagccatcttgctaacattccaacctgtgcagttgacagcatctcttacttggaaagactggttaaggcgaaaaaagaattggaggcccaggtcgacgtcatgtcagcccaagctgtacaggatgcagccaggatggaccatctggcatctcactccaatgtcatggcatcttactccaatgtcatggcatcttactccaatgtcatgtcagcccaagctgtacaggatgcagccaggatggaccatctggcatctcactccaatgtcatggcagcccaagctgttcaggatgcagccaggatggatcatctggcatctcactccaatgtcatggcatcttactccaatgtcatgtcagcccaagctgtacaggatgcagccaggatggaccatctggcatctcactccaatgtcatgtcagcccaagctgtacaggatgcagccaagaccaactgtttggaggcccgggtcagccagttggcagcgcagctcgctaggtttccgcacaacccgggtatgcatttctacggcgatggcaacatcaccccgccttgagattatctcccttggggtgagaccgcctgtgtgaagacttcgaatgccggtgacttgcgcatactcattctcacacgtgaattcaagcagagcagactcctgctcgaaaacctaaccaaatatgaacaacgcacacatgaagtccgcatttcgaaaaaaaaaaattatacgcagcaatttaagccaactcagtattattgagcaagtagataatgtcgtacatctcacggggaatcgcgggactcaactcgtcgaatgcagcattcagattctgggacagatcgtccatccacttgtgatcagcctcggtcatgcgcgcatcgcgcaaggagttggccttgtcgggatgcagccgcatggccatcatcctctgttcattcctcttccaaccggcatgtaaccaggtgtcaatggcgtcgtcagacaaccagtacttaatgggcgttcctgcttccgaacggattttttattttactgaaatcttacgataaatattgtaagatcgttttcgcaaattaattgattttgcttttttggtggcttttacgaaaatatcttacaatttattttgtaagattgttttgttgtattcctgagaaagagactattcccttcaatttcaattgtaacattgatttgctcgtttggagagagagaaagtattggaatacaaaatcaattgtagaggacagtcaagaggaaggtgaaagctgtttacaaagtcttgaacgcattgctcataattatttatctcacaactcacaactcaacagttcaaaattacaacttagtacttacgactccgaaatctgtacttatgtgtacctcataatttataactcacaactcagaacttatatgtaccttatacaagtcagaactaataactcctaactcaggacttattattcataatttcatacctcataagctcattatgtacataacacaaatttaaatcctgaaatctgcaacctgccatcctagaatcctgaaatcactcaaaatgtgtgttggatggtgcaaacaagtacactcgtgaaacttgtgcacaatgctaatgttgaactgctgccaacaagtccattggtgctaacttctgcacttagtgctgacagatcatgtgctaactgactcgtcttgctctgggaacaagttggcacgcaacccaacgagggctaaatctaacttcttggtcctcatcagcccttttactgttcctgcactgatgcagctttccagaaccttctccttgcaggcctcgaactcgtcctcaggccaatctgcggctttcttctcgcgatatgtctggagacacgtctctagcttttgcatcatttcctcactgggctcagcagggttgtcgcgaaactctgtgtcaatgtcttcctgaaccagtaccgccgtcctcacccttgtttcatcatctgcatcagtacaggcttcgagacgtgatagaatagcctgctccgtttttgcaaacatgttcaaacgccatgcagcagccccaagcttctgagtgatacagtccaagccaatggcgttcctcctctctagcaaagccgctagcatgcccgaggcatcgccagcttgcatgcacatcacatagttgccaacggagctaagctcccgcacaaagtgacggaattcggcgacacttctcctgcggtatccaacttgtttgggactcatcgagcagccgctaatgtcggggcgtccaatggcacttttctgtgcgtcaataggcggtaggaagaccgtgatggcagcggcaagaccagaagaagaaatggaagctttcgaggacgggcccgcttgtcccgcaccttgatgcaagatcccagagatggcaatgctggtggaatgtgtcttgaagtctggccccatgcgtgtaatgtgggtaaggcgaatgtcagccacgccagcttctctgaaagccacaaggaacctgctgccttcctcttggttggtgtacacgaccacatggcacactgaggcaaacttccgattctggcctgctaagttccgcagcatgtcgatcacatcagtcgaactccaagagtcttcatcgacgagccacaacggtcccttttcatcgccagtgagacaggggtcgatgatcaccaagtcgatcagtttgccaggcacctgcaagagtaaacgaaatatgtacaagtcagttagattatgggttggaagacaagttgaacaacgtgatgctcccgactgtgatcggaaggattatgtgtaatggattttgaagtggtgaaaagacatgcttaacacatcatcctcccgattatgatcgggagcgtcaacttttcaacttgtagtctttcattttaaacatctacgcaccttacggatttcatcacactggaatgttttcgccttcatgttgtaaaggtgcgcgctgactgttgccgtctctagctggacccgaccggctccaatctggtggtcagcgtccatgaacactgctgtagctgccgacatcaggtgtggatacatctgtccaccatcgtagagacggaaaaagcgttcggaaggctctccccttttccacactggcaaatcaccgtactttactgccaatgacaacaagacctcctctgtcaggttcaacatcggaatccctgctgctccatctttcctccgccttgttaagtccatgacgaggaaacccacgactcccctgatggtgttcaacgcatcgagatggatactccgaggcggaatggggtgtgcgaaaagcagttcacggcaggcctcgaggaacttggacatatcatcacagattggttgttggaggccgtctgtcgccattgggtactcctggtcaggctgaactagcaacttcatgtcgtcaatgctagcggccagggtactgataatctgtgcctggtttttttgctggacccttgtcctgatcacagaaaaccacctgtcgagaagctggtttagcgcttccttgtctgtcgcgaaactcagcagacctcccacttgcgtgacctcggtgatggttagctcgggcatcaaaacttcatccctaggtcgtataccataccaatcccttctctgggcggtatagtccctcagccacccggagaagacctgatgtgcgggaatcgaaacatcggatcgaatgcccccgatcaagatttcagaagctgccttgctgctgaaggcgatgccacccagctgaaggggtttgttggtaacggcgggttccgcgttattgcccaagaaggcgtgcatgtgcgtgaagccctttgcctcaaggtcaagcggcgaaccagaattgaagcgtaacttcaagtcgtcacgaaaggacacaggcgagacattgtgttgcttgagaagcctgtcgatgatgtagatgacgaagcccgctgacacttctgtcttgtaatgaaccaacgaagccttgtatgccgatgcaaacgtctgcgaataaaagagttttcttgtcatgataacgatcatactaggaagcatctcccgatcataatcggcagcatcatccaatgcaagaagggattcgccgtcaataactagatatggcacacgcacagtcttcccgatcatactcggcagcatcgtccaaagcgagaagtgaatttatgtcaataacgagacatggcacacccacagtcctcccgatcatactcggaagcatcgtccaatgcgagaagtgaatcgctgtcaataacgaaaaatggcacaccaccgtacttcatcacaatcatcccgatcatgtctgaaaataacttaatatacaacatgaacctaccgcggtagtgaacgcgacattgtccacttcgtccttgatcttgaaagcttcatactcgtggacatacaagtcgtcggtcacggacttcaggaagaacttcagctctccaggtggcagcttcgtagtttccttcatgtcctcaacgaggaccgacctcatcttgtccttagcctttcccttagcccttttcccatgggatccaggtgcagcttcctcgtcgtccccctcctcttcctcctcatcgtttggcgaaggcggaggctccacgttctgtaggcgctcaacaaggtggtcggcgccgatcttctcccggtcgtccatggaggacatgatcaggaaagccttcttgtaggactcttcgtccaagctcacgactttgaagcgtggcacggtggcacccccctggctagcaacagacttcgtcaacttctcgtccccggtgacacacagagttttgaagttgttgtactggtctgactgatgccccttctcagtccgagcgggacagcctgcctgaaggtacaattcacgccacaggaaggtagaaaccaaaaatggctgagagtcgtacccctcagtcgactggccgcttgtgttatccaaaagggaaaggaggcgagcgttctgaagcttctcgtcgtacgtggcaccctccacctctgacaaccggtacacgaagcaattgcgcagaggaatttcaccagggcggtctgctgcccacttgatgaaggcttgggagctgtggtaccctccgatgatccatggctcgccaaactcccctttcacattggagatgttgttgaacgtctgttccagcctgcttggatcaatattagcccaacctggagatacattcttcaggtccttgctgatgtccatgaacaataccttcccagtggccattgtggttttcaaaaaattggcgaggagttgatcgactcgaacagggtccagcacacggattctgacaggtagctttggagggaggaacttcgtgcagtccaatgaatgctctccaccaaaatgcttgtcggtcaggaaagccttagccttagccaaatcaccttcgatgtttccaacgctgtcccctttcttctctcctgccggtgatctcttcgctttccacatagtcttcttctgagaaccaggctgaccgcgacctcttttcttaggagcggttttgggtgcatcatcgtcgtcagatggcccgggcacagtgtcgacagaacttcttgagttcaagtctgaatcctcctccaaggaatgaatcttgtgttcgggtacaggagtttgtttctttgcggctggtgcattgtctgcagcctgcgacgcagcacgcttgcctttgccctcgtgtccagcagggttcttcttgggatcagcaaacctgaagggtttgataaaacatatttgacttagtgaggggtcagaacattgaacatccagtgtctcccgactatggtcgggagcattgacatagttgattacagaaagattgcggaatattaaacattgaatatccagtgtcctgccgattatactcgggagcatagacatagttgattggtaaattattgcggcagattgaagattggacatcaagtgtcctgccgattatactcgggagcattgacatacttgattagtgagtgattgcggtagtttgagcattgaacatctagtgtcctcccgactataatcgggagcattgacttagttgattagaaaagattgaggaagattgaacattgaacatccgatgtcctcccgactatactcgggagctttgacatagttcattggtaaattattgcggaagattgaagattgaacatccagtgtcctgccgattatactcgggagcattgacatacttgattagtgaatgattgcggaagtttgagcattgaacatccagtgtcctgccgattatactcgggagagttgacatacttgattagtgaatgattgcggtagtttgagcattgaacatctagtgtcctcccgactataatcgggagcattgacttagttgattagaaaaagattgcggaagattgaacattgaacatccgatgtcctcccgactataatcgggagcattgacttagttgattagtaaattactgcggaagattgaagattgaacatccagtgtcctgccgatcatactcgggagcattgacatacttgtttagtgagtgattgcggaagtttgagcattgaacatccagtgtcctcccgactataatcgggagcattgacttagttgattagataaaattgcggaagattgaacattgctcatccgatgtcctccggactataatcgggagctttgacatagttgattggtaaaatattgcggaagattgaagattgaacatccagtgtcctgccgattatactcgggagcattgacatagttgattggtaaattattgctgcagattgagcattgaacatccagagtcctgccgattatactcgggagcattgacatacttgattagtgaatgattgcggaagtttgagcattgaacatccagtgtcctcccgactataatcgggagcattgacttagttgattagataagattgcggaagattgaacattggacatccgatgtcctcccgactataatcggaacgcccaaggaggaccgtattcaaaatcagtgacgcgcgtgtttaagttgatgcgatcgacatgactacgatgcagggaacagacttgactgcaatggttcattcacgcaaacgagtgatcgattgcgaaaggagataacaacaaaacgcccaaggaggaccgaagtcctcccgactataaccggaacgcccaaggaggacggtattcaaaatcagtgacgcgcgtgtttaagttgatgcgatcgacatgactacgatgcagggaatagacttgactgcaatggttcattcacgctgaacgagtgattgattgcgaaaggagataacaatttgaatacgatgaacttacaaagttgtcggcgatctgccctcttcgttgattgtagtgggctgatctcgtcgcttccttcctgccttcttcgcggagcctgaaggaaatggaaagagtgcggaagttacgcaatatcctatcgaatttgaaagcggcagttgcggtcaggacacaatggttgtttcgaacggtgtacatctcacagcgtacgtaattacattacattacattacattacatgttaaagtctacttgacaccgcgagggtgtatgagactctgtgctttaaacaaaaagaaaaagcacccacaaagcaaaaaaccccattacatcaggggtgtgtcgaggacaaacaaaccaaactcccaaccaccgttttggtggcgtaggtattaaaccccttagagccggacccagatctcaaccacttacagtggcggaggtaagaagctaacaaatgagaagtcacaagaagaagaaaaaaagggatgataaattacggtgccactaagcagtccagggcttcctgtcttgctcttctacaagtagaaagatagtcggctaggttgctccaaaaagacttagtgccatttccattcataaaggttctgaatgtggaatcgcagaattccacattccatacggttaagttggtatcctcatggacatgcctataaatatctgtaaacagcttctggtagcggaggcgaatatcattataaaaagggcactcaaacatatgcatttcatcctcaggtttttggaacccacacatttgacagtgtctcattgagcgagggatgtgtgctctatccaccaccctcattctttctgtgttcagccaatgggaacccattctaaactgtgctatagaacgaatctgatcctgcttatgtaaggcggatgtaaagggaatcaagccattctcatcattgctgttggctgcgaaccatttttggtatcggaggcgtttaaagccaacccttctctcatcagggatgtctctaactgcattggtgtcacttgggtacttaaacctccatgactcaaaaactttagacataatacctttgacatcgacagcctccaaaatgttgatgtttttactggatcctagcttgtggagagcacaacgcaagtcatgaacccagccagtgttggagtcaaaagattcctcaagagccattctaatgagatcctcaggttctttatgtatggtcttgttccagaagcgcaaagcttgtttaagccaagcaaaacacaacggggttctacccagctcttccatgataatattagatgtagtagattggcaaacacccaacatttgtttaagtatacctctatgccatttctcacaagcatggtcatttgagataagtgtgttgttcagaatagaaggagcccacacctcacagccaaaattcaggataggttgtacaagagaatcaaacaggtgggtgagaatatcaatattgtatatctccatagtatggcatcgcctacggagcatgtggtgtgccttttgggccttagtgagcatcctagaaaaagcagcttttgcacgattgcttgagtcaccatccacaaagagggatcccaagtagataaaagataactttgtagaaagttgtgctccatcatagacaaatttgtaatcaggatccatgcgggcctcatcacagaattgcttgttgaaaacgacaatctcagttttctttatattcacagccatcttagtagcctcacagaaatctctcagacagtcaagcatcgcttgcatatctgccggggattctgc

SEQ ID NO: 283 - DNA, 21227 bp, unidentified
  misc_feature 1..21227: note = Fanzor polypeptide
  source 1..21227: mol_type = other DNA
ttcaacggatccgtcttgcatctggtgggggcaaacaacgagatgcgaggttctttgtttcaaccggcattcgtcatgcagagagaggtgagcttggcttgtaccaaagaggctactcggaatatcttcgagaacctcttcaacctgctgcaccccccaacgttgcccaaaagcaacgatctgcagtctggatgattataaggtgtgtcccactttatttgagaactacagtcggcggaacagtaaaatgaaacatccaaaaaacggtataaggcggtgacaatcatatattgtatgagtggatggtcctataaaatgacccgtccagcaaagaaacctccttacatgacgcattgcacatcaacaaagaccccgtgttcttttgggccacggtactggggaagaggcgatcgcttaagtgcggctggtccttcaatggacactctcgaaagtaccgacgaaagaacgatacggagtctgcaggatggagagccgtgatctaaaattctcgttaacatcctgcaatttgttgattcaaaatcgtattggtgttccactgccccgtgggttgctacatcattaggttacaccgtaaggtgtgccgtacacgaggcggtttcattttagtattccgtcgactgtaggaaacgctgtcatgtcgatactctttagggatcaccatgttggggaaggggattccgtattgtttgcaaagatcctcattgagacgcctgtcatgatcgttaagggaattccactgctcgacagtcatgcttgacagttcgtacctcagttgcttctcaagtgcttctgcgcgctcagtctcaatcttgagtctagcaacatctgccttatttcgatcgcgctcagtctcaagctcaatctccagactattcactcgagaagcatctgccttatttcgagcgcgctcagtctcaagctcaatcttcagtcgagcagcatctgccttatttcaagcgcgctcagtctcaagctcaatcttcagttgagctatgtaaataaaagccaaggtagcgttgcagataggtattagtagagacttgtcaatcatattgattgattgtttataaagttgaagaaatctcttctcgttttgccacggtaatatatatagcttgaatagttgtatacaggatggacacaaagaccgtatcggagcttagggcgatgctcggcacccctcaagctgatgatgcgatcgaagaactctaccgccgggctgaggtcaccgaggcagctgctgctgtgcctcctcagcctgaacatccgacgtacgtatcggcaattgttgctcgcactctcttttcatgcgcagttcaagctcgttttggtatgaggccgattttgtaaaaccgttgaatttaagctacccgtatatcctacagtccgcggaacagtaaaatgaaacatatatcagatggaaataaatgtacgacatcgccgttagaaaattggcgttaagaatggtcgctgacttgggtgtgttaaaaacttctgtgtttacgaacatcagtcgttctactctgtggaggtggaaacgctttggtgtaaatcgaaaacgacgtgaatttgtaagcaaactttttgagacgaacagagatttgttgaaattgtttttattgtcaactcaatgcacaaccgcaagaggtgttgttgcatttttcaaaagtactcacaatttacgattatcaactaaaacagtgtatcgtttcataaaactcattggttttacaagaaaaaggagcaaactccgtggacagtgtaaaggggacttagttccacttgtcactgaattttgtagtagatacaaggatacaatcaatgctgggaaaattttagtatcagttgacgaatgtgggtttagtgagcgtctcaagccacattatgggtattcccctgcggtgatcgtctgaagacgtcttggtcagtcagtcagtcagtcagtcagtcgtcgtcttgtggtctgccatgtcaaaataattgtccaactctctcagactgcagccaactaactacttgaagcatgaacaaagggtgcttgattgaggcctctgcctgatgtggagaagcccaagtgttacagtgagaatcccaagcgttacagtgaatggtgtacgcgagtcatcaaaatgaatccaatctgcccgcgctcccccttcaaaattcccatagtgttgtcaagcagaagtctgcttgcgacgacacatgttcccaaacacgtgtgtaaacaagtcagagcttcatgacccctttaatctgagtgagtagtacactcgacggaatactaaaatgaaaccgctttctggagtgtacggtacaccttatggtgtaaccttatggtgtagcaacccacattgcagtagaacaccatcatgtttttttgtagcccatcaacaacacgcatccctgcaaaatggaagcggtctcccttgacccaacagttccatgcagtgcagccttgcgattgtgagagcagaggagcggtcccggtccgagtaagtgctggtttctggagagaatcgcagtcctcgtacctcagggtaccgcttgatcgatttgttgtcgacaagagagggggctaagccacccctcctgtgtttttcttggatttttttacgtgtgcagtacaccctcaccgccaactggtcgcgataagagacctttggagtctccttcaatggggtgtgacccaacaactcgtaacctagacaaatctgaccttccgtggttatttggacacttggaatcttgtaaacacattccttcttggcaccggtttcccaagacacgagagtcgtcttgaactcatctgtcacatgaacctcctctttgaagaggcgcttgcaggaagcgaacatagatcccgtaggcacagctacctctcctggtccggtagccttcagcttcgtgattgcagaaccatatgctacgcgaaccctcaggttaggatgatccaacttcatgttgcgcttgatccctgcccaaaatgagtccatagccttgcgcttgccaatgtacctctgaaagttgtctcgggattctctgcgacggagtgccatcctccaccactcgtcggaaaacgtagcgtaatttttcaagtaagccgagatatcatccttcctggatgtactcaacgctgctccattttcacgcagagactcccatctaggaatcatgtctgagaaacgtttttcttgctgttttttctgtttcttgataccagacttgtggtaaaaagctccgcgtgtaagcttccatgtcttgcttttgtcgtctgccagatacgtgactgtagcgatgttgctcctaccaggatccacacccagaacgacgatacccatatcgggcaatgtcgttttgagtttatggtcatactgttctgagacgctcataccttcctcgtcacgagacctcttacttgtcttcttcagatcggatacacgaacttgtactgtcttgctgtactgcatgctcaatgagactccgtcagtacagatgctacaatcgaacacccaccccgtcttgacaggtggtttcttgaagaaggaacctgcgactgtttttcgggcgttcacgagcgtgtcatacctaccctttgcatgtctgtactcgtcagtagccttgatatccttaacgtcagcatcgtacttctgttgggccaacttttatgcctcccattcaccaggaccacatgattttttcttcttaactgcaggcttcagaggcaacatgaagcggtcgggatcctttacattttcccactttgaaagctcgacgatgtttgggtctttggggaacacgtgcctgaacaggttcacgagggtcttcatgtcaaggcggacatgcgcccgttggacattaaagatgggcatcaaccggatacgacgtgcaccaatagcctccaaccgtgtctgcatccaataattgaaccggaccatggtcgggaagtccatgtctttgccatagtcatcataaagtcgacttccatctggaactttcagcctgactcgaacttcacggacgtactcctgaacaggctctggccaagattccatctcctgtatttcttgttggatgaccctcatcacgtcgtacacacggatggtcttcggagctcccagtgccttcaaagtagccttagtgaggcgggtcagacgaggtaccaaaggaacccatgcgttgttcgacacgacagtgctcaatgtgtgaccggcatagtttcaaaacctggtcgaaatagatagggtaggagttgatgtagtcagggtcatcgctaccaagcacctttccgattacgtctttcacggcttcgtatgatattctactctcttcatctggaaagacgccgtcaactccgatccttagccaatccttccagtaggtatccttcatatcgtacatattaggaatcggcaggtcgccctccatgagcctcgtgacatggaaagtcagcaccagactggaacgctgtaacatgcgcctcgccacattgacgagctgatccacatgccccctgaacttaccgaattcttcatcgtcaagactcattgccttcttcagggcgcatttcacgacgcacatcttttccaccgtcttggactctggagggggtctggcgatgagaccattgtcttcgcataaacggacaatatcgtccttcttgtcctttgaggagtatgctacttcggccaattttagtagctccttcaatttcgcgactgtcggaggtttcgttgccatcttacataatttgtacatcacagaactctttatacaaacatcacatacgtgttccatacgtggtcaaaacaacccataatgatttatcagtgaggttgctgaatgctaaggaaatcatatcagacacgtgcgtctttgtattgtttggtatatagttcaatcgacgaaagtccttcttcaccttagcgaagcacagctcaatagcattgaattctggactgtaaggaggagtgtaacaaatatttacggggcttctgaggaccaagttcttatggatactggtgttgtccattattactactgaattattgcacaaactcaatgagtcaataaatgcagcgaagttcgtcttcttcacagatcctttcttcacaacgaactccttcctaccatctgaaaaaactgccatcaacaaactatggtgtacccacccaccagtagttttaacgataacaggttttcctacaggggaatacccataatgtggcttgagacgctcactaaacccacattcgtcaactgatactaaaattttcccagcattgattgtatccttgtatctactacaaaattcagtgacaagtggaactaagtcccctttacactgtccacggagtttgctcctttttcttgtaaaaccaatgagttttatgaaacgatacactgttttagttgataatcgtaaattgtgagtacttttgaaaaatgcaacaacacctcttgcggttgtgcattgagttgacaataaaaacaatttcaacaaatctttgttcgtctcaaaaagtttgcttacaaattcacgtcgttttcgatttacaccaaagcgtttccacctccacagagtagaacgactgatgttcgtaaacacagaagtttttaacacacccgaatcagcgaccattcttaacgccaattttctaacggcgatgtcgtacatttatttccatctgatatatgtttcattttactgttccgccgactgtagtagtagtagtagtggtgtacttcctcagttgcaaccttccaaaaacgagtgtaaacgaatcgagtttatgaaccttacagcacgcacattttcctccttttaaaaccaacaacaacaacctttgataaaccaccaaataactctttcccgtcgtcatgtcttacatgtctgctgcccaaatcactacgttcgtcgataccaccaatatcttcgacgtcgttcagaagaaggatcgaactaagatatcccacagcgccaccgtcgctcagttgaagagcatctgcaacgcagtcatatccctgaccagcgttcctgattgcctcgccgactctgtcggcgcaatgaagatggcgcacaaaaagtttctcgaagattcccccaaaggggagaaggagcctctacaggccatgcttctccctattgccgtcgctgctgcggatgccgtcgctgataattctgcgacttcctccgtgcttgccctctccagtgcctccgtctccctccccgaggacgacaaaaccaccgaggacgttggcacggggtccggcagtagcggtaacaagcgcccccgcgccaatgcttcacgctctgcttcacgctctgcttctgctgttcctgctgctgatcctgctcctgctcctgctcctgctcctgctcctgctgctgctcctgctgctactcctgctggctcgttctcaacgtgctccctgtcctcctccttggcctccggtcgtgttggtcgcgggtccgttctaaagaacgagcttcctgttggctccaaacacggtgagttgaccatcgtggggtactcccccaccctgggatgcagtgccgtcaccattcacggcaacccgtgcggtagaagacaggtgctattaagcaaccccaatggtgggacattcaccactggcaagtgcgcgcacctagcgtgcatgaaccagactccctccaagcgtgaggcgtacctcgccaagaagctcgctgctatcgagctctcaattgagcttcgctccctgtccctcagccagcagctttagttatatactcagttatttagatactcagttagatactaaaacctcttttttttgatacatttcttagagacgagaaaaaatggtcctgcctgtatgtactgtactgtaccgtaccccatggtccccatgtgaattcccccctccgtttgcgtgtgtgttccatgcgtgcgtgcgtgcgtgcgtgtctcttgttctcctgacgtcggcgtcttgctccctcctcccctcttgcacagacaaccaaccaaccaaccaacttgctccgtcccagcctgcatctatcatccgcggcgtcgcgtgtgtgtgtgtgtgtgtttgtgtgatttcagttccgtaaatcagtagtgtgtctgctggttgatgttacactgtgggctcccctccggtcgcccacccgctcggttcctcgcggactcctttgtgggggctcccctccggtcgcccccggtcgctccgctgtggggaagaggtgaaaggggctccgccacttgtttaatgtggtacggtggttctcatccattgacaagcagttttgaggttggttgcttgaggatgagaacaaccgtgatgtagaatgataggtttccctgaattttgttactttcgttatttttttatgtggagggccaaagcggcacctgtgccgacacaggtgccgccgtgatgagagtggtcggtcggtcgctctgtgatgtgatgtgagtcgacacaggtgccgcctgatgcgaggttattttacggctgcatggcactggatacaccacgtacgtgtactgaggaactgcaagacaaggtggcatgcgggcaagacaagatgcacggctgttacacaaatctgatggcggaccacaagtctggcacctttcaagtgtcgctcactcgctcaaatcacactacgtttacagtgagaaagccgtgatgccgttgctagcagagaaggcctgctgcttctggttgtggagccacaggatgtcgacgccaccgacagccagcacgtagctttcaatccacacgatgaggaactcattgttgtagactgggacgttcacatcctctccggtgcacaatgagacgttgacaggcatcggcagcgggttgccgttctcatctgtggtatagatcttcgcaacgttgttgtcgatcgcctccactcggacctggagctgattggtgatgttgaagccgttgacggtggcattcttgtacgagaagcaccccttggctgtcatttctgcacagcataacgtagtcatgtcagtgttgtgcattactagtactagaaaagtttacagccaacagtaactaacacacactactgcacttttccgtcgcttttatcttgtggatacagattgacgagacaatgaggatgcgcaagccgctgtttgcatgtggagtcagatggacgacaatgaggatgcgcaagccgccgtttgcatgtggagacagatggacgagacaatgatgatgcgcaagccgccgtttgcatgtggagtcagatggacgacaatgaggatgcgcaagccgccgtttccatgtggagtcagatgtttttcgatcgtcgtcgtcgacagtgttcctccgtttgcgtgtgttcgtttgttcgtacgtacgtacgtgtgtgttgcttgcattgattcattgattcattgatgcatgcggtcgatggatgcaaatgtgcgtgtgtgcatcttattcctgttcacttgcgtgagtcgtgagggctccccttcgtacgtcgcttgttccgcgcctacgatcactaggctacttctgcttgaggcgtatttaatgtgttttgtgcattgtgagaggcacgtaaatacacacaaggaaagcaccggaggggtggcttacgcttgaggggcaccatccaggttggcatgaatgtgccaaaaactcagacatctgggtgatcttaatcagatgaatccgacatctcgccaaattgtatacagttgttctcaaataattttgggacactcagtataatttgaatgatatcccctgaaaccagatacaggtccgtggttcactacaaatatgttttgaggagtctgaggaaggtttgtaatatatacaacgtgtccaagagctcactacatagatgggtcaatgctgatcaggtgggtaaaagtaagcgtttaaaacgaaaaaggaaagaattgtccatgcttttacgttccacgatatccaataatattgtccattgacgtcaacctgtaacttcgattacttcatgcaaatatgttgcgttatagaaatgtggaggtataaagacttgtcaaaatatatgattaatacgagagattgggttaggcatgttcgagagagcctgtctgcagatccagattacatcaaaacgttttcggggtacaatttgtaatggagcatggggtcgtgttggtacatgaggctgaccaacatgatgacgctgctgaacttgtagattatgaaggggatgaggatgaggagcgtgcacctgggcgagcgatttgtgtggtcaagatgaaattgagtacctttattccccatgattggctccgtaaaaagatagacacactggtactggacatgaacaagttgcttggagagggttatattttcgcaaatttccacattgctcatctttttgagaatggtatcgctgtccctcctgtaaattgcaacttcttctaccggtgccttcttgcagtcagtaccaacaaatgtaaggggtcgactcttggcgaagacttcgagagtagtcgtcttctgttcgacttgttaagagagccggggcaatccaaagttgacatcagggggaacgcgaagaaccagatcattgcagacctgtctattctcatggccacaatggcctctaatcacctttggaccaaccttgagcggcgaataacgacgtacttgaagtggaagtacccacaaattgcaaagcgcctgcggtcggacatcgtggctgcagtgatcaagtgccctacaaagattctcgacgtcatattcaagatgagcccccatgtagccaagctgccaaccaagctgccaacagctcgacttcgctcggcaaagagtgcagtggctcttgcgaagaagagggtcggtaggaaggaaccagaggtatcccctttgcgagttaggttgactaaacttcaagcgaggtttgaaaagttgagcgaagcttggctctcctccaagaaccatagggtggacgaagataacgcgaaacgcttctttgcacgcgacgtggcattctgtctcaggggggttctccctttaccatccggaaacacttttgcgtctcgggctcacatgaccctgcctctgtaccacaagatattgtcggagaccatcaaagaaaaacgaaaaacgaaaaacgaaaaacttcgcacattctcgttgttgccttacaaatctggattcactctgtcgcacattccgatttcgaaaatggcctttttctatatggtcaacgagtgccacttcgattcatgcaaggcagacgttgcttcgcaaacctcaagaaagtggagacagtttctcggaagttcggttaccgcattgtgacagacggctttgcagtcagcatcttgatgaataagcctacgtgtctgacatgttcgatgcctgcagactcgttctctacgcgggcgcatgagtatgtgacaacagacgagggtggcattgtatccttccgtgacaatgtggtagtggctgcggtagacccgggtgttactgatatcgtgactgtaacaggactcgacggaggtaccaggtcgtacagctcggcgcaatattatcgcaagggtctgatcttcaagtctcagcgtcaaactgacgtttggaacctcgagacggctgacatcgtcggtgatatcattccggatagagactcttcgagatctgaacagattggtgcgtatgccaggttttacatgggtgccgccccaattcttcttgcccatcgtgcttcgagggggtaccgaaacctccgctttcgcaggtactgcaaaaaacagaaactcattgttgagatagctgacttcgtagctccgagggagaagagcgcgaaggtactcgtcggttttggtgattggaaaggtcaatctctaggcggacttgtggccctctccaagctattcgtttcgagcttcgtagccgaggaaacgtcatcatggaggacgtcgatgagttcagaacatctcaacgatgcagctgctgtgagaaccgcctttgcaacatggtggcactcactcatcgtaagaagcaagacggtactggttgggaatgtacagaaggacgcaagcggattcacaagattctccactgcaaaagcagtcaaagcggagcgccacgccaacagagcggtggtaggctccactgcgggaagacttgggaccgcgattacattacattacattacattacattacatgttaaagtctacttgacaccgcgagggtgtatgagactctgtgctttaaacaaaaagaaaaagcacccacaaagcaaaaaaccccattacatcagggtgtgtcgaggacaaacaaaccaaactcccaaccaccgttttggtggcgtaggtattaaaccccttagagccggacccagatctcaaccacttacagtggcggaggtaagaagctaacaaatgagaagtcacaagaagaagaaaaaaagggatgataaattacggtgccactaagcagtccagggcctcctgtcttgctcttctacaagcagaaagatagtgcgatgtgaacgcttccaggaacatcctgatgcttacactcaaccaagtctttgggagagagcgacctctcgcgtttcgccgagacgcgcagagaagttcctcgaaaaccccaccaccccctgatactgatatggggacacagacggttgaacggtttaccaaagaggctactcggaatatcttcgagaacctcttcaacctgctgcaccccccaacgttgcccaaaagcaacgatctgcagtctggatgattataaggtgtgtcccactttatttgagaactactgtaaagggtgtcccactttatttgagaacaactgtaaactgtacagctccatccatacaacgaactagacaccgtgcgagaaaaaaagaaatcaggccaaaccatttacaataatagctcgaataacgtcagaacgttttgtaggaaaaatcaaatatggacaaatgtctcatggtcattcaagcatccactcaaagtgttgctgatgtggatagagttgtttcacgtgaagcctgctataatatacctgtgattctgagcaatgagatctgtgaagacttcaacgacatagaaattgatctgcctcacatgcgaacaactggagaaccagggagattgttggtaatgaaggaaagtgctttcttgcatgcaatttgtaacatgtgtcaaatatgtccacgtggcatcgaaatagacctcatatctgttgacatcttcagactacatccaaatgaactacacttccttcatgtttgcaataaacataaattgcatttgaacaagtatctattcaccaattagtcttgctggctgtgaagaggagaataaggttcgttacagggtctgatgcgttgtttacaccacttccacgagacgatgagtgacgatgatccgccaccgtgtgtcatgaatggacggacggacggtgtggatgcgacagttttccagtgttttgcgtgtgatgatgccttgacaggtttctgcagctcaattcccctgccccactccgtggggcccgcgattaccctatcgatatacgagatctattgtctagcagacatctgcttgacatgtgatcaccgtttgcgattactttaccgggttttccgtcatctgtgagtgatatcttacagtatcgaggtattgacacaggtgccgccgtgatgcgagaggtcgccatgtgactcgactcgactcgactcgacaggtgccgccatgatgcgcgaggtcgctctgtgactcgacacaggttccgtcgtgatgcgagaggtcgctctgtgactcgacacaggtgccgccgcctgatgcgaaagtcgctctgtgactcgactcgacaggtgccgccgcctgatgcgagaggtcgccgtgtgatgtgactcgactcgacaggtgccgccatgatgcgcgaggtcgctctgtgactcgacacaggttccgtcgtgatgcgagaggtcgctctgtgactcgacacaggtgccgccgcctgatgcgaaagtagctctgtgactcgactcgacaggtgccgccgcctgatgcgagaggtcgccatgtgatgtgactcgacacaggttccgtcgtgatgcgagaggtcgctctgtgactcgacacaggttctgtcgtgatgcgagaggtcggtcgctctgtgactcgacacaggtgccgcctgatgcgagaggtcgctctgtgactcgacacaggtgccgcctgatgcaagaggtcgctctgtgatgtgagtcgacacaggtgccgcctgatgcgagaggtcggtcgctctgtgactcgacacaggtgccgccgtgatgcgagaggtcggtcgctctgtgactcgactcgactcgactcgactcgactcgactcgactcgactcgactcgactcgacacagatgccgccgtccttgatgagagtggtcgccgttcctctaaaaacgagtgtaaacgtagtggcctaagccccctcacccaaatcctgtgtagtgctggcggcggtacaatcgatcgccggacatgataaaaggcccgacgatccccgaaactgcataatttccttttgttttgttctcctctctcttccttcgaacacgaccgaccgacatcttcctcctttccataagcagcatcattcatcgagcctcgagtgaagtgtgtggctcacgcccgacagcatcgatggggattgccaaaaccctgatgtctgataacacactcgaggttggctaacctttcggatcgatgagagtgctgtcaaggtagccgccacagcttgcgcatacgagcaattcctgtgtcaaaagaggaatataagactcgcttcttccaagcttggaaagctagctaccttggcactctgtacgatcctttagggttctttgaagccgccttagtccttcctttgctttgctttgctttctcccgtccatccttattttctgaacaaatcttcctcatttctagaagcagcattatcatcgagcctcgagtgcagtatgcggcttacgcccgacagcatcgatggggattgcccagaccccgatatctgagtacacactcgaggttggcttacctctcggatcgatgagagtgctgtcaaggtagccgccaccgcttgcgaagacgagcagttcctctgtcaaaagaggaatcgtcagactctgcccttccaagctgtgaaagtctcctgggcactctgtacgatccttgagggttccttgaagccgccgtagtagtagaagtatcatgatgatgatggaccgtagtagtgtgtgatccacatagcatacttcgctgcatctgtttgacacagtttccgccttgatgagagcgagtggtcgtcgtgtgatgtgactcgactcgacatgatccgccttgatgagagcgagtggtcgtcgtgtgatgtgactcgactcgacatgatccgccttgatgagagtggtcgccgtgtgatgtgactcgactcgacatgatccgccttgatgagagcgagtggtcgccgtgtcatgtgtcgtgtggaggctgatggacgaggattcttcgacagccgccgccgtgcgtgtgtgaggatgcggtcgggcgggcgctatttacacatcccatccatcatcccccttttgtttgtgagtcgtgagtgagtgagtgcactacttcggattttgaccacctgattccttcaccaatctgaactacaaatgtgacgtgtttttcaagaatcatcgaatcaagcggcattcctgccgcctttttgttggctctcagagtgtatcaggtcattgatatgtgaaaccgagtataaaacaacacgtcgctaacatgtcacaagataacactaaacccatcacaaatggggtcaggatccaccaccagcctttctactatcagtagtattccttctgggctccgtttgagtcgttgtcctcctgtgaacaagcgtccatcttcttccgagcatgagatcttttacttgcacgaaaagtttgacctctccaaagtggactccctcttggactcccagggcatggtggatctcaagatcaatgaccgtgataagtggaaacaaatcgcgagcacgtgcatggtcgcccgttccttgggaggctacgttccggttcgttattatatgcacgagtcccaggatggatatggtcgcatgaaaagtcgttttgatgcgaccggcgtgtccgctgttccgtacgtgaggatgggtcgtgaggcccgtgctgtgctcgctggcgatttgtactgggatgtggacatggtcaattgccaaccgagttttttgtcccaaaagtgccagcaatacaagatcaaatcaccactcttggatcgctatgtcaacgatcgtgaagcttctctcaccgaggtcatggatgcatgtggtgtcactcgcgaagacgccaagaatctcttcatccgcctcctgttttggggcagcgtggatgcgtggacgactgactgtggtctagaagttgatcacaatcttgtgcctgtctggatccacgccctcaagaaagagctccgcgaggtggcaaccaatttgatggatttgcccatttcagaagttgagatgatcggccagatggttaaaagccggtccgcgtgtactcctgtctcgtttggttctgagctctcaaattccggcgaccctttggccacttttatcgcccttttcttgcagagcatcgaacacgaatgtgtttcagcactcgtgcacaaagtgcatggtcatcattacagtgttggcggcatcatctacgacggcatcttggtggacaagtgtggttgcatgcccattcctgatgatgacttgctgcttctcttggaaactggagtgagtcgacgcaccggctataccatcaaactcgcagtcaagcctttgtcggcctctccgcattggacgaccccccctccccttcaagatacctccaataatgcagaatatgaggattggatgaacggagctgagctgctcagctatgatgaagtcaaacgcgattgggaaaagtcggcgttcaagatcatcaaccaggtcgtgtacgtgcgcattgatgggcaagatatccgccatgtcacatctgacaagactctgcaagaggcgtttcgtcacttgggatatgtcgacattacgttgcgcgactctgggagcgtttcggtaagccggacacaaccattcattccgaggtggatcaaagacacatctatccgcaagtatgatgacatgaagcttatgccgccccctatcgaggttggaggcaatgtctacaatatttggaacggtttcgaagtcgatcgcgatgtgtcgtcacatgatgattcagtcatggccgaccatccctcggtcgaggtcttcatcgatttccttcacacgttgtgtggcaataaccaagagtgcacgaattacatcctgaactggatcgcgcaaatcttccaacaacctgctcagaagaccggggtggcaatcttactcaagggcgaggagggcgtcggtaagaatcgtgccaccgaccttttgagggcgatggtgggcgccgacaagttcctgaaaactgcaacaccggccaacacgctctatggtcgcttcaatcgccaacgtgaggggcgtttcctcatcgtcgtcaatgagtccaatggacatgataactttgcagccaacgatgtcatcaaggacatgatcacatgtgatcagtttgaatgcgagtccaaaggagtcaatgcatacaccatgcagtgtttttctcgcttcatcttcatcaccaacaacgacaactgcctccgagtgaatcctgataaccgaaggtatgtcattatcgagacatcgtctgtgctgaagggtaacactgagtacttcaaccacctttcggggctgatcgacgatgcagagtccagagtcgcgttttacaagttcttgatggcaagggacatcaagggcgtcgaatggatccggtctaggcctgcaaccacctacatgtcgcaaatggtctccatgaatcttccgtacgagcaccaattcatcttgcacatgatccagggtctgagcgtcgagcataccaacgtggtcgacagtatcatcgattattctccctccgtgagcatcaaggcggagaccttgttcgaccagttcaatgactggctatccacgatccgtgcttctgataagcatgaaaccaacttgatcaagtttggtctcaaggtgtccaagctcgtgcgtgatgatacaaagaacctgggcttgaggggcatctccaagaatcgcaccaacactggggctgttgactatttctgtattaaggatgtcctcgatgccatgcgtgagaagatgtgagttgattgatgaatgcttctgtttgtcggtcctctcgtcaagcacacgccttctgccaacgaaagtccgttgtgggttcgttggtcgccactcaactcgtaatgagagtccccttaattgttataaggttcagcagctgatattaccgtaaaccatataggtagtgattagattacaagttatgtatagttatatatatattgtatgtaaaatgaagtagatatatatatcggtataattacattatatagggagggttccaagtacccatcacctgtcaactctacacattgtacctcagctccggcaatcaatgtaatgtaatgtaatgttttctacgacctacgccttctgccaacgaaagtccgttgtgggttcgttggtcgccactcaactcgtaatgagagtccccttaattgttataaggttcagcagctgatattaccgtaaaccatataggtagtgattagattacaagttatgtatagttatatatatattgtatgtaaaatgaagtagatatatatatcggtataattacattatatagggagggttccaagtacccatcacctgtcaactctacacattgtacctcagctccggcaatcaatgtaatgtaatgtaatgttttctacaacctacgccttctgccaacgaaagtccgttgtgggttcgttggtcgccactcaactcgtaatgagagtccccttaattgttataaggttcagcagctgatattaccgtaaaccatataggtagtgattagattacaagttatgtatagttatatatatattgtatgtaaaatgaagtagatatatatcggtatagttacattatatagggagggttccaagtacccatcacctgtcaactctacacattgtacctcagctccggcaatcaatgtaatgtaatgtaatgttttctacgacctacgccttctgccaacgaaagtccgttgtgggttcgttggtcgccactcaactcgtaatgagagtccccttaattgttataaggttcagcagctgattttaccgtaaaccatataggtagtgattagattacaagttatgtatagttatatatatattgtatgtaaaatgaagtagatatatatatcggtataattacattatatagggagggttccaagtacccatcacctgtcaactctacacattgtacctcagctccggcaatcaatgtaatgtaatgtaatgttttctacgacctacgccttctgccaacgaaagtccgttgtgggttcgttggtcgccactcaactcgtaatgagagtccccttaattgttataaggttcagcagctgatattaccgtaaaccatataggtagtgattagattacaagttatgtatagttatatatatattgtatgtaaaatgaagtagatatatatatcggtataattacattatatagggagggttccaagtacccatcacctgtcaactctacacattgtacctcagctccggcaatcaatgtaatgtaatgtaatgttttctacgacctacgccttctgccaacgaaagtccgttgtgggttcgttggtcgccactcaactcgtaatgagagtccccttaattgttataaggttcagcagctgattttaccgtaaaccatataggtagtgattagattacaagttatgtatagttatatatatattgtatgtaaaatgaagtagatatatatatcggtataattacattatatagggagggttccaagtacccatcacctgtcaactctacacattgtacctcagctccggcaatcaatgtaatgtaatgtaatgttttctacgacctacgccttctgccaacgaaagtccgttgtgggttcgttggtcgccactcaactcgtaatgagagtccccttaattgttataaggttcagcagctgatattaccgtaaaccatataggtagtgattagattacaagttatgtatagttatatatatattctcattagaatggctcttgaggaatcttttgactccaacactggctgggttcatgacttgcgttgtgctctccacaagctaggatccagtaaaaacatcaacattttggaggctgtcgatgtcgaaggcattatgtctgaagtttttgagtcatggaggtttaagtacccaagtgacaccaatgcagttagagacatccctgatgagagaagggttggctttaaacgcctccgataccaaaaatggttcgcagccaacagcaatgatgagaatggcttgattccctttacatccgccttacataagcaggatcagattcgttctatagcacagtttataatgggttcccattggctgaacacagaaagaatgagggtggtggatagagcacacatccctcgctcaatgagacactgtcaaatgtgtgggttccaaaaacctgaggatgaaatgcatatgtttgagtgccctttttataatgatattcgcctccgctaccagaagctgtttacagatatttataggcatgtccatgaggataccaacttaaccgtatggaatgtggaattctgcgattccacattcagaacctttatgaatggaaatggcactaagtctttttggagcaacctagccgactatctttctacttgtagaagagcaagacaggaagccctggactgcttagtggcaccgtaatttatcatccctttttttcttcttcttgtgacttctcatttgttagcttcttacctccgccactgtaagtggttgagatctgggtccggctctaaggggtttaatacctacgccaccaaaacggtggttgggagtttggtttgtttgtcctcgacacacccctgatgtaatggggttttttgctttgtgggtgctttttctttttgtttaaagcacagagtctcatacaccctcgcggtgtcaagtagactttaacatgtaatgtaatgtatattgtatgtaaaatgaagtagatatatatatcggtataattacattatatagggagggttccaagtacccatcacctgtcaactctacacattgtacctcagctccggcaatcaatgtaatgtaatgtaatgttttctacgacctacgccttctgccaacgaaagtccgttgtgggttcgttggtcgccactcaactcgtaatgagagtccccttaattgttataaggttcagcagctgatattaccgtaaaccatataggtagtgattagattacaagttatgtatagttatatatatattgtatgtaaaatgaagtagatatatatatcggtataattacattatatagggagggttccaagtacccatcacctgtcaactctacacattgtacctcagctccggcaatcaatgtaatgtaatgtaatgttttctacgacctacgccttctgccaacgaaagtccgttgtgggttcgttggtcgccactcaactcgtaatgagagtccccttaattgttataaggttcagcagctgattttaccgtaaaccatataggtagtgattagattacaagttatgtatagttatatatatattgtatgtaaaatgaagtagatatatatatcggtataattacattatatagggagggttccaagtacccatcacctgtcaactctacacattgtacctcagctccggcaatcaatgtaatgtaatgtaatgttttctacgacctacgccttctgccaacgaaagtccgttgtgggttcgttggtcgccactcaactcgtaatgagagtccccttaattgttataaggttcagcagctgatattaccgtaaaccatataggtagtgattagattacaagttatgtatagttatatatatattctcattagaatgg

SEQ ID NO: 284 - DNA, 20504 bp, unidentified
  misc_feature 1..20504: note = Fanzor polypeptide
  source 1..20504: mol_type = other DNA
atgtggttcgaaaacgagtcggacatgctggcaagacgcggggcacgcatgcagcgcgacgacatgtccaagctattcgtgtggatcgatggcaaaaaggtcccgttcacagcatgcattggctccaacatgcggaacgggtattattaccctaataacacgtggaatatccccttacataagagtccaggggcagggacgggggccgacatccgcagcaggctctgcgactctttagacatgtccctgaagaagggctgggtgccccgctggctccgcgtccgcgacacactggaactccggttcgtgcatggagaggggacgccgaaggtcaaggtgtcgcggaacgcgccgattgacgcgaggcggtgggggaaagaactcgtcggcatcgagttccgcgcgatcgacaacatgcccacgcaccaaatcgataatgtgcttcacctcgtcgtgctcttgggcgcagccgccgtctcgcaggtcgaaaaaatatggcatgacaacgccaactctgacccaaacacccaagccttcttcgccacgcacaccgccaccctctcgccccactggaacgccgcgctcgacgccgtccgcaagcagggagcgcacgccccattacccaaggcgtacaccacctacatcgcgtcccaggcgggtatttcatccctgaagacacgcaatgcatccgccaccgcgttcggtgcgctgcaggacttcgcgaagagccttcacgcagagtactgcgcccactccgtcacagccctcatgcatccgcggtcaaacgacgaaggaccgcctgcgttctcgaacaccaaccaggaggcgtgggaagcgatgtacaacgaattggatgctacggaaaaaatattggtagaaaagtcaaaattggacgcaccatatctcgtcgcaatgatgaacagagcaacgcattctacagtcggcggagcagtaaaacgaaacaaatatcagatggaaataaatgtacaacatcgccgttagaaaattggcgttaagaatgacttgggtgtgttaaaaaccccggtgtctccctgtaaaaaaaaacctatacaccagtttgacttttcaggctactttgaacatgtacactcggacaagggaattatgttacataattactgtatgttgaaatagactttaaggctcgttagagcggttagtccggacagcggtgtcaggtctacagtcggcggaacagtaaaatgaaacatatatcagatggaaataaatgtacgacatcgccgttagaaaattggcgttaagaatggtcgctgacttgggtgtgttaaaaacttctgtgtttacgaacatcagtcgttctactctgtggaggtggaaacgctttggtgtaaatcgaaaacgacatgaatttgtaagcaaactttttgagacgaacaaagatttgttgaaattgtttttattgtcaactcaatgcacaaccgcaagaggtgttgttgcatttttcaaaagtactcacaatttacgattatcaactaaaacagtgtatcgtttcataaaactcattggtttcacaagaaaaaggagcaaactccgtggacagtgtaaaggggacttagttccacttgtcactgaattttgtagtagatacaagtatacaattaatgctgggaaaattttagtatgagttgacgaatgtgggtttagtgagcgtctcaagccacattatgggtattcccctgtaggaaaacctgttatcgttaaaactactggtgggtgggtacaccatagtttgttgatggcagttttttcagatggtaggaaggagttcgttgtgaagaaaggatctgtgaagaagacagacttcgctgcatttattgactcattgagtttgtgcaataattcagtagtaataatggacaacgccagtatccataagaacttggtcctcagaagccccgtaaatatttgttacactcctccttacagtccagaattcaatgctattgagctgtgcttcgctaaggtgaagaaggactttcgtcgattgaactatataccaaacgatacaaagacgcacgtgtctgatatgatttccttagcattcagcaacctcactgataaaatcagtatgggttgttttgaccacgtatggaatacgtatgtgatgtttgtataaagagttctgtgatgtacaaattatgtaagatggcaacgaaacctccgacagtcgcaaaattgaaggagctactaaaattggccgaagtagcatactcctcaaaggacaagaaggacaatattgtccgtttatgcgaagacaatggtctcatcgccagaccccctccagagtacaagacggtggaaaagatgtgcgtcgtgaaatgcgccctgaagaaggcaatgagtcttgacgatgaagaattcggtaagttcagggggcatgtggatcagctcgtcaatgtggtgagccgcatgttacggcgttccagtctggtgctgactttccatgtcacgaggctcatggagggcgacctgccgattcctaatatgtacgatatgaaggatacctacttacattacattacattacattacattacatgttaaagtctacttgacaccgcgagggtgtatgagactctgtgctttaaacaaaaagaaaaagcacccacaaagcaaaaaaccccattacatcaggggtgtgtcgaggacaaacaaaccaaactcccaaccaccgttttggtggcgtaggtataaaaccccttagagcaggacccagatctcaaccacttacagtggcggaggtaagaagctaacaaatgagaagtctcaagaagaaaaaaaagggataataaattacggtgccactaagcagtccagggcttcctgtcttgctcttctacaagtagaaagatagtcggctaggttgctccaaaaagacttagtgccatttccattcataaaggttctgaatgtggaatcgcagaattccacattccatacggttaagtcggtatcctcatggacatgcctataaatatctgtaaacagattctggtagcggaggcgaatatcattataaaaagggcactcaaacatatgcatttcatcctcagttttttggaacccacacatttgacagtgtctcattgagcgagggatgtgtgctctatccaccaccctcattctttctgtgttcagccaatgggaacccattctaaactgtgctatagaacgaatctgatcctgcttatgtagggcggatgtaaagggaatcaagccattctcatcattgctgttggctgcgaaccatttttggtatcggaggcgtttaaagccaacccttctctcatcagggatgtctctaactgcattggtgtcacttgggtacttaaacctccatgactcaaaaacttcagacataataccttcgacatcgacagcctccaaaatgttgatgtttttactggatcctagcttgtggagagcacaacgcaagtcatgaacccagccagtgttggagtcaaaagattcctcaagagccattctaataagatcctcaggttctttatgtatggtcttgttccagaagcgcaaagcttgtttaagccaagcaaaacacaacggggttctacccagctcttccatgataatattagatgtagtagattggcaaacacccaacatttgtttaagtatacctctatgccatttctcacaagcatggtcatttgagataagtgtgttgttcagaatagaaggagcccacacctcacagccaaaattcaggataggttgtacaagagaatcaaacaggtgggtgagatatcaatattgtatatctccatagtatggcatcgcctacgaagcatgtggtgtgccttttgggccttagtgagcatcctagaaaaagcagcttttgcacgattgcttgagtcaccatccacaaagagggatcccaagtagataaaagataactttgtagaaagttgtgctccatcatagacaaatttgtaatcaggatccatgcgggcctcatcacagaattgtttgttgaaaacgacaatctcagttttctttatattcacagccatcttagtagcctcgcagaaatctctcaggcagtcaagcatcgcttgcatatctgccggggattctgccattatagctaggtcatcagcataaagtaacagttgcagaatctttcccctaagctcagcccctacatttgggagcttggattggaggaacgattcaattctatcaatgaacagaccgaataggattggggatagggggtctccttgtttaactcctacaagggatggaaaggaggatccaatgtccccatgtaggcgaacttggaaaacaacatgattatacatggacttcagaatactgagataggggtccttgactcctagccttgctaagcaatcccatagcaagtctctgttgacccaatcataagccttcttgaaatcaacaaaagccacaaagagtgtttttttcttttctctatatttatctacaatatggttaagaatgaatgatgcatctgcagtacccctaccacttctaaatccatattggccagcggctctgaggttgaattcttctgaccaatcatctagtctacgtagcatgcaaagggagaagatctttcctatggagttgctcaccgcaagacctcgatagttgtccttgtcatacacactgcctttggatttgggtacaggtaccaaggcagctgcagcccattggctagggtaagaagtcttccagatgagattaaacaggttagtcatagcttgtacaaatcgggagttggcctcatgggaagcaaatctgtaccattctgcagggataccatctaccccgggggaggagtttttccgtagggattggagaacagaaaacacctcctgggtggtaaagtcttgacataaccatgttggtgcggcctctatctgaggtccatcagcttgagggacaaagtccctagcatccagacttggatcaatacctacttgcacatcaaagaggtctgcaaaataatcagtccaatcatgaattgtgatatctgccgtagtggccttgttaggctcacgcacgtctttccaaaaacttttcggattatgccgaagattcgtatgaaggttctccatgcgtgtttctagccacttcctcttctttcttctgagaatcctcttgtactccttgtgcatagaaccagccaagtcagagctagagccatgttgatgttctgcttggcttgctgcctgtctagcacgattgcattcatcatcataccatgcgttcacgggcccgtgcttacgcttagctacaggtttgtgacatggtgtgcatttgcttatggctagttcaatagcactagcaatccccttctctgaatcttccatagatgagctatggagtgcattgtcaagtaatcggttaacgtctggatcacgcttaattgtgtgtgcatacatctggacatagttgtctttccatttcagtttgggcgaaggtttaccaccagcaggtgtactaatagtaccttgagaaggcctaagggcagcatctggtatgtggagtgtgataggcatgtggtcaaactttccacccccgggcctgagagggcagtcatgcttgggagccacactaaacttgactcctggggtgttgagaagactaggggcggctagcgcataatcaatgacagatttcttgtccatgccatctgcaaagaaggtatgtgcaccttgcatatcaccttctgttctaccgttaaggatgataagaccagttactacacatagctggagtagggccccccccaatcgattggggggagctgtgtccatgctacacctcggttgaatggtttggttgggggctgtactactggtttgggatactggttcatctcctaactcggtatcatcattgtccacaccaagaccaacccgagcgttgaagtcacccatcaccacaacgttgcctttttcctggaagttcccaatgattttacctagagtgaggaagtggtcctctatactaatgcagtcgtcaccatgtttgtagtatgagctgttagcatgtgggatatagcacacaccaatgtgtgttccatgtatgcgaatccatgccatgcctaattcaggtgcctcatggactaaagtagcatttaggcaagtgcagacatagatagcgacccccccatccttgctcaacttggggcgaggggcacaagaaaggcatttgaaacctggaatgtggggggtgtctagctggccacgcacccctgtgtgtgaaaacaataaaatgtcgtgttttctcaccactttcattgctgcaccgcagctgctcagaacactgagttgtcctctgatgttccatgcaaggcaccttagtccacttcatgcatcagtcgatgagacacctgaagggggagccttgtcccgcaccttcaggagtcctctattgaacgaaacccacttagaggggtccctcttagcttccagaaacgctggaaggtgttccttgtgcagcttcagctcctcaggagacaagaaatccagagctgctattccgctatccttgaggaaccttcggttcctcacaatggaggaagcatcgaagctggaggatactgtgattagggcaaggcggggtcgtgagggatccaccttgcctcccatgcgtcgagcggacacaatagtaaactctgccttgtcttgctccttctgggcgtaggtgttgttggcttctaaagcctgggtgagcttagactttacagccaccgctagctgcctgtcgttctcgttgggatcttcagggatgcctgagatcctgaattgcatgtcgtaacctgcttggtctgggggggctgagcccggtcgctgtatgagtggccgactccatgatgtgggtgaaatcacagccacggtcacccacatcaacgaaggagccgtgcccgtcacaactctcttccgagcactcggcatcgaaagcgatcgcgccatcctcaaaaccatcttccacgaagatccaggagaagagagaaacagggtcgaagtcgcattcatgcacgcatccatagccgcaggacacaagtccggagtaagcagccagagaggagccatagatttcctcataccacgcacacgattcaagtcccaactcgacctcaaaagcgtcctcacagacgacctcttcccaaaagtaggacgcacgttcgaggccaaagcaatcgccctaggagcagtcgtgagacatctcgtaagagccgctctaggaaaagaacccatgtcggtactcgatcactacgccaacaagagactcatgtgctcaggtgcaatcacagccaatctcttcagagacgcgtacctactatcaatcgcaacaaccctgcgcacgctcaacgaagagttcctcaccggaccatggcgcgtcgcaaacgatatacacacgctcgtcaacgaagccaacctaaaaaatatattccaaccaagaatcatccgagaagccctcgtacgagcactcaaaggatcgcgacgcggcgatgacaatgcacgcgcgcccgtccaagaactcagcagagtctcatatctaggatacatttcacacatgagacgagtaaacaaccccgtcgacaggaacgtcaagatagcagacacacactgtctaaggccgtcgcactggggagtcatctgcccagtagagtcaccggacggacccaacgtaggcctcctcacgcacctggccacgcttgtcaccatatcacttgccataccagaacccgtcgtacaagaaaccataagacccaccatagacaaatacacgaaacatctatcaaacagcacattatccccacaagcaaccgcggtgcactttaacgacacatggatagcgatcacagacacacccaaggacctagtcgatgcactacgaaaaatgaggacggaagacaccagaatgaacacactcggcgtcacatgggacgtgtggaggaacaacgtggcaatccgcacagatgcaggaagatgctgcagaccactaagaagagtacaggaaggaaaggtcgtaccaatcaacggcgatccgtcgtggaccgaattgatacgcagcggagcgatcaaaatgatagacgtcgaagaagtagctacatgtctagtggcaatgaacgaggcagacgtcaacaatcgagacccgatcccaggcagatacacgcacgcagagatacacgcaggaagcacactctcaatggtaagcaacacctacccactacttaaccacaacaacggggcgtacaactcactatgcctagcgcaatttaaacaagcgctaggcacgaccatgacctccctcagggatagattcgatacaaacacattcctactacaccacgcacaaaggccgctggtaagcacgagtttcgcagatagactcttcggaggacgtctcgcgcacggagagaacgtcgtagtagcaatcgccacatacacaggatacaaccaagatgacgccatcatcatcaatctagacgccgtgcagcgcggccgactagcactcacagtattcgacaccatccggtacgaggagtcagaggaggaaccagaggacccaaacattcaaaaaacaaaaaaccaaattgtgtttgcgaacccacagcggctagtgtcacgcgggtacgccctatcaaccaccaccaaaacaaccacaaaagaatataaaaacctcgacgaacatggaatgccaaagatcaacaaaatgctaagagaaggagacgcagttgtaggaatggtcaaggtaccatcgaccgcagcataggaagacgtcttcacggacgcatctcaacgtctacaatccagagaatccgaccttcccacatatgtagacggcgtccacttgcaaaacatagatcagaacacagcaaaagacaacgccataccacaacttagagcatgcaaggtacgtctccgccagatgcgcagccccgaactcggagacaaactaagctcgcggtacggccagaaggggtggtgggaatgatactacccgccgtggacatgccgttctgcgcagaggacggtatcgtacccgacatcatcatcaaccccaatgcattccccaaccgtaggacagtctctcatctactggaagccgtgctagcgcgcgagggagcagtcaaaggagctcgcatgaacgccgacacattcggaggcgaaaacatcggagccgcgctgacccaactgggtctgcgtgaaaacggacacgggaacatgctcatgcacaacggacgatccggagaagaggcgaaaacacgcatctttgtaggcgtgaattactacggtcgcttgaaacacatggtagaggacaagtaccagtcgcgtgcacgaggagcagtcgacgccacaacacgtcagccaacgaagtccaagggacagagcggagggctgcgcatcggagagatggagcagaacgcactcgtcgcacacggacttgcatcgttcacacgcgaagcgttcatgcagcgcagcgatcaccactcaactaaggtcaatgccacgtcaggaacgccggcggaatggtgggccgcagcacgcgaagacccagaaggacccgacgaggaggcaactgttgaaacaccttacacgttcaccctcatgcatcacgaactcagagcattgggggtggaggcagcgcttctcacatccactgatgaattttatttatagctcagtggcgttgggttgtttgagtttttccgtgtaaaattcgtacgaatcaatgtcgagcagttgcaccaacagatgtttacgaacaaccgcccgctttcctgcactcctcgataagcgtgcacagtcgctcgaactcttcgtagtccaagaatgtagtgtgaccggtgtagcgcatgaagcaaataggaacgccgttacaacatgccaacgcggcatccgctttgcttgccagatagcggtcaaacgtgtcggcaagttcgatgattataaagaatttcccaatctacagtcggcggaacagtaaaggaggacgtcgatgagttcagaacatctcaacgatgcagctgctgtaagacccgactttgcaacatggttgcactcactcatcgtaagaagcaagacggtacttgggaatgtacggaaggacgcaagcggattcacaagattctccactgcaaaagcagtcaaagcggagcgccacgccaacagagcggcggtaggctccactgcgggaagacttgggaccgcgacgtgaacgcttccaggaacatcttgatgcttacactccaccaagtctttgggagagagatacctctcgcgtttcgccgagacgcgccgagaggttcctcgaaaaacccaccaacaccagatactgatatggggacacagacggttgaacggtttaccacagaggcgactcggaatatcttcgagaacctcttcaacctgctgcaccccccaacgttgcccaaacgcaacgatctgcagtctggatgattagaaggtgtgtcccactttatttgagaacaactgtacaacatggaaaggccggatatctcaagacaatgcggaagcggaacaatatcattctgcaaaagcctttctttaccgaagtatatagatgagctaggtatttcgagatgttctgtctgcaaatgcagaggcccgatgattgactattcgcaacaattagtgttgaaaatatcaaaacggtcagacagcatgactctttttgaagccatagcacctgaaacatgatgtttgtaaactccatggtccggtcccagactcacccattgggttaaaaggtcgacgggcaggtgtcccattatttatgtccccgactgtagtagtaaaagatcgcatccccatcctacaatgttcaagtagtacgtgaataagttgccatatcgtgcatcaccatgatttattgtacgtattgagcttgctgcaaatcgggggctgaatgagggtgtttttgtgcttgcagatggaaaccatcagtttcaatggaaaaacattgaggaccgaagcaataatcgaggatgatggcccccttcgtggtgtgacatggtggacgaggacttgtgtgtcggcgacactacgacaataaagagtttatctactgatgttgggttgccttttagttgcacggtaaaatccggcttggctattcgtgcgggaagctcttggtaggatcggattccacgtagatccgatcaacagtccatgtgattccgctcatgtacttcccattacactcatatccccatacgtcggtcaaacgcccaatgagttgtaaagtgcatttcggagatactctattgtcccatgccatattgtaaattgttccgtttcttgtcaccaattgttcaggcaggtgccctacgttgatggtgcgatcagtgggagaaggtgccatgtgggtacaatcagggatagcaaatggcagcaacatattctcagcggctcggatctctgataattgtccatcatcaatcaccgatgcagtgcccctgttcaagttctctacatcaaccactgcaacaacaattggaaaatgctcatgaagcaaatccggtctatcatgcacgatgtatacgcacttggtttctgtatgcattttacacaatgaaaaacaaaaaaaatcatagcatgtaaccgatcatgggcggctttgagaactgaaggagaacacgattacgactaacacagcgaagcgaacgtaactgggatgttaattaactgagtctcgatattctctaattattccgtcgtcgactgtagccggataagcatttcggttcgaacccactttatttcccactttatttgataacaatgacaaggagtgataataacaacaacctcgcatctaatgggtacatgaaggacgctttagcggttgtcgcgttccttatcgcattggttgtgatcgttgggagatctcgctcatggtggtgttcgcccacacagagaaacttgatcatcctcgtgctcgtcgtgtgcgggtccatagaccttctcttcacactgaacccagagtggcacaaccgaccgttcacgggggccgacgcaccaagcgggtgcatctatttccaggccctatcgatgatagcaggtatagagtacgccgtattaagctgagtggatggtctgactctacagtcggcggaacagttaaatgaaacatatagccccaacgttgaaagttcgatgattataaagggtttcccacttttttttcacgtagtacttttgattccatgttcatgtaacaaatcatggaacttctccctgcaggcccactccacatcatcgcgtttcatttatcaaacagtgatgataaataccatcgattatgcgacgtctcagaggacgccgcgaacctcatgttggtgggaaacgtagggttcaccaagcttggtattgcggtgcaagagaagttggagcctgatggaaaccttgtgaaagatgaagagttcgagaggatgcgtattcacgagggtctttcagaggcaagcaaagcggatgttctaaagaaggcgtgtcgagatcgtggcctgatggtttctggtgtcaaagctgcattgtggaggaggctgatggaggcggaagttgtcgctcgcccccctagagggtgcatcctgtctgctaaattccgttccgaaatgagggctatgcgctgcgcacgcatgtgtgtgtcaaaggccaagttagagtatcgcttgaccgagagggatctcacgacgctgagttgcgaactcaaacgaaatccgatgtatcggtcagcagcaccgatgcgttgatatcgctcgggttgcgcttgagaagcatgcctcatcccatacacgtattcgagtccccgtcatatctgcggatgagcgacgtacctctcgggagacgttgctttccaagaagcttggtgacatgacgttggattccaggatattctccgtttcggaatccgcatgcagggccagagatttgtacgtgaattctggcagaggggggggtgctgtgaaagtcgctgcagacatcattgctacaaatactcgccttcacattttggagagggctctcgaggctcgcgggtgtgaacttcgcagtgactctcgtttgtgcacaggttttgttgacaacggcgacggagatccagaggacatcgctgtctcgatgcttgagatgaagttctttcacaaccacactgagtacgcttcaattctcgacgatctttgggaagagcgtgattacatcgacgagtacgagtacgacaattaccaccacatcgatcctcatgagctgagttcgtctgccaagtcggaagccatgaggcagtgggccgatacacacgatcttgacgatgtccctgacatacctgaaagcctgcgatcatctgtcttttatctgaaggcagagtgtatcgtttccgacaccaggaaagcgtggcgtgctcgccagcctcgaattcctgtccaagtcctcaataatatcgagacggtattctaccagatcctcaagcgcactcgcgacgcagagtccctggcatccctgcgatccacactcgaagatgcagagagtggactgtctgcgcgtgtggatgccgtttctgtgatgtgggataagatctgtgagtggccacatgcgattcccggtgcgaccgtgatattcgataccgagttcaagattctcaacgcgacccatcctacctacatcgcttccgcggataagtttcgtatcaataaggaggagaaggcacgtctcaagaaagagagagaggataagtttcgtatcgagaaggaggagaaggcacgtctcaaatatatcgagaaggcccgtttcaagaaagagagggtggagaagtgtcttatcgataaagagagttgtgtttgtccggattgccaaaagacgtgtaagaccccagatggtgtaaggatgcacattgttgacaaacacatcaacatctaatgtgagcgctcagccacctgtagaagatgtctagttcgctttcataaccattattttgttgacgctcttaacgttttaacattttaacggtttaacattaaaaaattgtgtgttttcataaaacacggatgtgaattctccaatctctatttgtaccccactcttcgaacgatgttaaaacgttataacgttaattggaagtctaaaatctacccccttctcgcaatagaggagaagatgtctagttcgctttcataaccattattttgttgacgctcttaacgttttaacattttaacggtttaacattaaaaattgtgtgttttcataaaacacggatgtgaattctccaatctctatttgtaccccactcttcgaacgatgttaaaacgttaaaacgttaattggaagtctaaaatctacccccttctcgcaatagaggagaagatgtctagttcgccttcataaccattattttgttgacgctcttaacgttttaacattttaacggtttaacattaaaaaattgtgtgttttcataaaacacggatgtgaattctccaatcactatttgtaccccactcttcgaacgatgttaaaacgttaaaacgttaattggaagtctaaaatctacccccttctcgcaataaaggagaagagacgattactgattacttgagtgcggcttgtccttcaatgggcactctcgaacgtgtaccgacaaagggagtctggtggatggaggggtgtgatctaaaacaacccacggtactcgttcatcttgcaatttagatggaccccactaacttgattcctcgaatgaccccgcgcttcacaaccttcttcttctcctcctccgtagagactgtcacctgcgaggtctcttcccactcggttccctgtttgcccaaaaagaacgccttgtccaacttagtgctgaatactgaagatgtctcgtgtccatagtgggacactttccaccgactcttgaggtccccgatccacaccgcgtccgaagacgcccccatcacctcaaccacttcctctagccattcagccagggggttggcactgtccgcaataccagacttccactcggtcatcgagaccggtagggtgtcgaagattctggatcgccccggtcgacgaaagtgctcgatgagcagctgcgtcagcgcagacctccaggttggtaggatgtctgcaaggtcgtcacggcgctcaaactcgtgctcgcgctgtgggtcggggtgtatcaagaaatttgagcgcattaggacaatgatcatccgcttgacgaaggcactgtctcctccgtcgaacttgggacaatcgccttcgttgaagatcattactacaccagcctgccacatgaatttcgaaagagttccccgtgccacacgagcgcccgcaaacacgcacaccttccccccccgcaatgcgcttgatcaacgcctcgtccaacgcgatgttgtgtttcatttcttcggccaccagtcttcggccacgcccttcattggcttgagacccgcgtcatggtcatcgcggctccgggcgaacgacccctttgtcagaaattttgtcctattgctgctcccgtactcatcaaaaaagctaccaaaaaaagccagaagggtactcttcccgttgtcaccagatgtcttatcggtgaaggctaggaatttcttttccttgcggcgaccggacaggagtcctgcaaagaatgcgaggacgacgtcgcgctcctcgtccacaggcatgagcttccgctagaaatcatcgagttcatccctgcatcgcttgaggtggtggttgtcctctccctggtaatcccactttgcgcacctactaatgttgtcggtcatctcgacttttcggaacactactgtgtccctcgacgagctgtcgaagacgccgttgttgactgcaaagagatccgggttgatatcgaggttatcagcgaatgtctcgtcaaggacgagagatgcaacggattgaaggaacgcagaacgtcctctaattgtgtcgacaaacccccgaatcttctcattcgtcttgttattcttctcaacagggaatttggatgtgaactcgattttgattaatttgctgatccgcatgttgctgcagtttgaccaacgattggtagcagggtcacagtaatacatgtcgccaacacattccttcttcttgatttctggcacaaacttgattcggctgaagaattcaggtgaggcctccatgaacttctccgccagcacatcctcagtgattgaggacgacgacaatgagtcatcatcagttcccccccccacgtggatgttgatggtattgttgaccaggaagatgttctgagtgatgccatacatgttcttcgcgtgggactcttgagccttgaagatcatgttatggattgcgttgatgacctgcttgtctcggatcttgcatgcgttgcacgtgatggattgcacatttacatattggctttcacttcccatattcatgaatgcgatgtgcacgtcggcgctcttcacaatggcactgctaattgttttgccatccatggtccgcagctcgcattcgtaggggcctttgtcgctaggcacgttcttcatgaaccccgggtcttcgtggatcgggaacttgtcgatcagcgatccataatatttgtcatcgacctccaccatgtattggttcttgtggatggctcctttcgctccgttttccatattgaactcgatgctatcgtgtacgacatccaataatatcatgttgtcaatgtgcaagtggattagctttaacttgaggtcgttgatgatgcgatccttgtcgagttgcacgtctggtttgttttctttgttgtcccattgtcagacccattcggagtaccccatcgggtcatcctccttggcaaggaagcatagtgtccctagagtgatcttttgcggcttaagattggcccacaccttttcgtgcttggtgtcacagaactttgaggggcatttttttgcaaaagccttccagatctcgaggcgctgagtgtctgtgcccgtgtctactttgttcttcaacgccatcccgaccttcagccatgaatcgtatccgctggccctgtgtacatcgagtatgtccacgagattgtagagggagtccacatccattccatgatgcgagtcgaaagtcttcttaggctccgacaagttgtcgtcaccacggatcaccatttcctcctggctgtgtttggtttatgggctgtggccccccttcggatgcacacagatgctcagtttctgcacgagtgtatcgagatccatttgctgtacgtcacgtttcgcgaacgagcctgcgccaatatcgaattggtaccaggcagtgactttccacgggtgggcctcatccggtttcttcgatccgtacaagaaccacctgcctccccgtttgatcacgctttcgtcatatatctttccgggatccatttcggcaagtccaggaatgcaaatggtgctcgcgaacgccatatgttcggtcacatcgttgacgaagtgctctctgatggcgagttggatctcttggtgtgtgatgacatttggcatgagcacgtgtagaccatctttgtacacccctaagtgtttcttgtcgagtcttggatttggcttctcgaggatcacgacgtccatgtgctgctggtcgacaaagtactttgtggccgccacgagcgcgtccatgaaattctcgatatgcttctgtgtgtagatgtgctctggggtcgtctgtcgcatgtccaggtcaatgatgacgggcgaggtgtctgtgtgggcctcgacgatagacatgggtcgaccctcatccctgagcgcgtgcacgtaggcctcgcggaacgcctgtgcctgaggtccaccatcagggatcgcgaacgaaccgaacatggggtcccccatggcaccgtgggttgcctcggtgggggcagggaagctcttgacatgtgccgccaccagaagagcatcgggggatgacatatcgggtgtaatgccgttatcgttttcactttataccgaatcgatcaattcgcccttcacgtatgtgcttcgcgaagctcactcccctgcacatccaagaacacccccacccacctaagattcgcaccgcaagtcggcagaaaccgctgccatcaacctccaacatccatggacctcgtaaaaacgctcgatataaagctcgcgacaagcatcttggttgagtcaagccgtcccttgtgtatcatccatggcgcaccacacccaacacgtcgtgtacgccctcgtcgagcgcgagttcctgggcaagtccccgttggtagtcaaggtcggccggaccagccagccgttctgcaagaggctctcgcagtaccccaatggatcccagctcatttttgccatccatgttcgagatgcacaagcgtgcgtggatgcagaggcgacactgctcaggtacatgcgcggtggttacgattcccgaatccagccacgaagagatgtgggtgcagagtacttcgaggtgggcgaagccaccgtttacaatggtatgttagcggccgttttgaagtacgcatggtacggcgacgactgcggtggcaaacaggaggagtgggacactccacgtgatgactccgtgaaatccgccgttgaatctgagggatccgtggaatctgtgaaatctgaggagacggaccaggagcgtatggatcgtgagacgtacgtctcacgtgtggtgactgtgatttttgacaacgtcgttcaggctaacatcgagcgttacgatacggtgcacgcctttgtcgaggccaatgcaacagagctgtctggtgtggtgttggatcagggcgcatttgtcgattgggtattgttgaaactacccgccgccctcaggtcgagcttcaccaccaagaaagtggtatcatcgctcaaggatctgggcatccaacccatccagtacattttcgacggcctgctgcctcgtcatgccctgcggttcccagacttcactcgccacaagaaggtcatccgcttcctggatgagcggtgcattgccaccaaccccggcgatctgcggtcgcagatcgccacgaccccgggcatgtacaacgcttacgtcacgttctgcgaggaggaggggctacaggcgactgttgctgacgttgtcgagctggctcaggtggtcaaggagtgcggcctggacacgaggtacaccctgcaaaaagctaccttcgaagccatcctgctgattgagtggctcaacagtgtggtggaggtgacgggtgactcgcgcgatgctatatgggttggtgacctcaaagcgctgtggaaggagacgcatgttggcgcagaggccaatgtcttaaaccacaaattggtcaaggcatacgttgccaccaaggcgggggtggagtggaagaggattggccgtatcaagacgggtggtgggtcatttgtgaagaatggggtggtcatggggtgcacattgaggtgcgtagtataagtcaacccccgcttattgagtggctcaacagtgtggtggaggtgacgggtgactcgcgtgatgctatatgggttggcgcttcgcttcccctcccaagctttttagagagaagccgattcgagcatattttatagcacctttccaagctgcaattcatataaaggtgttccgctttgttgaagaagacaccaccaatgacaatgtccgcatcaagggtacctgaaattcccaatgtattggttaatgtaatattgtcccagatatgcggttgcgttgtggaatccatgagacgcctgcccacaggctcccctttgaagacggttcgtgcggcattgcgccgctcgtgtacgtatgtatgttgaatcaggagcacgcgaccttcgtcggtgaggacatatgggaaactgtttttcaattggtctgcaggatctgcagcagaaaagtgtgtagaggtgatgtgaaatgctcgtatcgaaacgcggtaatgctgattctcggacgcggatgtgagtggtgtgacgctcacccgaagactttcaaagtgtattggcagtttggcacacgcatttgtcagacatgtctacgggaaaacactatttgcgattttgctgtcaagaatgacctgaaggagttgggtccagaggttgtttcgtatatttgtcggggactgccctctatcacaattggcatgtacaaacaatatgtcgacctcacctacgacctcacatttctctggagcgccgatgtgtatgcgcgtgcgcgggagttccttcgaaaggatgtgggttgtttcggcgacatttcttcttattcttgctacaccgagctttgcgaaatcgcaacagcaaaagtaatcgcggacaaggaggctgcacgactcttgtgcgtctccatgcggaaggcatcgttggatgaattggatgaccacatcatgtcgtctcaagatcttgcacatgtgttcgagtgctgcgcaagtgttgtgcccaagggtcagctgcgcgacaagctggtgcc
